United States Patent Application Publication US 2025/0223376 A1 - sequence listing, part 2

SEQ ID NO: 1490 - protein, 7 aa, synthetic construct
  REGION 1..7: note = source = /note="Description of Artificial Sequence: Synthetic peptide"
GLSGGRS

SEQ ID NO: 1491 - protein, 7 aa, synthetic construct
  REGION 1..7: note = source = /note="Description of Artificial Sequence: Synthetic peptide"
LMLPRAD

SEQ ID NO: 1492 - protein, 9 aa, synthetic construct
  REGION 1..9: note = source = /note="Description of Artificial Sequence: Synthetic peptide"
CSCFRDVCC

SEQ ID NO: 1493 - protein, 9 aa, synthetic construct
  REGION 1..9: note = source = /note="Description of Artificial Sequence: Synthetic peptide"
CRDVVSVIC

SEQ ID NO: 1494 - protein, 6 aa, synthetic construct
  REGION 1..6: note = source = /note="Description of Artificial Sequence: Synthetic peptide"
MARSGL

SEQ ID NO: 1495 - protein, 6 aa, synthetic construct
  REGION 1..6: note = source = /note="Description of Artificial Sequence: Synthetic peptide"
MARAKE

SEQ ID NO: 1496 - protein, 6 aa, synthetic construct
  REGION 1..6: note = source = /note="Description of Artificial Sequence: Synthetic peptide"
MSRTMS

SEQ ID NO: 1497 - protein, 6 aa, synthetic construct
  REGION 1..6: note = source = /note="Description of Artificial Sequence: Synthetic peptide"
KCCYSL

SEQ ID NO: 1498 - protein, 14 aa, synthetic construct
  REGION 1..14: note = source = /note="Description of Artificial Sequence: Synthetic peptide"
MYWGDSHWLQYWYE

SEQ ID NO: 1499 - protein, 7 aa, synthetic construct
  REGION 1..7: note = source = /note="Description of Artificial Sequence: Synthetic peptide"
MQLPLAT

SEQ ID NO: 1500 - protein, 4 aa, synthetic construct
  REGION 1..4: note = source = /note="Description of Artificial Sequence: Synthetic peptide"
EWLS

SEQ ID NO: 1501 - protein, 4 aa, synthetic construct
  REGION 1..4: note = source = /note="Description of Artificial Sequence: Synthetic peptide"
SNEW

SEQ ID NO: 1502 - protein, 4 aa, synthetic construct
  REGION 1..4: note = source = /note="Description of Artificial Sequence: Synthetic peptide"
TNYL

SEQ ID NO: 1503 - protein, 12 aa, synthetic construct
  REGION 1..12: note = source = /note="Description of Artificial Sequence: Synthetic peptide"
WDLAWMFRLPVG

SEQ ID NO: 1504 - protein, 13 aa, synthetic construct
  REGION 1..13: note = source = /note="Description of Artificial Sequence: Synthetic peptide"
CTVALPGGYVRVC

SEQ ID NO: 1505 - protein, 13 aa, synthetic construct
  REGION 1..13: note = source = /note="Description of Artificial Sequence: Synthetic peptide"
CVAYCIEHHCWTC

SEQ ID NO: 1506 - protein, 12 aa, synthetic construct
  REGION 1..12: note = source = /note="Description of Artificial Sequence: Synthetic peptide"
CVFAHNYDYLVC

SEQ ID NO: 1507 - protein, 10 aa, synthetic construct
  REGION 1..10: note = source = /note="Description of Artificial Sequence: Synthetic peptide"
CVFTSNYAFC

SEQ ID NO: 1508 - protein, 7 aa, synthetic construct
  REGION 1..7: note = source = /note="Description of Artificial Sequence: Synthetic peptide"
VHSPNKK

SEQ ID NO: 1509 - protein, 7 aa, synthetic construct
  REGION 1..7: note = source = /note="Description of Artificial Sequence: Synthetic peptide"
CRGDGWC

SEQ ID NO: 1510 - protein, 6 aa, synthetic construct
  VARIANT 1: note = Any amino acid
  VARIANT 6: note = Any amino acid
  REGION 1..6: note = source = /note="Description of Artificial Sequence: Synthetic peptide"
XRGCDX

SEQ ID NO: 1511 - skipped

SEQ ID NO: 1512 - protein, 11 aa, synthetic construct
  REGION 1..11: note = source = /note="Description of Artificial Sequence: Synthetic peptide"
SGKGPRQITAL

SEQ ID NO: 1513 - protein, 14 aa, synthetic construct
  VARIANT 10: note = /replace="Gln"
  VARIANT 11: note = /replace="Ala"
  VARIANT 12: note = /replace="Tyr"
  VARIANT 13: note = /replace="Val" or "Met" or "Arg"
  VARIANT 14: note = /replace="Lys"
  SITE 1..14: note = /note="Variant residues given in the sequence have no preference with respect to those in the annotations for variant positions"
  REGION 1..14: note = source = /note="Description of Artificial Sequence: Synthetic peptide"
AAAAAAAAAANLTR

SEQ ID NO: 1514 - protein, 6 aa, synthetic construct
  REGION 1..6: note = source = /note="Description of Artificial Sequence: Synthetic peptide"
VYMSPF

SEQ ID NO: 1515 - protein, 7 aa, synthetic construct
  REGION 1..7: note = source = /note="Description of Artificial Sequence: Synthetic peptide"
ATWLPPR

SEQ ID NO: 1516 - protein, 12 aa, synthetic construct
  REGION 1..12: note = source = /note="Description of Artificial Sequence: Synthetic peptide"
HTMYYHHYQHHL

SEQ ID NO: 1517 - protein, 19 aa, synthetic construct
  REGION 1..19: note = source = /note="Description of Artificial Sequence: Synthetic peptide"
SEVGCRAGPLQWLCEKYFG

SEQ ID NO: 1518 - protein, 18 aa, synthetic construct
  REGION 1..18: note = source = /note="Description of Artificial Sequence: Synthetic peptide"
CGLLPVGRPDRNVWRWLC

SEQ ID NO: 1519 - protein, 15 aa, synthetic construct
  REGION 1..15: note = source = /note="Description of Artificial Sequence: Synthetic peptide"
CKGQCDRFKGLPWEC

SEQ ID NO: 1520 - protein, 5 aa, synthetic construct
  REGION 1..5: note = source = /note="Description of Artificial Sequence: Synthetic peptide"
SGRSA

SEQ ID NO: 1521 - protein, 4 aa, synthetic construct
  REGION 1..4: note = source = /note="Description of Artificial Sequence: Synthetic peptide"
WGFP

SEQ ID NO: 1522 - protein, 17 aa, synthetic construct
  REGION 1..17: note = source = /note="Description of Artificial Sequence: Synthetic peptide"
AEPMPHSLNFSQYLWYT

SEQ ID NO: 1523 - protein, 6 aa, synthetic construct
  VARIANT 4: note = /replace="Phe"
  SITE 1..6: note = /note="Variant residues given in the sequence have no preference with respect to those in the annotations for variant positions"
  REGION 1..6: note = source = /note="Description of Artificial Sequence: Synthetic peptide"
WAYWSP

SEQ ID NO: 1524 - protein, 7 aa, synthetic construct
  REGION 1..7: note = source = /note="Description of Artificial Sequence: Synthetic peptide"
IELLQAR

SEQ ID NO: 1525 - protein, 16 aa, synthetic construct
  REGION 1..16: note = source = /note="Description of Artificial Sequence: Synthetic peptide"
AYTKCSRQWRTCMTTH

SEQ ID NO: 1526 - protein, 15 aa, synthetic construct
  REGION 1..15: note = source = /note="Description of Artificial Sequence: Synthetic peptide"
PQNSKIPGPTFLDPH

SEQ ID NO: 1527 - protein, 15 aa, synthetic construct
  REGION 1..15: note = source = /note="Description of Artificial Sequence: Synthetic peptide"
SMEPALPDWWWKMFK

SEQ ID NO: 1528 - protein, 16 aa, synthetic construct
  REGION 1..16: note = source = /note="Description of Artificial Sequence: Synthetic peptide"
ANTPCGPYTHDCPVKR

SEQ ID NO: 1529 - protein, 12 aa, synthetic construct
  REGION 1..12: note = source = /note="Description of Artificial Sequence: Synthetic peptide"
TACHQHVRMVRP

SEQ ID NO: 1530 - protein, 12 aa, synthetic construct
  REGION 1..12: note = source = /note="Description of Artificial Sequence: Synthetic peptide"
VPWMEPAYQRFL

SEQ ID NO: 1531 - protein, 8 aa, synthetic construct
  REGION 1..8: note = source = /note="Description of Artificial Sequence: Synthetic peptide"
DPRATPGS

SEQ ID NO: 1532 - protein, 12 aa, synthetic construct
  REGION 1..12: note = source = /note="Description of Artificial Sequence: Synthetic peptide"
FRPNRAQDYNTN

SEQ ID NO: 1533 - protein, 9 aa, synthetic construct
  REGION 1..9: note = source = /note="Description of Artificial Sequence: Synthetic peptide"
CTKNSYLMC

SEQ ID NO: 1534 - protein, 11 aa, synthetic construct
  VARIANT 2: note = /replace="Arg"
  VARIANT 3: note = /replace="Arg"
  VARIANT 5: note = /replace="Asn"
  VARIANT 6..7: note = Any amino acid
  VARIANT 9: note = /replace="Val"
  SITE 1..11: note = /note="Variant residues given in the sequence have no preference with respect to those in the annotations for variant positions"
  REGION 1..11: note = source = /note="Description of Artificial Sequence: Synthetic peptide"
CQLTGXXGAGC

SEQ ID NO: 1535 - protein, 9 aa, synthetic construct
  REGION 1..9: note = source = /note="Description of Artificial Sequence: Synthetic peptide"
CPIEDRPMC

SEQ ID NO: 1536 - protein, 12 aa, synthetic construct
  REGION 1..12: note = source = /note="Description of Artificial Sequence: Synthetic peptide"
HEWSYLAPYPWF

SEQ ID NO: 1537 - protein, 9 aa, synthetic construct
  REGION 1..9: note = source = /note="Description of Artificial Sequence: Synthetic peptide"
MCPKHPLGC

SEQ ID NO: 1538 - protein, 15 aa, synthetic construct
  REGION 1..15: note = source = /note="Description of Artificial Sequence: Synthetic peptide"
RMWPSSTVNLSAGRR

SEQ ID NO: 1539 - protein, 20 aa, synthetic construct
  REGION 1..20: note = source = /note="Description of Artificial Sequence: Synthetic peptide"
SAKTAVSQRVWLPSHRGGEP

SEQ ID NO: 1540 - protein, 20 aa, synthetic construct
  REGION 1..20: note = source = /note="Description of Artificial Sequence: Synthetic peptide"
KSREHVNNSACPSKRITAAL

SEQ ID NO: 1541 - protein, 4 aa, synthetic construct
  REGION 1..4: note = source = /note="Description of Artificial Sequence: Synthetic peptide"
EGFR

SEQ ID NO: 1542 - protein, 6 aa, synthetic construct
  REGION 1..6: note = source = /note="Description of Artificial Sequence: Synthetic peptide"
AGLGVR

SEQ ID NO: 1543 - protein, 15 aa, synthetic construct
  REGION 1..15: note = source = /note="Description of Artificial Sequence: Synthetic peptide"
GTRQGHTMRLGVSDG

SEQ ID NO: 1544 - protein, 15 aa, synthetic construct
  REGION 1..15: note = source = /note="Description of Artificial Sequence: Synthetic peptide"
IAGLATPGWSHWLAL

SEQ ID NO: 1545 - protein, 7 aa, synthetic construct
  REGION 1..7: note = source = /note="Description of Artificial Sequence: Synthetic peptide"
SMSIARL

SEQ ID NO: 1546 - protein, 7 aa, synthetic construct
  REGION 1..7: note = source = /note="Description of Artificial Sequence: Synthetic peptide"
HTFEPGV

SEQ ID NO: 1547 - protein, 15 aa, synthetic construct
  REGION 1..15: note = source = /note="Description of Artificial Sequence: Synthetic peptide"
NTSLKRISNKRIRRK

SEQ ID NO: 1548 - protein, 15 aa, synthetic construct
  REGION 1..15: note = source = /note="Description of Artificial Sequence: Synthetic peptide"
LRIKRKRRKRKKTRK

SEQ ID NO: 1549 - DNA, 21 bp, Adeno-associated virus 2
  source 1..21: mol_type = genomic DNA
agcvvmdcaggarscascaac

SEQ ID NO: 1550 - protein, 7 aa, synthetic construct
  REGION 1..7: note = source = /note="Description of Artificial Sequence: Synthetic peptide"
SDSGASN

SEQ ID NO: 1551 - protein, 7 aa, synthetic construct
  REGION 1..7: note = source = /note="Description of Artificial Sequence: Synthetic peptide"
SPSGASN

SEQ ID NO: 1552 - protein, 7 aa, synthetic construct
  REGION 1..7: note = source = /note="Description of Artificial Sequence: Synthetic peptide"
SHSGASN

SEQ ID NO: 1553 - protein, 7 aa, synthetic construct
  REGION 1..7: note = source = /note="Description of Artificial Sequence: Synthetic peptide"
SRSGASN

SEQ ID NO: 1554 - protein, 7 aa, synthetic construct
  REGION 1..7: note = source = /note="Description of Artificial Sequence: Synthetic peptide"
SKSGASN

SEQ ID NO: 1555 - protein, 7 aa, synthetic construct
  REGION 1..7: note = source = /note="Description of Artificial Sequence: Synthetic peptide"
SNSGASN

SEQ ID NO: 1556 - protein, 7 aa, synthetic construct
  REGION 1..7: note = source = /note="Description of Artificial Sequence: Synthetic peptide"
SGSGASN

SEQ ID NO: 1557 - protein, 7 aa, synthetic construct
  REGION 1..7: note = source = /note="Description of Artificial Sequence: Synthetic peptide"
SASGASN

SEQ ID NO: 1558 - protein, 7 aa, synthetic construct
  REGION 1..7: note = source = /note="Description of Artificial Sequence: Synthetic peptide"
SESGTSN

SEQ ID NO: 1559 - protein, 7 aa, synthetic construct
  REGION 1..7: note = source = /note="Description of Artificial Sequence: Synthetic peptide"
STTGGSN

SEQ ID NO: 1560 - protein, 7 aa, synthetic construct
  REGION 1..7: note = source = /note="Description of Artificial Sequence: Synthetic peptide"
SSAGSTN

SEQ ID NO: 1561 - protein, 6 aa, synthetic construct
  REGION 1..6: note = source = /note="Description of Artificial Sequence: Synthetic peptide"
NNDSQA

SEQ ID NO: 1562 - protein, 6 aa, synthetic construct
  REGION 1..6: note = source = /note="Description of Artificial Sequence: Synthetic peptide"
NNRNQA

SEQ ID NO: 1563 - protein, 6 aa, synthetic construct
  REGION 1..6: note = source = /note="Description of Artificial Sequence: Synthetic peptide"
NNNKQA

SEQ ID NO: 1564 - protein, 6 aa, synthetic construct
  REGION 1..6: note = source = /note="Description of Artificial Sequence: Synthetic peptide"
NAKRQA

SEQ ID NO: 1565 - protein, 6 aa, synthetic construct
  REGION 1..6: note = source = /note="Description of Artificial Sequence: Synthetic peptide"
NDEHQA

SEQ ID NO: 1566 - protein, 6 aa, synthetic construct
  REGION 1..6: note = source = /note="Description of Artificial Sequence: Synthetic peptide"
NTSQKA

SEQ ID NO: 1567 - protein, 25 aa, synthetic construct
  REGION 1..25: note = source = /note="Description of Artificial Sequence: Synthetic peptide"
YYLSRTNTPSGTDTQSRLVFSQAGA

SEQ ID NO: 1568 - protein, 25 aa, synthetic construct
  REGION 1..25: note = source = /note="Description of Artificial Sequence: Synthetic peptide"
YYLSRTNTDSGTETQSGLDFSQAGA

SEQ ID NO: 1569 - protein, 25 aa, synthetic construct
  REGION 1..25: note = source = /note="Description of Artificial Sequence: Synthetic peptide"
YYLSRTNTESGTPTQSALEFSQAGA

SEQ ID NO: 1570 - protein, 25 aa, synthetic construct
  REGION 1..25: note = source = /note="Description of Artificial Sequence: Synthetic peptide"
YYLSRTNTHSGTHTQSPLHFSQAGA

SEQ ID NO: 1571 - protein, 25 aa, synthetic construct
  REGION 1..25: note = source = /note="Description of Artificial Sequence: Synthetic peptide"
YYLSRTNTSSGTITISHLIFSQAGA

SEQ ID NO: 1572 - protein, 25 aa, synthetic construct
  REGION 1..25: note = source = /note="Description of Artificial Sequence: Synthetic peptide"
YYLSRTNTRSGIMTKSSLMFSQAGA

SEQ ID NO: 1573 - protein, 25 aa, synthetic construct
  REGION 1..25: note = source = /note="Description of Artificial Sequence: Synthetic peptide"
YYLSRTNTKSGRKTLSNLSFSQAGA

SEQ ID NO: 1574 - protein, 25 aa, synthetic construct
  REGION 1..25: note = source = /note="Description of Artificial Sequence: Synthetic peptide"
YYLSRTNDGSGPVTPSKLRFSQRGA

SEQ ID NO: 1575 - protein, 25 aa, synthetic construct
  REGION 1..25: note = source = /note="Description of Artificial Sequence: Synthetic peptide"
YYLSRTNAASGHATHSDLKFSQPGA

SEQ ID NO: 1576 - protein, 25 aa, synthetic construct
  REGION 1..25: note = source = /note="Description of Artificial Sequence: Synthetic peptide"
YYLSRTNGQAGSLTMSELGFSQVGA

SEQ ID NO: 1577 - protein, 25 aa, synthetic construct
  REGION 1..25: note = source = /note="Description of Artificial Sequence: Synthetic peptide"
YYLSRTNSTGGNQTTSQLLFSQLSA

SEQ ID NO: 1578 - protein, 25 aa, synthetic construct
  REGION 1..25: note = source = /note="Description of Artificial Sequence: Synthetic peptide"
YFLSRTNNNTGLNTNSTLNFSQGRA

SEQ ID NO: 1579 - protein, 16 aa, synthetic construct
  REGION 1..16: note = source = /note="Description of Artificial Sequence: Synthetic peptide"
SKTGADNNNSEYSWTG

SEQ ID NO: 1580 - protein, 16 aa, synthetic construct
  REGION 1..16: note = source = /note="Description of Artificial Sequence: Synthetic peptide"
SKTDADNNNSEYSWTG

SEQ ID NO: 1581 - protein, 16 aa, synthetic construct
  REGION 1..16: note = source = /note="Description of Artificial Sequence: Synthetic peptide"
SKTEADNNNSEYSWTG

SEQ ID NO: 1582 - protein, 16 aa, synthetic construct
  REGION 1..16: note = source = /note="Description of Artificial Sequence: Synthetic peptide"
SKTPADNNNSEYSWTG

SEQ ID NO: 1583 - protein, 16 aa, synthetic construct
  REGION 1..16: note = source = /note="Description of Artificial Sequence: Synthetic peptide"
SKTHADNNNSEYSWTG

SEQ ID NO: 1584 - protein, 16 aa, synthetic construct
  REGION 1..16: note = source = /note="Description of Artificial Sequence: Synthetic peptide"
SKTQADNNNSEYSWTG

SEQ ID NO: 1585 - protein, 16 aa, synthetic construct
  REGION 1..16: note = source = /note="Description of Artificial Sequence: Synthetic peptide"
SKTIADNNNSEYSWTG

SEQ ID NO: 1586 - protein, 16 aa, synthetic construct
  REGION 1..16: note = source = /note="Description of Artificial Sequence: Synthetic peptide"
SKTMADNNNSEYSWTG

SEQ ID NO: 1587 - protein, 16 aa, synthetic construct
  REGION 1..16: note = source = /note="Description of Artificial Sequence: Synthetic peptide"
SKTRADNNNSEYSWTG

SEQ ID NO: 1588 - protein, 16 aa, synthetic construct
  REGION 1..16: note = source = /note="Description of Artificial Sequence: Synthetic peptide"
SKTNADNNNSEYSWTG

SEQ ID NO: 1589 - protein, 16 aa, synthetic construct
  REGION 1..16: note = source = /note="Description of Artificial Sequence: Synthetic peptide"
SKTVGRNNNSEYSWTG

SEQ ID NO: 1590 - protein, 16 aa, synthetic construct
  REGION 1..16: note = source = /note="Description of Artificial Sequence: Synthetic peptide"
SKTADRNNNSEYSWTG

SEQ ID NO: 1591 - protein, 16 aa, synthetic construct
  REGION 1..16: note = source = /note="Description of Artificial Sequence: Synthetic peptide"
SKKLSQNNNSKYSWQG

SEQ ID NO: 1592 - protein, 16 aa, synthetic construct
  REGION 1..16: note = source = /note="Description of Artificial Sequence: Synthetic peptide"
SKPTTGNNNSDYSWPG

SEQ ID NO: 1593 - protein, 16 aa, synthetic construct
  REGION 1..16: note = source = /note="Description of Artificial Sequence: Synthetic peptide"
STQKNENNNSNYSWPG

SEQ ID NO: 1594 - protein, 8 aa, synthetic construct
  REGION 1..8: note = source = /note="Description of Artificial Sequence: Synthetic peptide"
HKDDEGKF

SEQ ID NO: 1595 - protein, 8 aa, synthetic construct
  REGION 1..8: note = source = /note="Description of Artificial Sequence: Synthetic peptide"
HKDDNRKF

SEQ ID NO: 1596 - protein, 8 aa, synthetic construct
  REGION 1..8: note = source = /note="Description of Artificial Sequence: Synthetic peptide"
HKDDTNKF

SEQ ID NO: 1597 - protein, 8 aa, synthetic construct
  REGION 1..8: note = source = /note="Description of Artificial Sequence: Synthetic peptide"
HEDSDKNF

SEQ ID NO: 1598 - protein, 8 aa, synthetic construct
  REGION 1..8: note = source = /note="Description of Artificial Sequence: Synthetic peptide"
HRDGADSF

SEQ ID NO: 1599 - protein, 8 aa, synthetic construct
  REGION 1..8: note = source = /note="Description of Artificial Sequence: Synthetic peptide"
HGDNKSRF

SEQ ID NO: 1600 - protein, 14 aa, synthetic construct
  REGION 1..14: note = source = /note="Description of Artificial Sequence: Synthetic peptide"
KQGSEKTNVDFEEV

SEQ ID NO: 1601 - protein, 14 aa, synthetic construct
  REGION 1..14: note = source = /note="Description of Artificial Sequence: Synthetic peptide"
KQGSEKTNVDSEEV

SEQ ID NO: 1602 - protein, 14 aa, synthetic construct
  REGION 1..14: note = source = /note="Description of Artificial Sequence: Synthetic peptide"
KQGSEKTNVDVEEV

SEQ ID NO: 1603 - protein, 14 aa, synthetic construct
  REGION 1..14: note = source = /note="Description of Artificial Sequence: Synthetic peptide"
KQGSDKTNVDDAGV

SEQ ID NO: 1604 - protein, 14 aa, synthetic construct
  REGION 1..14: note = source = /note="Description of Artificial Sequence: Synthetic peptide"
KQGSSKTNVDPREV

SEQ ID NO: 1605 - protein, 14 aa, synthetic construct
  REGION 1..14: note = source = /note="Description of Artificial Sequence: Synthetic peptide"
KQGSRKTNVDHKQV

SEQ ID NO: 1606 - protein, 14 aa, synthetic construct
  REGION 1..14: note = source = /note="Description of Artificial Sequence: Synthetic peptide"
KQGSKGGNVDTNRV

SEQ ID NO: 1607 - protein, 14 aa, synthetic construct
  REGION 1..14: note = source = /note="Description of Artificial Sequence: Synthetic peptide"
KQGSGEANVDNGDV

SEQ ID NO: 1608 - protein, 14 aa, synthetic construct
  REGION 1..14: note = source = /note="Description of Artificial Sequence: Synthetic peptide"
KQDAAADNIDYDHV

SEQ ID NO: 1609 - protein, 14 aa, synthetic construct
  REGION 1..14: note = source = /note="Description of Artificial Sequence: Synthetic peptide"
KQSGTRSNAAASSV

SEQ ID NO: 1610 - protein, 14 aa, synthetic construct
  REGION 1..14: note = source = /note="Description of Artificial Sequence: Synthetic peptide"
KENTNTNDTELTNV

SEQ ID NO: 1611 - protein, 14 aa, synthetic construct
  REGION 1..14: note = source = /note="Description of Artificial Sequence: Synthetic peptide"
QRGNNVAATADVNT

SEQ ID NO: 1612 - protein, 14 aa, synthetic construct
  REGION 1..14: note = source = /note="Description of Artificial Sequence: Synthetic peptide"
QRGNNEAATADVNT

SEQ ID NO: 1613 - protein, 14 aa, synthetic construct
  REGION 1..14: note = source = /note="Description of Artificial Sequence: Synthetic peptide"
QRGNNPAATADVNT

SEQ ID NO: 1614 - protein, 14 aa, synthetic construct
  REGION 1..14: note = source = /note="Description of Artificial Sequence: Synthetic peptide"
QRGNNHAATADVNT

SEQ ID NO: 1615 - protein, 14 aa, synthetic construct
  REGION 1..14: note = source = /note="Description of Artificial Sequence: Synthetic peptide"
QEENNIAATPGVNT

SEQ ID NO: 1616 - protein, 14 aa, synthetic construct
  REGION 1..14: note = source = /note="Description of Artificial Sequence: Synthetic peptide"
QPPNNMAATHEVNT

SEQ ID NO: 1617 - protein, 14 aa, synthetic construct
  REGION 1..14: note = source = /note="Description of Artificial Sequence: Synthetic peptide"
QHHNNSAATTIVNT

SEQ ID NO: 1618 - protein, 14 aa, synthetic construct
  REGION 1..14: note = source = /note="Description of Artificial Sequence: Synthetic peptide"
QTTNNRAAFNMVET

SEQ ID NO: 1619 - protein, 14 aa, synthetic construct
  REGION 1..14: note = source = /note="Description of Artificial Sequence: Synthetic peptide"
QKKNNNAASKKVAT

SEQ ID NO: 1620 - protein, 14 aa, synthetic construct
  REGION 1..14: note = source = /note="Description of Artificial Sequence: Synthetic peptide"
QGGNNKAADDAVKT

SEQ ID NO: 1621 - protein, 14 aa, synthetic construct
  REGION 1..14: note = source = /note="Description of Artificial Sequence: Synthetic peptide"
QAAKGGAADDAVKT

SEQ ID NO: 1622 - protein, 14 aa, synthetic construct
  REGION 1..14: note = source = /note="Description of Artificial Sequence: Synthetic peptide"
QDDRAAAANESVDT

SEQ ID NO: 1623 - protein, 14 aa, synthetic construct
  REGION 1..14: note = source = /note="Description of Artificial Sequence: Synthetic peptide"
QQQHDDAAYQRVHT

SEQ ID NO: 1624 - protein, 14 aa, synthetic construct
  REGION 1..14: note = source = /note="Description of Artificial Sequence: Synthetic peptide"
QSSSSLAAVSTVQT

SEQ ID NO: 1625 - protein, 14 aa, synthetic construct
  REGION 1..14: note = source = /note="Description of Artificial Sequence: Synthetic peptide"
QNNQTTAAIRNVTT

SEQ ID NO: 1626 - protein, 12 aa, synthetic construct
  REGION 1..12: note = source = /note="Description of Artificial Sequence: Synthetic peptide"
NYNKKSDNVDFT

SEQ ID NO: 1627 - protein, 12 aa, synthetic construct
  REGION 1..12: note = source = /note="Description of Artificial Sequence: Synthetic peptide"
NYNKKSENVDFT

SEQ ID NO: 1628 - protein, 12 aa, synthetic construct
  REGION 1..12: note = source = /note="Description of Artificial Sequence: Synthetic peptide"
NYNKKSLNVDFT

SEQ ID NO: 1629 - protein, 12 aa, synthetic construct
  REGION 1..12: note = source = /note="Description of Artificial Sequence: Synthetic peptide"
NYNKKSPNVDFT

SEQ ID NO: 1630 - protein, 12 aa, synthetic construct
  REGION 1..12: note = source = /note="Description of Artificial Sequence: Synthetic peptide"
NYSKKSHCVDFT

SEQ ID NO: 1631 - protein, 11 aa, synthetic construct
  REGION 1..11: note = source = /note="Description of Artificial Sequence: Synthetic peptide"
NYRKTIYVDFT

SEQ ID NO: 1632 - protein, 11 aa, synthetic construct
  REGION 1..11: note = source = /note="Description of Artificial Sequence: Synthetic peptide"
NYKEKKDVHFT

SEQ ID NO: 1633 - protein, 11 aa, synthetic construct
  REGION 1..11: note = source = /note="Description of Artificial Sequence: Synthetic peptide"
NYGHRAIVQFT

SEQ ID NO: 1634 - protein, 11 aa, synthetic construct
  REGION 1..11: note = source = /note="Description of Artificial Sequence: Synthetic peptide"
NYANHQFVVCT

SEQ ID NO: 1635 - protein, 12 aa, synthetic construct
  REGION 1..12: note = source = /note="Description of Artificial Sequence: Synthetic peptide"
NYDDDPTGVLLT

SEQ ID NO: 1636 - protein, 11 aa, synthetic construct
  REGION 1..11: note = source = /note="Description of Artificial Sequence: Synthetic peptide"
NYDDPTGVLLT

SEQ ID NO: 1637 - protein, 11 aa, synthetic construct
  REGION 1..11: note = source = /note="Description of Artificial Sequence: Synthetic peptide"
NFEQQNSVEWT

SEQ ID NO: 1638 - protein, 7 aa, synthetic construct
  REGION 1..7: note = source = /note="Description of Artificial Sequence: Synthetic peptide"
SQSGASN

SEQ ID NO: 1639 - protein, 6 aa, synthetic construct
  REGION 1..6: note = source = /note="Description of Artificial Sequence: Synthetic peptide"
NNGSQA

SEQ ID NO: 1640 - protein, 25 aa, synthetic construct
  REGION 1..25: note = source = /note="Description of Artificial Sequence: Synthetic peptide"
YYLSRTNTPSGTTTWSRLQFSQAGA

SEQ ID NO: 1641 - protein, 16 aa, synthetic construct
  REGION 1..16: note = source = /note="Description of Artificial Sequence: Synthetic peptide"
SKTSADNNNSEYSWTG

SEQ ID NO: 1642 - protein, 8 aa, synthetic construct
  REGION 1..8: note = source = /note="Description of Artificial Sequence: Synthetic peptide"
HKDDEEKF

SEQ ID NO: 1643 - protein, 14 aa, synthetic construct
  REGION 1..14: note = source = /note="Description of Artificial Sequence: Synthetic peptide"
KQGSEKTNVDIEEV

SEQ ID NO: 1644 - protein, 14 aa, synthetic construct
  REGION 1..14: note = source = /note="Description of Artificial Sequence: Synthetic peptide"
QRGNNQAATADVNT

SEQ ID NO: 1645 - protein, 12 aa, synthetic construct
  REGION 1..12: note = source = /note="Description of Artificial Sequence: Synthetic peptide"
NYNKKSVNVDFT

SEQ ID NO: 1646 - protein, 42 aa, synthetic construct
  REGION 1..42: note = source = /note="Description of Artificial Sequence: Synthetic polypeptide"
SQSGASNYNTPSGTTTQSRLQFSTSADNNNSEYSWTGATKYH

SEQ ID NO: 1647 - protein, 42 aa, synthetic construct
  REGION 1..42: note = source = /note="Description of Artificial Sequence: Synthetic polypeptide"
SASGASNFNSEGGSLTQSSLGFSTDGENNNSDFSWTGATKYH

SEQ ID NO: 1648 - protein, 42 aa, synthetic construct
  REGION 1..42: note = source = /note="Description of Artificial Sequence: Synthetic polypeptide"
SQSGASNYNTPSGTTTQSRLQFSTDGENNNSDFSWTGATKYH

SEQ ID NO: 1649 - protein, 42 aa, synthetic construct
  REGION 1..42: note = source = /note="Description of Artificial Sequence: Synthetic polypeptide"
SASGASNYNTPSGTTTQSRLQFSTSADNNNSEFSWPGATTYH

SEQ ID NO: 1650 - protein, 42 aa, synthetic construct
  REGION 1..42: note = source = /note="Description of Artificial Sequence: Synthetic polypeptide"
SQSGASNFNSEGGSLTQSSLGFSTDGENNNSDFSWTGATKYH

SEQ ID NO: 1651 - protein, 42 aa, synthetic construct
  REGION 1..42: note = source = /note="Description of Artificial Sequence: Synthetic polypeptide"
SASGASNYNTPSGSLTQSSLGFSTDGENNNSDFSWTGATKYH

SEQ ID NO: 1652 - protein, 42 aa, synthetic construct
  REGION 1..42: note = source = /note="Description of Artificial Sequence: Synthetic polypeptide"
SQSGASNYNTPSGTTTQSRLQFSTSADNNNSDFSWTGATKYH

SEQ ID NO: 1653 - protein, 42 aa, synthetic construct
  REGION 1..42: note = source = /note="Description of Artificial Sequence: Synthetic polypeptide"
SGAGASNFNSEGGSLTQSSLGFSTDGENNNSDFSWTGATKYH

SEQ ID NO: 1654 - protein, 7 aa, synthetic construct
  REGION 1..7: note = source = /note="Description of Artificial Sequence: Synthetic peptide"
SGAGASN

SEQ ID NO: 1655 - protein, 15 aa, synthetic construct
  REGION 1..15: note = source = /note="Description of Artificial Sequence: Synthetic peptide"
NSEGGSLTQSSLGFS

SEQ ID NO: 1656 - protein, 11 aa, synthetic construct
  REGION 1..11: note = source = /note="Description of Artificial Sequence: Synthetic peptide"
TDGENNNSDFS

SEQ ID NO: 1657 - protein, 10 aa, synthetic construct
  REGION 1..10: note = source = /note="Description of Artificial Sequence: Synthetic peptide"
SEFSWPGATT

SEQ ID NO: 1658 - protein, 13 aa, synthetic construct
  REGION 1..13: note = source = /note="Description of Artificial Sequence: Synthetic peptide"
TSADNNNSDFSWT

SEQ ID NO: 1659 - protein, 8 aa, synthetic construct
  REGION 1..8: note = source = /note="Description of Artificial Sequence: Synthetic peptide"
SQSGASNY

SEQ ID NO: 1660 - protein, 15 aa, synthetic construct
  REGION 1..15: note = source = /note="Description of Artificial Sequence: Synthetic peptide"
NTPSGTTTQSRLQFS

SEQ ID NO: 1661 - protein, 19 aa, synthetic construct
  REGION 1..19: note = source = /note="Description of Artificial Sequence: Synthetic peptide"
TSADNNNSEYSWTGATKYH

SEQ ID NO: 1662 - protein, 8 aa, synthetic construct
  REGION 1..8: note = source = /note="Description of Artificial Sequence: Synthetic peptide"
SASGASNF

SEQ ID NO: 1663 - protein, 19 aa, synthetic construct
  REGION 1..19: note = source = /note="Description of Artificial Sequence: Synthetic peptide"
TDGENNNSDFSWTGATKYH

SEQ ID NO: 1664 - protein, 8 aa, synthetic construct
  REGION 1..8: note = source = /note="Description of Artificial Sequence: Synthetic peptide"
SASGASNY

SEQ ID NO: 1665 - protein, 19 aa, synthetic construct
  REGION 1..19: note = source = /note="Description of Artificial Sequence: Synthetic peptide"
TSADNNNSEFSWPGATTYH

SEQ ID NO: 1666 - protein, 15 aa, synthetic construct
  REGION 1..15: note = source = /note="Description of Artificial Sequence: Synthetic peptide"
NTPSGSLTQSSLGFS

SEQ ID NO: 1667 - protein, 19 aa, synthetic construct
  REGION 1..19: note = source = /note="Description of Artificial Sequence: Synthetic peptide"
TSADNNNSDFSWTGATKYH

SEQ ID NO: 1668 - protein, 8 aa, synthetic construct
  REGION 1..8: note = source = /note="Description of Artificial Sequence: Synthetic peptide"
SGAGASNF

SEQ ID NO: 1669 - DNA, 48 bp, synthetic construct
  variation 20: note = a, c, t, or g
  variation 35: note = a, c, t, or g
  misc_feature 1..48: note = source = /note="Description of Artificial Sequence: Synthetic oligonucleotide"
  source 1..48: mol_type = other DNA
ctccagvvsvvsmrsrvcvnsgcagctdhcvvsrnsgtcvmsacacaa

SEQ ID NO: 1670 - DNA, 48 bp, synthetic construct
  misc_feature 1..48: note = source = /note="Description of Artificial Sequence: Synthetic oligonucleotide"
  source 1..48: mol_type = other DNA
ctccagagaggcaacagacaagcagctaccgcagatgtcaacacacaa

SEQ ID NO: 1671 - protein, 7 aa, synthetic construct
  REGION 1..7: note = source = /note="Description of Artificial Sequence: Synthetic peptide"
SAAGASN

SEQ ID NO: 1672 - protein, 24 aa, synthetic construct
  REGION 1..24: note = source = /note="Description of Artificial Sequence: Synthetic peptide"
YFLSRTNTESGSTTQSTLRFSQAG

SEQ ID NO: 1673 - protein, 13 aa, synthetic construct
  REGION 1..13: note = source = /note="Description of Artificial Sequence: Synthetic peptide"
SKTSADNNNSDFS

SEQ ID NO: 1674 - protein, 14 aa, synthetic construct
  REGION 1..14: note = source = /note="Description of Artificial Sequence: Synthetic peptide"
KQGSEKTDVDIDKV

SEQ ID NO: 1675 - protein, 7 aa, synthetic construct
  REGION 1..7: note = source = /note="Description of Artificial Sequence: Synthetic peptide"
STAGASN

SEQ ID NO: 1676 - protein, 24 aa, synthetic construct
  REGION 1..24: note = source = /note="Description of Artificial Sequence: Synthetic peptide"
YFLSRTNTTSGIETQSTLRFSQAG

SEQ ID NO: 1677 - protein, 13 aa, synthetic construct
  REGION 1..13: note = source = /note="Description of Artificial Sequence: Synthetic peptide"
SKTDGENNNSDFS

SEQ ID NO: 1678 - protein, 14 aa, synthetic construct
  REGION 1..14: note = source = /note="Description of Artificial Sequence: Synthetic peptide"
KQGAAADDVEIDGV

SEQ ID NO: 1679 - protein, 7 aa, synthetic construct
  REGION 1..7: note = source = /note="Description of Artificial Sequence: Synthetic peptide"
SEAGASN

SEQ ID NO: 1680 - protein, 24 aa, synthetic construct
  REGION 1..24: note = source = /note="Description of Artificial Sequence: Synthetic peptide"
YYLSRTNTPSGTTTQSRLQFSQAG

SEQ ID NO: 1681 - protein, 13 aa, synthetic construct
  REGION 1..13: note = source = /note="Description of Artificial Sequence: Synthetic peptide"
SKTSADNNNSEYS

SEQ ID NO: 1682 - protein, 14 aa, synthetic construct
  REGION 1..14: note = source = /note="Description of Artificial Sequence: Synthetic peptide"
KQGSEKTNVDIEKV

SEQ ID NO: 1683 - protein, 24 aa, synthetic construct
  REGION 1..24: note = source = /note="Description of Artificial Sequence: Synthetic peptide"
YFLSRTNDASGSDTKSTLLFSQAG

SEQ ID NO: 1684 - protein, 13 aa, synthetic construct
  REGION 1..13: note = source = /note="Description of Artificial Sequence: Synthetic peptide"
STTPSENNNSEYS

SEQ ID NO: 1685 - protein, 7 aa, synthetic construct
  REGION 1..7: note = source = /note="Description of Artificial Sequence: Synthetic peptide"
SAAGATN

SEQ ID NO: 1686 - protein, 24 aa, synthetic construct
  REGION 1..24: note = source = /note="Description of Artificial Sequence: Synthetic peptide"
YFLSRTNGEAGSATLSELRFSQAG

SEQ ID NO: 1687 - protein, 8 aa, synthetic construct
  REGION 1..8: note = source = /note="Description of Artificial Sequence: Synthetic peptide"
HGDDADRF

SEQ ID NO: 1688 - protein, 14 aa, synthetic construct
  REGION 1..14: note = source = /note="Description of Artificial Sequence: Synthetic peptide"
KQGAEKSDVEVDRV

SEQ ID NO: 1689 - protein, 14 aa, synthetic construct
  REGION 1..14: note = source = /note="Description of Artificial Sequence: Synthetic peptide"
KQDSGGDNIDIDQV

SEQ ID NO: 1690 - protein, 7 aa, synthetic construct
  REGION 1..7: note = source = /note="Description of Artificial Sequence: Synthetic peptide"
SDAGASN

SEQ ID NO: 1691 - protein, 24 aa, synthetic construct
  REGION 1..24: note = source = /note="Description of Artificial Sequence: Synthetic peptide"
YFLSRTNTEGGHDTQSTLRFSQAG

SEQ ID NO: 1692 - protein, 14 aa, synthetic construct
  REGION 1..14: note = source = /note="Description of Artificial Sequence: Synthetic peptide"
KEDGGGSDVAIDEV

SEQ ID NO: 1693 - protein, 7 aa, synthetic construct
  REGION 1..7: note = source = /note="Description of Artificial Sequence: Synthetic peptide"
SNAGASN

SEQ ID NO: 1694 - protein, 24 aa, synthetic construct
  REGION 1..24: note = source = /note="Description of Artificial Sequence: Synthetic peptide"
YFLSRTNGEAGSATLSELRFSQPG

SEQ ID NO: 1695 - DNA, 21 bp, synthetic construct
  misc_feature 1..21: note = source = /note="Description of Artificial Sequence: Synthetic oligonucleotide"
  source 1..21: mol_type = other DNA
agcvvmdcaggarscascaac

SEQ ID NO: 1696 - DNA, 18 bp, synthetic construct
  misc_feature 1..18: note = source = /note="Description of Artificial Sequence: Synthetic oligonucleotide"
  source 1..18: mol_type = other DNA
aacracrrsmrsmaggca

SEQ ID NO: 1697 - DNA, 24 bp, synthetic construct
  misc_feature 1..24: note = source = /note="Description of Artificial Sequence: Synthetic oligonucleotide"
  source 1..24: mol_type = other DNA
cacrrggacrrcrmsrrsarsttt

SEQ ID NO: 1698 - DNA, 75 bp, synthetic construct
  variation 35: note = a, c, t, or g
  misc_feature 1..75: note = source = /note="Description of Artificial Sequence: Synthetic oligonucleotide"
  source 1..75: mol_type = other DNA
tatttcttgagcagaacaaacrvcvvsrscggamncvhsacgmhstcavvscttvdsttttctcagsbcrgsgcg

SEQ ID NO: 1699 - DNA, 48 bp, synthetic construct
  variation 11: note = a, c, t, or g
  misc_feature 1..48: note = source = /note="Description of Artificial Sequence: Synthetic oligonucleotide"
  source 1..48: mol_type = other DNA
tcaamammavnsrvcsrsaacaacaacagtrasttctcgtggmmagga

SEQ ID NO: 1700 - DNA, 42 bp, synthetic construct
  variation 31: note = a, c, t, or g
  misc_feature 1..42: note = source = /note="Description of Artificial Sequence: Synthetic oligonucleotide"
  source 1..42: mol_type = other DNA
aagsaarrcrscrvsrvarvcratrycgmsnhcrvmvrsgtc

SEQ ID NO: 1701 - DNA, 42 bp, synthetic construct
  variation 17: note = a, c, t, or g
  variation 32: note = a, c, t, or g
  misc_feature 1..42: note = source = /note="Description of Artificial Sequence: Synthetic oligonucleotide"
  source 1..42: mol_type = other DNA
cagvvsvvsmrsrvcvnsgcagctdhcvvsrnsgtcvmsaca

SEQ ID NO: 1702 - DNA, 33 bp, synthetic construct
  misc_feature 1..33: note = source = /note="Description of Artificial Sequence: Synthetic oligonucleotide"
  source 1..33: mol_type = other DNA
aactwcrvsvasmvsvhsddtgtgswstksact

SEQ ID NO: 1703 - DNA, 30 bp, synthetic construct
  misc_feature 1..30: note = source = /note="Description of Artificial Sequence: Synthetic oligonucleotide"
  source 1..30: mol_type = other DNA
ttgttgaacatcaccacgtgacgcacgttc

SEQ ID NO: 1704 - DNA, 30 bp, synthetic construct
  misc_feature 1..30: note = source = /note="Description of Artificial Sequence: Synthetic oligonucleotide"
  source 1..30: mol_type = other DNA
tccccgtggttctactacataatgtggccg

SEQ ID NO: 1705 - DNA, 30 bp, synthetic construct
  misc_feature 1..30: note = source = /note="Description of Artificial Sequence: Synthetic oligonucleotide"
  source 1..30: mol_type = other DNA
ttccacactccgttttggataatgttgaac

SEQ ID NO: 1706 - DNA, 30 bp, synthetic construct
  misc_feature 1..30: note = source = /note="Description of Artificial Sequence: Synthetic oligonucleotide"
  source 1..30: mol_type = other DNA
agggacatccccagctccatgctgtggtcg

SEQ ID NO: 1707 - DNA, 30 bp, synthetic construct
  misc_feature 1..30: note = source = /note="Description of Artificial Sequence: Synthetic oligonucleotide"
  source 1..30: mol_type = other DNA
agggacaacccctccgactcgccctaatcc

SEQ ID NO: 1708 - DNA, 30 bp, synthetic construct
  misc_feature 1..30: note = source = /note="Description of Artificial Sequence: Synthetic oligonucleotide"
  source 1..30: mol_type = other DNA
tcctagtagaagacaccctctcactgcccg

SEQ ID NO: 1709 - DNA, 30 bp, synthetic construct
  misc_feature 1..30: note = source = /note="Description of Artificial Sequence: Synthetic oligonucleotide"
  source 1..30: mol_type = other DNA
agtaccatgtacacccactctcccagtgcc

SEQ ID NO: 1710 - DNA, 30 bp, synthetic construct
  misc_feature 1..30: note = source = /note="Description of Artificial Sequence: Synthetic oligonucleotide"
  source 1..30: mol_type = other DNA
atatggacgttcatgctgatcaccataccg

SEQ ID NO: 1711 - DNA, 30 bp, synthetic construct
  misc_feature 1..30: note = source = /note="Description of Artificial Sequence: Synthetic oligonucleotide"
  source 1..30: mol_type = other DNA
agcaggagctccttggcctcagcgtgcgag

SEQ ID NO: 1712 - DNA, 30 bp, synthetic construct
  misc_feature 1..30: note = source = /note="Description of Artificial Sequence: Synthetic oligonucleotide"
  source 1..30: mol_type = other DNA
acaagcagcttcactatgacaaccactgac

SEQ ID NO: 1713 - DNA, 284 bp, synthetic construct
  variation 59: note = a, c, t, or g
  variation 244: note = a, c, t, or g
  misc_feature 1..284: note = source = /note="Description of Artificial Sequence: Synthetic polynucleotide"
  source 1..284: mol_type = other DNA
cagcctaggaactggcttcctggaccctgttaccgccagcagagagtctcaamammavnsrvcsrsaacaacaacagtrasttctcctggmmaggagctaccaagtaccacctcaatggcagagactctctggtgaatcccggaccagctatggcaagccacrrggacrrcrmsrrsarsttttttcctcagagcggggttctcatctttgggaagsaarrcrscrvsrvarvcratrycgmsnhcrvmvrsgtcatgattacagacgaagaggagatctggac

SEQ ID NO: 1714 - DNA, 34 bp, synthetic construct
  misc_feature 1..34: note = source = /note="Description of Artificial Sequence: Synthetic oligonucleotide"
  source 1..34: mol_type = other DNA
tgggacaatggcggtcgtctctcagagttktkkt

SEQ ID NO: 1715 - DNA, 35 bp, synthetic construct
  misc_feature 1..35: note = source = /note="Description of Artificial Sequence: Synthetic oligonucleotide"
  source 1..35: mol_type = other DNA
agaggacckktcctcgatggttcatggtggagtta

SEQ ID NO: 1716 - DNA, 31 bp, synthetic construct
  misc_feature 1..31: note = source = /note="Description of Artificial Sequence: Synthetic oligonucleotide"
  source 1..31: mol_type = other DNA
ccacttagggcctggtcgataccgttcggtg

SEQ ID NO: 1717 - DNA, 32 bp, synthetic construct
  misc_feature 1..32: note = source = /note="Description of Artificial Sequence: Synthetic oligonucleotide"
  source 1..32: mol_type = other DNA
tctcgccccaagagtagaaacccttcsttyyg

SEQ ID NO: 1718 - protein, 735 aa, Adeno-associated virus 2 [sequence omitted]

SEQ ID NO: 1719 - protein, 736 aa, Adeno-associated virus 9; identical to SEQ ID NO: 134

SEQ ID NO: 1720 - protein, 7 aa, synthetic construct
  REGION 1..7: note = source = /note="Description of Artificial Sequence: Synthetic peptide"
GSTPPPM

SEQ ID NO: 1721 - protein, 7 aa, synthetic construct
  REGION 1..7: note = source = /note="Description of Artificial Sequence: Synthetic peptide"
GETRAPL

SEQ ID NO: 1722 - protein, 6 aa, synthetic construct
  REGION 1..6: note = source = /note="Description of Artificial Sequence: Synthetic peptide"
SPAKFA

SEQ ID NO: 1723 - protein, 6 aa, synthetic construct
  REGION 1..6: note = source = /note="Description of Artificial Sequence: Synthetic peptide"
NKDKLN

SEQ ID NO: 1724 - DNA, 12 bp, synthetic construct
  misc_feature 1..12: note = source = /note="Description of Artificial Sequence: Synthetic oligonucleotide"
  source 1..12: mol_type = other DNA
agaaagaggcga

SEQ ID NO: 1725 - DNA, 12 bp, synthetic construct
  misc_feature 1..12: note = source = /note="Description of Artificial Sequence: Synthetic oligonucleotide"
  source 1..12: mol_type = other DNA
cgggccaagcgg

SEQ ID NO: 1726 - DNA, 54 bp, synthetic construct
  misc_feature 1..54: note = source = /note="Description of Artificial Sequence: Synthetic oligonucleotide"
  source 1..54: mol_type = other DNA
gagggcagaggaagtcttctaacatgcggtgacgtggaggagaatcccggccct

SEQ ID NO: 1727 - DNA, 75 bp, synthetic construct
  misc_feature 1..75: note = source = /note="Description of Artificial Sequence: Synthetic oligonucleotide"
  source 1..75: mol_type = other DNA
ggaagcggagtgaaacagactttgaattttgaccttctcaagttggcgggagacgtggagtccaaccctggacct

SEQ ID NO: 1728 - DNA, 66 bp, synthetic construct
  misc_feature 1..66: note = source = /note="Description of Artificial Sequence: Synthetic oligonucleotide"
  source 1..66: mol_type = other DNA
ggaagcggagctactaacttcagcctgctgaagcaggctggagacgtggaggagaaccctggacct

SEQ ID NO: 1729 - DNA, 18 bp, synthetic construct
  misc_feature 1..18: note = source = /note="Description of Artificial Sequence: Synthetic oligonucleotide"
  source 1..18: mol_type = other DNA
tccggaggcggcggcagc

SEQ ID NO: 1730 - DNA, 45 bp, synthetic construct
  misc_feature 1..45: note = source = /note="Description of Artificial Sequence: Synthetic oligonucleotide"
  source 1..45: mol_type = other DNA
ggtggtggtggtagcggcggcggcggctctggtggtggtggatcc

SEQ ID NO: 1731 - DNA, 75 bp, synthetic construct
  misc_feature 1..75: note = source = /note="Description of Artificial Sequence: Synthetic oligonucleotide"
  source 1..75: mol_type = other DNA
ggcggaggtggctccggaggcggaggcagcggcggaggtgggtctggcggaggcgggtgcggcggaggtggctcc

SEQ ID NO: 1732 - DNA, 609 bp, synthetic construct
  misc_feature 1..609: note = source = /note="Description of Artificial Sequence: Synthetic polynucleotide"
  source 1..609: mol_type = other DNA
aattccgcccctctcccccccccccctctccctcccccccccctaacgttactggccgaagccgcttggaataaggccggtgtgcgtttgtctatatgttattttccaccatattgccgtcttttggcaatgtgagggcccggaaacctggccctgtcttcttgacgagcattcctaggggtctttcccctctcgccaaaggaatgcaaggtctgttgaatgtcgtgaaggaagcagttcctctggaagcttcttgaagacaaacaacgtctgtagcgaccctttgcaggcagcggaaccccccacctggcgacaggtgcctctgcggccaaaagccacgtgtataagatacacctgcaaaggcggcacaaccccagtgccacgttgtgagttggatagttgtggaaagagtcaaatggctctcctcaagcgtattcaacaaggggctgaaggatgcccagaaggtaccccattgtatgggatctgatctggggcctcggtgcacatgctttacatgtgtttagtcgaggttaaaaaaacgtctaggccccccgaaccacggggacgtggttttcctttgaaaaacacgatgataatatggccacaacc

SEQ ID NO: 1733 - DNA, 623 bp, synthetic construct
  misc_feature 1..623: note = source = /note="Description of Artificial Sequence: Synthetic polynucleotide"
  source 1..623: mol_type = other DNA
taacgaattccgcccctctcccccccccccctctccctcccccccccctaacgttactggccgaagccgcttggaataaggccggtgtgcgtttgtctatatgttattttccaccatattgccgtcttttggcaatgtgagggcccggaaacctggccctgtcttcttgacgagcattcctaggggtctttcccctctcgccaaaggaatgcaaggtctgttgaatgtcgtgaaggaagcagttcctctggaagcttcttgaagacaaacaacgtctgtagcgaccctttgcaggcagcggaaccccccacctggcgacaggtgcctctgcggccaaaagccacgtgtataagatacacctgcaaaggcggcacaaccccagtgccacgttgtgagttggatagttgtggaaagagtcaaatggctctcctcaagcgtattcaacaaggggctgaaggatgcccagaaggtaccccattgtatgggatctgatctggggcctcggtgcacatgctttacatgtgtttagtcgaggttaaaaaaacgtctaggccccccgaaccacggggacgtggttttcctttgaaaaacacgatgataatatggccacaaccgccgccacc

SEQ ID NO: 1734 - DNA, 54 bp, synthetic construct
  misc_feature 1..54: note = source = /note="Description of Artificial Sequence: Synthetic oligonucleotide"
  source 1..54: mol_type = other DNA
gtggagaggaagtgctgcgtggagtgcccaccatgccctgcccctcctgtggcc

SEQ ID NO: 1735 - DNA, 108 bp, synthetic construct
  misc_feature 1..108: note = source = /note="Description of Artificial Sequence: Synthetic polynucleotide"
  source 1..108: mol_type = other DNA
gagctcaaaaccccacttggtgacacaactcacacatgcccacggtgcccagagcccaaatcttgtgacacacctcccccgtgcccacggtgcccagcacctgaactc

SEQ ID NO: 1736 - DNA, 153 bp, synthetic construct
  misc_feature 1..153: note = source = /note="Description of Artificial Sequence: Synthetic polynucleotide"
  source 1..153: mol_type = other DNA
gagctcaaaaccccacttggtgacacaactcacacatgcccacggtgcccagagcccaaatcttgtgacacacctcccccgtgcccacggtgcccagagcccaaatcttgtgacacacctcccccatgcccacggtgcccagcacctgaactc

SEQ ID NO: 1737 - DNA, 198 bp, synthetic construct
  misc_feature 1..198: note = source = /note="Description of Artificial Sequence: Synthetic polynucleotide"
  source 1..198: mol_type = other DNA
gagctcaaaaccccacttggtgacacaactcacacatgcccacggtgcccagagcccaaatcttgtgacacacctcccccgtgcccacggtgcccagagcccaaatcttgtgacacacctcccccatgcccacggtgcccagagcccaaatcttgtgacacacctcccccgtgcccaaggtgcccagcacctgaactc

SEQ ID NO: 1738 - DNA, 45 bp, synthetic construct
  misc_feature 1..45: note = source = /note="Description of Artificial Sequence: Synthetic oligonucleotide"
  source 1..45: mol_type = other DNA
gtgcccagggattgtggttgtaagccttgcatatgtacagtccca

SEQ ID NO: 1739 - DNA, 18 bp, synthetic construct
  misc_feature 1..18: note = source = /note="Description of Artificial Sequence: Synthetic oligonucleotide"
  source 1..18: mol_type = other DNA
gtgcccagggattgtggt

SEQ ID NO: 1740-2075 - skipped (336 entries)

SEQ ID NO: 2076 - DNA, 130 bp, synthetic construct
  misc_feature 1..130: note = source = /note="Description of Artificial Sequence: Synthetic polynucleotide"
  source 1..130: mol_type = other DNA
ctgcgcgctcgctcgctcactgaggccgcccgggcaaagcccgggcgtcgggcgacctttggtcgcccggcctcagtgagcgagcgagcgcgcagagagggagtggccaactccatcactaggggttcct

SEQ ID NO: 2077 - DNA, 141 bp, synthetic construct
  misc_feature 1..141: note = source = /note="Description of Artificial Sequence: Synthetic polynucleotide"
  source 1..141: mol_type = other DNA
cctgcaggcagctgcgcgctcgctcgctcactgaggccgcccgggcaaagcccgggcgtcgggcgacctttggtcgcccggcctcagtgagcgagcgagcgcgcagagagggagtggccaactccatcactaggggttcct

SEQ ID NO: 2078 - DNA, 130 bp, synthetic construct
  misc_feature 1..130: note = source = /note="Description of Artificial Sequence: Synthetic polynucleotide"
  source 1..130: mol_type = other DNA
aggaacccctagtgatggagttggccactccctctctgcgcgctcgctcgctcactgaggccgggcgaccaaaggtcgcccgacgcccgggctttgcccgggcggcctcagtgagcgagcgagcgcgcag

SEQ ID NO: 2079 - DNA, 141 bp, synthetic construct
  misc_feature 1..141: note = source = /note="Description of Artificial Sequence: Synthetic polynucleotide"
  source 1..141: mol_type = other DNA
aggaacccctagtgatggagttggccactccctctctgcgcgctcgctcgctcactgaggccgggcgaccaaaggtcgcccgacgcccgggctttgcccgggcggcctcagtgagcgagcgagcgcgcagctgcctgcagg

SEQ ID NO: 2080 - DNA, 1715 bp, synthetic construct
  misc_feature 1..1715: note = source = /note="Description of Artificial Sequence: Synthetic polynucleotide"
  source 1..1715: mol_type = other DNA
ctagttattaatagtaatcaattacggggtcattagttcatagcccatatatggagttccgcgttacataacttacggtaaatggcccgcctggctgaccgcccaacgacccccgcccattgacgtcaataatgacgtatgttcccatagtaacgccaatagggactttccattgacgtcaatgggtggagtatttacggtaaactgcccacttggcagtacatcaagtgtatcatatgccaagtacgccccctattgacgtcaatgacggtaaatggcccgcctggcattatgcccagtacatgaccttatgggactttcctacttggcagtacatctacgtattagtcatcgctattaccatggtcgaggtgagccccacgttctgcttcactctccccatctcccccccctccccacccccaattttgtatttatttattttttaattattttgtgcagcgatgggggcggggggggggggggggcgcgcgccaggcggggcggggcggggcgaggggcggggcggggcgaggcggagaggtgcggcggcagccaatcagagcggcgcgctccgaaagtttccttttatggcgaggcggcggcggcggcggccctataaaaagcgaagcgcgcggcgggcgggagtcgctgcgcgctgccttcgccccgtgccccgctccgccgccgcctcgcgccgcccgccccggctctgactgaccgcgttactcccacaggtgagcgggcgggacggcccttctcctccgggctgtaattagcgcttggtttaatgacggcttgtttcttttctgtggctgcgtgaaagccttgaggggctccgggagggccctttgtgcggggggagcggctcggggggtgcgtgcgtgtgtgtgtgcgtggggagcgccgcgtgcggctccgcgctgcccggcggctgtgagcgctgcgggcgcggcgcggggctttgtgcgctccgcagtgtgcgcgaggggagcgcggccgggggcggtgccccgcggtgcggggggggctgcgaggggaacaaaggctgcgtgcggggtgtgtgcgtgggggggtgagcagggggtgtgggcgcgtcggtcgggctgcaaccccccctgcacccccctccccgagttgctgagcacggcccggcttcgggtgcggggctccgtacggggcgtggcgcggggctcgccgtgccgggcggggggtggcggcaggtgggggtgccgggcggggcggggccgcctcgggccggggagggctcgggggaggggcgcggcggcccccggagcgccggcggctgtcgaggcgcggcgagccgcagccattgccttttatggtaatcgtgcgagagggcgcagggacttcctttgtcccaaatctgtgcggagccgaaatctgggaggcgccgccgcaccccctctagcgggcgcggggcgaagcggtgcggcgccggcaggaaggaaatgggcggggagggccttcgtgcgtcgccgcgccgccgtccccttctccctctccagcctcggggctgtccgcggggggacggctgccttcgggggggacggggcagggcggggttcggcttctggcgtgtgaccggcggctctagagcctctgctaaccatgttcatgccttcttctttttcctacagctcctgggcaacgtgctggttattgtgctgtctcatcattttggcaaagaattc

SEQ ID NO: 2081 - DNA, 299 bp, synthetic construct
  misc_feature 1..299: note = source = /note="Description of Artificial Sequence: Synthetic polynucleotide"
  source 1..299: mol_type = other DNA
tagcccatatatggagttccgcgttacataacttacggtaaatggcccgcctggctgaccgcccaacgacccccgcccattgacgtcaataatgacgtatgttcccatagtaacgccaatagggactttccattgacgtcaatgggtggagtatttacggtaaactgcccacttggcagtacatcaagtgtatcatatgccaagtacgccccctattgacgtcaatgacggtaaatggcccgcctggcattatgcccagtacatgaccttatgggactttcctacttggcagtacatct

SEQ ID NO: 2082 - DNA, 283 bp, synthetic construct
  misc_feature 1..283: note = source = /note="Description of Artificial Sequence: Synthetic polynucleotide"
  source 1..283: mol_type = other DNA
catggtcgaggtgagccccacgttctgcttcactctccccatctcccccccctccccacccccaattttgtatttatttattttttaattattttgtgcagcgatgggggcggggggggggggggggcgcgcgccaggcggggcggggcggggcgaggggcggggcggggcgaggcggagaggtgcggcggcagccaatcagagcggcgcgctccgaaagtttccttttatggcgaggcggcggcggcggcggccctataaaaagcgaagcgcgcggcgggcg

SEQ ID NO: 2083 - DNA, 260 bp, synthetic construct
  misc_feature 1..260: note = source = /note="Description of Artificial Sequence: Synthetic polynucleotide"
  source 1..260: mol_type = other DNA
ccacgttctgcttcactctccccatctcccccccctccccacccccaattttgtatttatttattttttaattattttgtgcagcgatgggggcggggggggggggcgcgcgccaggcggggcggggcggggcgaggggcggggcggggcgaggcggagaggtgcggcggcagccaatcagagcggcgcgctccgaaagtttccttttatggcgaggcggcggcggcggcggccctataaaaagcgaagcgcgcggcggg

SEQ ID NO: 2084 - DNA, 654 bp, synthetic construct
  misc_feature 1..654: note = source = /note="Description of Artificial Sequence: Synthetic polynucleotide"
  source 1..654: mol_type = other DNA
cgacattgattattgactagttattaatagtaatcaattacggggtcattagttcatagcccatatatggagttccgcgttacataacttacggtaaatggcccgcctggctgaccgcccaacgacccccgcccattgacgtcaataatgacgtatgttcccatagtaacgccaatagggactttccattgacgtcaatgggtggagtatttacggtaaactgcccacttggcagtacatcaagtgtatcatatgccaagtacgccccctattgacgtcaatgacggtaaatggcccgcctggcattatgcccagtacatgaccttatgggactttcctacttggcagtacatctacgtattagtcatcgctattaccatgtcgaggccacgttctgcttcactctccccatctcccccccctccccacccccaattttgtatttatttattttttaattattttgtgcagcgatgggggcggggggggggggcgcgcgccaggcggggcggggcggggcgaggggcggggcggggcgaggcggagaggtgcggcggcagccaatcagagcggcgcgctccgaaagtttccttttatggcgaggcggcggcggcggcggccctataaaaagcgaagcgcgcggcgggcgggagc

SEQ ID NO: 2085 - DNA, 699 bp, synthetic construct
  misc_feature 1..699: note = source = /note="Description of Artificial Sequence: Synthetic polynucleotide"
  source 1..699: mol_type = other DNA
gatctaacatatcctggtgtggagtagcggacgctgctatgacagaggctcgggggcctgagctggctctgtgagctggggaggaggcagacagccaggccttgtctgcaagcagacctggcagcattgggctggccgccccccagggcctcctcttcatgcccagtgaatgactcaccttggcacagacacaatgttcggggtgggcacagtgcctgcttcccgccgcaccccagcccccctcaaatgccttccgagaagcccattgagcagggggcttgcattgcaccccagcctgacagcctggcatcttgggataaaagcagcacagccccctaggggctgcccttgctgtgtggcgccaccggcggtggagaacaaggctctattcagcctgtgcccaggaaaggggatcaggggatgcccaggcatggacagtgggtggcagggggggagaggagggctgtctgcttcccagaagtccaaggacacaaatgggtgaggggagagctctccccatagctgggctgcggcccaaccccaccccctcaggctatgccagggggtgttgccaggggcacccgggcatcgccagtctagcccactccttcataaagccctcgcatcccaggagcgagcagagccagagcaggttggagaggagacgcatcacctccgctgctcgcggggatcctctag

SEQ ID NO: 2086 - DNA, 557 bp, synthetic construct
  misc_feature 1..557: note = source = /note="Description of Artificial Sequence: Synthetic polynucleotide"
  source 1..557: mol_type = other DNA
tagtatctgcagagggccctgcgtatgagtgcaagtgggttttaggaccaggatgaggcggggtgggggtgcctacctgacgaccgaccccgacccactggacaagcacccaacccccattccccaaattgcgcatcccctatcagagagggggaggggaaacaggatgcggcgaggcgcgtgcgcactgccagcttcagcaccgcggacagtgccttcgcccccgcctggcggcgcgcgccaccgccgcctcagcactgaaggcgcgctgacgtcactcgccggtcccccgcaaactccccttcccggccaccttggtcgcgtccgcgccgccgccggcccagccggaccgcaccacgcgaggcgcgagataggggggcacgggcgcgaccatctgcgctgcggcgccggcgactcagcgctgcctcagtctgcggtgggcagcggaggagtcgtgtcgtgcctgagagcgcagctgtgctcctgggcaccgcgcagtccgcccccgcggctcctggccagaccacccctaggaccccctgccccaagtcgcagcc

SEQ ID NO: 2087 - DNA, 382 bp, synthetic construct
  misc_feature 1..382: note = source = /note="Description of Artificial Sequence: Synthetic polynucleotide"
  source 1..382: mol_type = other DNA
ctagtcgacattgattattgactagttattaatagtaatcaattacggggtcattagttcatagcccatatatggagttccgcgttacataacttacggtaaatggcccgcctggctgaccgcccaacgacccccgcccattgacgtcaataatgacgtatgttcccatagtaacgccaatagggactttccattgacgtcaatgggtggagtatttacggtaaactgcccacttggcagtacatcaagtgtatcatatgccaagtacgccccctattgacgtcaatgacggtaaatggcccgcctggcattatgcccagtacatgaccttatgggactttcctacttggcagtacatctacgtattagtcatcgctattac

SEQ ID NO: 2088 - DNA, 1736 bp, synthetic construct
  misc_feature 1..1736: note = source = /note="Description of Artificial Sequence: Synthetic polynucleotide"
  source 1..1736: mol_type = other DNA
ctagtcgacattgattattgactagttattaatagtaatcaattacggggtcattagttcatagcccatatatggagttccgcgttacataacttacggtaaatggcccgcctggctgaccgcccaacgacccccgcccattgacgtcaataatgacgtatgttcccatagtaacgccaatagggactttccattgacgtcaatgggtggagtatttacggtaaactgcccacttggcagtacatcaagtgtatcatatgccaagtacgccccctattgacgtcaatgacggtaaatggcccgcctggcattatgcccagtacatgaccttatgggactttcctacttggcagtacatctacgtattagtcatcgctattaccatggtcgaggtgagccccacgttctgcttcactctccccatctcccccccctccccacccccaattttgtatttatttattttttaattattttgtgcagcgatgggggcggggggggggggggggcgcgcgccaggcggggcggggcggggcgaggggcggggcggggcgaggcggagaggtgcggcggcagccaatcagagcggcgcgctccgaaagtttccttttatggcgaggcggcggcggcggcggccctataaaaagcgaagcgcgcggcgggcgggagtcgctgcgcgctgccttcgccccgtgccccgctccgccgccgcctcgcgccgcccgccccggctctgactgaccgcgttactcccacaggtgagcgggcgggacggcccttctcctccgggctgtaattagcgcttggtttaatgacggcttgtttcttttctgtggctgcgtgaaagccttgaggggctccgggagggccctttgtgcggggggagcggctcggggggtgcgtgcgtgtgtgtgtgcgtggggagcgccgcgtgcggctccgcgctgcccggcggctgtgagcgctgcgggcgcggcgcggggctttgtgcgctccgcagtgtgcgcgaggggagcgcggccgggggcggtgccccgcggtgcggggggggctgcgaggggaacaaaggctgcgtgcggggtgtgtgcgtgggggggtgagcagggggtgtgggcgcgtcggtcgggctgcaaccccccctgcacccccctccccgagttgctgagcacggcccggcttcgggtgcggggctccgtacggggcgtggcgcggggctcgccgtgccgggcggggggtggcggcaggtgggggtgccgggcggggcggggccgcctcgggccggggagggctcgggggaggggcgcggcggcccccggagcgccggcggctgtcgaggcgcggcgagccgcagccattgccttttatggtaatcgtgcgagagggcgcagggacttcctttgtcccaaatctgtgcggagccgaaatctgggaggcgccgccgcaccccctctagcgggcgcggggcgaagcggtgcggcgccggcaggaaggaaatgggcggggagggccttcgtgcgtcgccgcgccgccgtccccttctccctctccagcctcggggctgtccgcggggggacggctgccttcgggggggacggggcagggcggggttcggcttctggcgtgtgaccggcggctctagagcctctgctaaccatgttcatgccttcttctttttcctacagctcctgggcaacgtgctggttattgtgctgtctcatcattttggcaaagaattc

SEQ ID NO: 2089 - DNA, 365 bp, synthetic construct
  misc_feature 1..365: note = source = /note="Description of Artificial Sequence: Synthetic polynucleotide"
  source 1..365: mol_type = other DNA
ctagtcgacattgattattgactagttattaatagtaatcaattacggggtcattagttcatagcccatatatggagttccgcgttacataacttacggtaaatggcccgcctggctgaccgcccaacgacccccgcccattgacgtcaataatgacgtatgttcccatagtaacgccaatagggactttccattgacgtcaatgggtggagtatttacggtaaactgcccacttggcagtacatcaagtgtatcatatgccaagtacgccccctattgacgtcaatgacggtaaatggcccgcctggcattatgcccagtacatgaccttatgggactttcctacttggcagtacatctacgta

SEQ ID NO: 2090 - DNA, 134 bp, synthetic construct
  misc_feature 1..134: note = source = /note="Description of Artificial Sequence: Synthetic polynucleotide"
  source 1..134: mol_type = other DNA
tcagatcgcctggagacgccatccacgctgttttgacctccatagaagacaccgggaccgatccagcctccgcggattcgaatcccggccgggaacggtgcattggaacgcggattccccgtgccaagagtgac

SEQ ID NO: 2091 - DNA, 102 bp, synthetic construct
  misc_feature 1..102: note = source = /note="Description of Artificial Sequence: Synthetic polynucleotide"
  source 1..102: mol_type = other DNA
ttgacctccatagaagacaccgggaccgatccagcctccgcggattcgaatcccggccgggaacggtgcattggaacgcggattccccgtgccaagagtgac

SEQ ID NO: 2092 - DNA, 59 bp, synthetic construct
  misc_feature 1..59: note = source = /note="Description of Artificial Sequence: Synthetic oligonucleotide"
  source 1..59: mol_type = other DNA
attcgaatcccggccgggaacggtgcattggaacgcggattccccgtgccaagagtgac

SEQ ID NO: 2093 - DNA, 53 bp, synthetic construct
  misc_feature 1..53: note = source = /note="Description of Artificial Sequence: Synthetic oligonucleotide"
  source 1..53: mol_type = other DNA
ctcctgggcaacgtgctggtctgtgtgctggcccatcactttggcaaagaatt

SEQ ID NO: 2094 - DNA, 54 bp, synthetic construct
  misc_feature 1..54: note = source = /note="Description of Artificial Sequence: Synthetic oligonucleotide"
  source 1..54: mol_type = other DNA
ctcctgggcaacgtgctggttattgtgctgtctcatcattttggcaaagaattc

SEQ ID NO: 2095 - DNA, 32 bp, synthetic construct
  misc_feature 1..32: note = source = /note="Description of Artificial Sequence: Synthetic oligonucleotide"
  source 1..32: mol_type = other DNA
gtaagtaccgcctatagagtctataggcccac

SEQ ID NO: 2096 - DNA, 15 bp, synthetic construct
  misc_feature 1..15: note = source = /note="Description of Artificial Sequence: Synthetic oligonucleotide"
  source 1..15: mol_type = other DNA
gtaagtaccgcctat

SEQ ID NO: 2097 - DNA, 347 bp, synthetic construct
  misc_feature 1..347: note = source = /note="Description of Artificial Sequence: Synthetic polynucleotide"
  source 1..347: mol_type = other DNA
aaaaaatgctttcttcttttaatatacttttttgtttatcttatttctaatactttccctaatctctttctttcagggcaataatgatacaatgtatcatgcctctttgcaccattctaaagaataacagtgataatttctgggttaaggcaatagcaatatttctgcatataaatatttctgcatataaattgtaactgatgtaagaggtttcatattgctaatagcagctacaatccagctaccattctgcttttattttatggttgggataaggctggattattctgagtccaagctaggcccttttgctaatcatgttcatacctcttatcttcctcccacag

SEQ ID NO: 2098 - DNA, 168 bp, synthetic construct
  misc_feature 1..168: note = source = /note="Description of Artificial Sequence: Synthetic polynucleotide"
  source 1..168: mol_type = other DNA
tctgcatataaattgtaactgatgtaagaggtttcatattgctaatagcagctacaatccagctaccattctgcttttattttatggttgggataaggctggattattctgagtccaagctaggcccttttgctaatcatgttcatacctcttatcttcctcccacag

SEQ ID NO: 2099 - DNA, 73 bp, synthetic construct
  misc_feature 1..73: note = source = /note="Description of Artificial Sequence: Synthetic oligonucleotide"
  source 1..73: mol_type = other DNA
aaaaaatgctttcttcttttaatatacttttcttttgctaatcatgttcatacctcttatcttcctcccacag

SEQ ID NO: 2100 - DNA, 73 bp, synthetic construct
  misc_feature 1..73: note = source = /note="Description of Artificial Sequence: Synthetic oligonucleotide"
  source 1..73: mol_type = other DNA
aggctggattattctgagtccaagctaggcccttttgctaatcatgttcatacctcttatcttcctcccacag

SEQ ID NO: 2101 - DNA, 73 bp, synthetic construct
  misc_feature 1..73: note = source = /note="Description of Artificial Sequence: Synthetic oligonucleotide"
  source 1..73: mol_type = other DNA
aaaaaatgctttcttcttttcaagctaggcccttttgctaatcatgttcatacctcttatcttcctcccacag

SEQ ID NO: 2102 - DNA, 53 bp, synthetic construct
  misc_feature 1..53: note = source = /note="Description of Artificial Sequence: Synthetic oligonucleotide"
  source 1..53: mol_type = other DNA
caagctaggcccttttgctaatcatgttcatacctcttatcttcctcccacag

SEQ ID NO: 2103 - DNA, 172 bp, synthetic construct
  misc_feature 1..172: note = source = /note="Description of Artificial Sequence: Synthetic polynucleotide"
  source 1..172: mol_type = other DNA
gaactgaaaaaccagaaagttaactggtaagtttagtctttttgtcttttatttcaggtcccggatccggtggtggtgcaaatcaaagaactgctcctcagtggatgttgcctttacttctaggcctgtacggaagtgttacttctgctctaaaagctgcggaattgtaccc

SEQ ID NO: 2104 - DNA, 1074 bp, synthetic construct
  misc_feature 1..1074: note = source = /note="Description of Artificial Sequence: Synthetic polynucleotide"
  source 1..1074: mol_type = other DNA
ggagtcgctgcgcgctgccttcgccccgtgccccgctccgccgccgcctcgcgccgcccgccccggctctgactgaccgcgttactcccacaggtgagcgggcgggacggcccttctcctccgggctgtaattagcgcttggtttaatgacggcttgtttcttttctgtggctgcgtgaaagccttgaggggctccgggagggccctttgtgcggggggagcggctcggggggtgcgtgcgtgtgtgtgtgcgtggggagcgccgcgtgcggctccgcgctgcccggcggctgtgagcgctgcgggcgcggcgcggggctttgtgcgctccgcagtgtgcgcgaggggagcgcggccgggggcggtgccccgcggtgcggggggggctgcgaggggaacaaaggctgcgtgcggggtgtgtgcgtgggggggtgagcagggggtgtgggcgcgtcggtcgggctgcaaccccccctgcacccccctccccgagttgctgagcacggcccggcttcgggtgcggggctccgtacggggcgtggcgcggggctcgccgtgccgggcggggggtggcggcaggtgggggtgccgggcggggcggggccgcctcgggccggggagggctcgggggaggggcgcggcggcccccggagcgccggcggctgtcgaggcgcggcgagccgcagccattgccttttatggtaatcgtgcgagagggcgcagggacttcctttgtcccaaatctgtgcggagccgaaatctgggaggcgccgccgcaccccctctagcgggcgcggggcgaagcggtgcggcgccggcaggaaggaaatgggcggggagggccttcgtgcgtcgccgcgccgccgtccccttctccctctccagcctcggggctgtccgcggggggacggctgccttcgggggggacggggcagggcggggttcggcttctggcgtgtgaccggcggctctagagcctctgctaaccatgttcatgccttcttctttttcctacagctcctgggcaacgtgctggttattgtgctgtctcatcattttggcaaagaattcgag

SEQ ID NO: 2105 - DNA, 41 bp, synthetic construct
  misc_feature 1..41: note = source = /note="Description of Artificial Sequence: Synthetic oligonucleotide"
  source 1..41: mol_type = other DNA
cctctgctaaccatgttcatgccttcttctttttcctacag

SEQ ID NO: 2106 - DNA, 84 bp, synthetic construct
  misc_feature 1..84: note = source = /note="Description of Artificial Sequence: Synthetic oligonucleotide"
  source 1..84: mol_type = other DNA
atggcgacgggttcaagaacttccctacttcttgcatttggcctgctttgtttgccgtggttacaggagggctcggcagctgcc

SEQ ID NO: 2107 - DNA, 93 bp, synthetic construct
  misc_feature 1..93: note = source = /note="Description of Artificial Sequence: Synthetic oligonucleotide"
  source 1..93: mol_type = other DNA
gccgccaccatggcgacgggttcaagaacttccctacttcttgcatttggcctgctttgtttgccgtggttacaggagggctcggcagctgcc

SEQ ID NO: 2108 - DNA, 96 bp, synthetic construct
  misc_feature 1..96: note = source = /note="Description of Artificial Sequence: Synthetic oligonucleotide"
  source 1..96: mol_type = other DNA
gccgccaccatgggggtgcacgaatgtcctgcctggctgtggcttctcctgtccctgctgtcgctccctctgggcctcccagtcctgggcgctgcc

SEQ ID NO: 2109 - DNA, 66 bp, synthetic construct
  misc_feature 1..66: note = source = /note="Description of Artificial Sequence: Synthetic oligonucleotide"
  source 1..66: mol_type = other DNA
gccgccaccatgggagtcaaagttctgtttgccctgatctgcatcgctgtggccgaggccgctgcc

SEQ ID NO: 2110 - DNA, 72 bp, synthetic construct
  misc_feature 1..72: note = source = /note="Description of Artificial Sequence: Synthetic oligonucleotide"
  source 1..72: mol_type = other DNA
gccgccaccatgaaacacctgtggttcttcctcctgctggtggcagctcccagatgggtcctgtccgctgcc

SEQ ID NO: 2111 - DNA, 93 bp, synthetic construct
  misc_feature 1..93: note = source = /note="Description of Artificial Sequence: Synthetic oligonucleotide"
  source 1..93: mol_type = other DNA
gccgccaccatggacctcctgcacaagaacatgaaacacctgtggttcttcctcctcctggtggcagctcccagatgggtgctgtccgctgcc

SEQ ID NO: 2112 - DNA, 69 bp, synthetic construct
  misc_feature 1..69: note = source = /note="Description of Artificial Sequence: Synthetic oligonucleotide"
  source 1..69: mol_type = other DNA
gccgccaccatggctttcctctggctcctctcctgctgggccctcctgggtaccaccttcggcgctgcc

SEQ ID NO: 2113 - DNA, 81 bp, synthetic construct
  misc_feature 1..81: note = source = /note="Description of Artificial Sequence: Synthetic oligonucleotide"
  source 1..81: mol_type = other DNA
gccgccaccatgccccccaagaagtgcctgctgctgctgctgaccctgctgctgctgatctccaccaccttcggcgctgcc

SEQ ID NO: 2114 - DNA, 12 bp, synthetic construct
  misc_feature 1..12: note = source = /note="Description of Artificial Sequence: Synthetic oligonucleotide"
  source 1..12: mol_type = other DNA
gccgccaccatg

SEQ ID NO: 2115 - DNA, 81 bp, synthetic construct
  misc_feature 1..81: note = source = /note="Description of Artificial Sequence: Synthetic oligonucleotide"
  source 1..81: mol_type = other DNA
gccgccaccatggacatgagggtccctgctcagctcctggggctcctgctgctctggctctcaggtgccagatgtgctgcc

SEQ ID NO: 2116 - DNA, 66 bp, synthetic construct
  misc_feature 1..66: note = source = /note="Description of Artificial Sequence: Synthetic oligonucleotide"
  source 1..66: mol_type = other DNA
gccgccaccatggaaatcaaggtgctgtttgccctcatctgtattgctgttgctgaggcagctgcc

SEQ ID NO: 2117 - DNA, 78 bp, synthetic construct
  misc_feature 1..78: note = source = /note="Description of Artificial Sequence: Synthetic oligonucleotide"
  source 1..78: mol_type = other DNA
gccgccaccatggagacagacacactcctgctatgggtactgctgctctgggttccaggttccactggtgacgctgcc

SEQ ID NO: 2118 - DNA, 27 bp, synthetic construct
  misc_feature 1..27: note = source = /note="Description of Artificial Sequence: Synthetic oligonucleotide"
  source 1..27: mol_type = other DNA
tacccatacgatgttccagattacgct

SEQ ID NO: 2119 - DNA, 21 bp, synthetic construct
  misc_feature 1..21: note = source = /note="Description of Artificial Sequence: Synthetic oligonucleotide"
  source 1..21: mol_type = other DNA
agcgagaaggacgagctgtag

SEQ ID NO: 2120 - DNA, 18 bp, synthetic construct
  misc_feature 1..18: note = source = /note="Description of Artificial Sequence: Synthetic oligonucleotide"
  source 1..18: mol_type = other DNA
agcgagaaggacgagctg

SEQ ID NO: 2121 - DNA, 18 bp, synthetic construct
  misc_feature 1..18: note = source = /note="Description of Artificial Sequence: Synthetic oligonucleotide"
  source 1..18: mol_type = other DNA
catcaccatcaccatcac

SEQ ID NO: 2122 - DNA, 127 bp, synthetic construct
  misc_feature 1..127: note = source = /note="Description of Artificial Sequence: Synthetic polynucleotide"
  source 1..127: mol_type = other DNA
gatctttttccctctgccaaaaattatggggacatcatgaagccccttgagcatctgacttctggctaataaaggaaatttattttcattgcaatagtgtgttggaattttttgtgtctctcactcg

SEQ ID NO: 2123 - DNA, 477 bp, synthetic construct
  misc_feature 1..477: note = source = /note="Description of Artificial Sequence: Synthetic polynucleotide"
  source 1..477: mol_type = other DNA
gggtggcatccctgtgacccctccccagtgcctctcctggccctggaagttgccactccagtgcccaccagccttgtcctaataaaattaagttgcatcattttgtctgactaggtgtccttctataatattatggggtggaggggggtggtatggagcaaggggcaagttgggaagacaacctgtagggcctgcggggtctattgggaaccaagctggagtgcagtggcacaatcttggctcactgcaatctccgcctcctgggttcaagcgattctcctgcctcagcctcccgagttgttgggattccaggcatgcatgaccaggctcagctaatttttgtttttttggtagagacggggtttcaccatattggccaggctggtctccaactcctaatctcaggtgatctacccaccttggcctcccaaattgctgggattacaggcgtgaaccactgctcccttccctgtcctt

SEQ ID NO: 2124 - DNA, 552 bp, synthetic construct
  misc_feature 1..552: note = source = /note="Description of Artificial Sequence: Synthetic polynucleotide"
  source 1..552: mol_type = other DNA
gaattcactcctcaggtgcaggctgcctatcagaaggtggtggctggtgtggccaatgccctggctcacaaataccactgagatctttttccctctgccaaaaattatggggacatcatgaagccccttgagcatctgacttctggctaataaaggaaatttattttcattgcaatagtgtgttggaattttttgtgtctctcactcggaaggacatatgggagggcaaatcatttaaaacatcagaatgagtatttggtttagagtttggcaacatatgcccatatgctggctgccatgaacaaaggttggctataaagaggtcatcagtatatgaaacagccccctgctgtccattccttattccatagaaaagccttgacttgaggttagattttttttatattttgttttgtgttatttttttctttaacatccctaaaattttccttacatgttttactagccagatttttcctcctctcctgactactcccagtcatagctgtccctcttctcttatggagatccctcgacctgcagcccaagctt

SEQ ID NO: 2125 - DNA, 1153 bp, synthetic construct
  misc_feature 1..1153: note = source = /note="Description of Artificial Sequence: Synthetic polynucleotide"
  source 1..1153: mol_type = other DNA
cctaggtttcttgagacctctacaagagttggagttgacacttggggtactttcttggtgtaacgaactaatagcctgaaaaaaagaagtcatgtgttttcagcaaggcaagaaactgtctaacatagtagataaaacagagaacacttggccggaatcaactaagatgttgctatgttccattcatcatattatctccatctgcagagtagtgggttagtggagggtagaaaacattctcctgaacaactagttaaacttggctttgagttccacctgtaccacttgcataatcttgggaaagtgagttgcctaattcagtgacattaataaatttattaatttcttctttcaataaaacctggagagagcttcatatgtatcagcatatgctaaacttgaaagatacaagtagaaaatggaaggaaatatatctgactcaatagggatagttcaagggttaaattaaaagtagtaaagtattataattaatctgacatggtacctaatatataataatcatgtattaagaatgccagtcaccattaaaagtcaatgtatgactttaatctactcgaggaaagaaactatgtcttgttcactgttattatctctaaaatccataatcagaagagcaccatgtgtatgagccacacaataaatatctactgtataatatgtctcttcttgtttttaaccttcatagataagactctattgaattgggacattagtccagcaagccattctgtctctgtctcttctatggagggaaaggtttaaccatcaaagactaggtgcatctcccaaacaacctgaatttaatattcaaatatgtatctaaattcatttgttacatttttgtgttcagcttacatattactttttgagcgacatctattcaaggcctactacttgctgctctacaaaatattgccatgctctatttgcccattaactatttcttaaccttcaagggacatgctcagttctgatataccaagatttggtatttaccctcccagcctacatacttccaatcttaagagaacaatttttagactacattcaaatatagacctctccaccccatcaactattttatctctcctctcctatctttcttgacaaagagtgattagaaatatgcaat

SEQ ID NO: 2126 - DNA, 1240 bp, synthetic construct
  misc_feature 1..1240: note = source = /note="Description of Artificial Sequence: Synthetic polynucleotide"
  source 1..1240: mol_type = other DNA
attatatttttttaaagactcacatagtcttctgcacagggcattctttttgcttcaggatgtttacaacatttgctgcccacttttcctaggtttcttgagacctctacaagagttggagttgacacttggggtactttcttggtgtaacgaactaatagcctgaaaaaaagaagtcatgtgttttcagcaaggcaagaaactgtctaacatagtagataaaacagagaacacttggccggaatcaactaagatgttgctatgttccattcatcatattatctccatctgcagagtagtgggttagtggagggtagaaaacattctcctgaacaactagttaaacttggctttgagttccacctgtaccacttgcataatcttgggaaagtgagttgcctaattcagtgacattaataaatttattaatttcttctttcaataaaacctggagagagcttcatatgtatcagcatatgctaaacttgaaagatacaagtagaaaatggaaggaaatatatctgactcaatagggatagttcaagggttaaattaaaagtagtaaagtattataattaatctgacatggtacctaatatataataatcatgtattaagaatgccagtcaccattaaaagtcaatgtatgactttaatctactcgaggaaagaaactatgtcttgttcactgttattatctctaaaatccataatcagaagagcaccatgtgtatgagccacacaataaatatctactgtataatatgtctcttcttgtttttaaccttcatagataagactctattgaattgggacattagtccagcaagccattctgtctctgtctcttctatggagggaaaggtttaaccatcaaagactaggtgcatctcccaaacaacctgaatttaatattcaaatatgtatctaaattcatttgttacatttttgtgttcagcttacatattactttttgagcgacatctattcaaggcctactacttgctgctctacaaaatattgccatgctctatttgcccattaactatttcttaaccttcaagggacatgctcagttctgatataccaagatttggtatttaccctcccagcctacatacttccaatcttaagagaacaatttttagactacattcaaatatagacctctccaccccatcaactattttatctctcctctcctatctttcttgacaaagagtgattagaaatatgcaat

SEQ ID NO: 2127 - protein, 441 aa, Homo sapiens
MAEPRQEFEVMEDHAGTYGLGDRKDQGGYTMHQDQEGDTDAGLKESPLQTPTEDGSEEPGSETSDAKSTPTAEDVTAPLVDEGAPGKQAAAQPHTEIPEGTTAEEAGIGDTPSLEDEAAGHVTQARMVSKSKDGTGSDDKKAKGADGKTKIATPRGAAPPGQKGQANATRIPAKTPPAPKTPPSSGEPPKSGDRSGYSSPGSPGTPGSRSRTPSLPTPPTREPKKVAVVRTPPKSPSSAKSRLQTAPVPMPDLKNVKSKIGSTENLKHQPGGGKVQIINKKLDLSNVQSKCGSKDNIKHVPGGGSVQIVYKPVDLSKVTSKCGSLGNIHHKPGGGQVEVKSEKLDFKDRVQSKIGSLDNITHVPGGGNKKIETHKLTFRENAKAKTDHGAEIVYKSPVVSGDTSPRHLSNVSSTGSIDMVDSPQLATLADEVSASLAKQGL

SEQ ID NO: 2128 - protein, 18 aa, synthetic construct
  MOD_RES 11: note = phosphoThr
  REGION 1..18: note = source = /note="Description of Artificial Sequence: Synthetic peptide"
SPGTPGSRSRXPSLPTPP

SEQ ID NO: 2129 - protein, 15 aa, synthetic construct
  MOD_RES 8: note = phosphoThr
  REGION 1..15: note = source = /note="Description of Artificial Sequence: Synthetic peptide"
SRTPSLPXPPTREPK

SEQ ID NO: 2130 - protein, 15 aa, synthetic construct
  MOD_RES 8: note = phosphoThr
  REGION 1..15: note = source = /note="Description of Artificial Sequence: Synthetic peptide"
KKVAVVRXPPKSPSS

SEQ ID NO: 2131 - protein, 20 aa, synthetic construct
  MOD_RES 8: note = phosphoThr
  MOD_RES 13: note = phosphoThr
  REGION 1..20: note = source = /note="Description of Artificial Sequence: Synthetic peptide"
TPGSRSRXPSLPXPPTREPK

SEQ ID NO: 2132 - protein, 29 aa, synthetic construct
  MOD_RES 8: note = phosphoThr
  MOD_RES 22: note = phosphoThr
  REGION 1..29: note = source = /note="Description of Artificial Sequence: Synthetic peptide"
SRTPSLPXPPTREPKKVAVVRXPPKSPSS

SEQ ID NO: 2133 - protein, 34 aa, synthetic construct
  MOD_RES 8: note = phosphoThr
  MOD_RES 13: note = phosphoThr
  MOD_RES 27: note = phosphoThr
  REGION 1..34: note = source = /note="Description of Artificial Sequence: Synthetic polypeptide"
TPGSRSRXPSLPXPPTREPKKVAVVRXPPKSPSS

SEQ ID NO: 2134 - protein, 34 aa, synthetic construct
  REGION 1..34: note = source = /note="Description of Artificial Sequence: Synthetic polypeptide"
TPGSRSRTPSLPTPPTREPKKVAVVRTPPKSPSS

SEQ ID NO: 2135 - protein, 34 aa, synthetic construct
  MOD_RES 8: note = phosphoThr
  MOD_RES 27: note = phosphoThr
  REGION 1..34: note = source = /note="Description of Artificial Sequence: Synthetic polypeptide"
TPGSRSRXPSLPTPPTREPKKVAVVRXPPKSPSS

SEQ ID NO: 2136 - protein, 49 aa, synthetic construct
  REGION 1..49: note = source = /note="Description of Artificial Sequence: Synthetic polypeptide"
TPPSSGEPPKSGDRSGYSSPGSPGTPGSRSRTPSLPTPPTREPKKVAVV

SEQ ID NO: 2137-2237 - skipped (101 entries)

SEQ ID NO: 2238 - DNA, 1714 bp, synthetic construct
  misc_feature 1..1714: note = source = /note="Description of Artificial Sequence: Synthetic polynucleotide"
  source 1..1714: mol_type = other DNA
ctagttattaatagtaatcaattacggggtcattagttcatagcccatatatggagttccgcgttacataacttacggtaaatggcccgcctggctgaccgcccaacgacccccgcccattgacgtcaataatgacgtatgttcccatagtaacgccaatagggactttccattgacgtcaatgggtggagtatttacggtaaactgcccacttggcagtacatcaagtgtatcatatgccaagtacgccccctattgacgtcaatgacggtaaatggcccgcctggcattatgcccagtacatgaccttatgggactttcctacttggcagtacatctacgtattagtcatcgctattaccatggtcgaggtgagccccacgttctgcttcactctccccatctcccccccctccccacccccaattttgtatttatttattttttaattattttgtgcagcgatgggggcggggggggggggggggcgcgcgccaggcggggcggggcggggcgaggggcggggcggggcgaggcggagaggtgcggcggcagccaatcagagcggcgcgctccgaaagtttccttttatggcgaggcggcggcggcggcggccctataaaaagcgaagcgcgcggcgggcgggagtcgctgcgcgctgccttcgccccgtgccccgctccgccgccgcctcgcgccgcccgccccggctctgactgaccgcgttactcccacaggtgagcgggcgggacggcccttctcctccgggctgtaattagcgcttggtttaatgacggcttgtttcttttctgtggctgcgtgaaagccttgaggggctccgggagggccctttgtgcggggggagcggctcggggggtgcgtgcgtgtgtgtgtgcgtggggagcgccgcgtgcggctccgcgctgcccggcggctgtgagcgctgcgggcgcggcgcggggctttgtgcgctccgcagtgtgcgcgaggggagcgcggccgggggcggtgccccgcggtgcggggggggctgcgaggggaacaaaggctgcgtgcggggtgtgtgcgtgggggggtgagcagggggtgtgggcgcgtcggtcgggctgcaaccccccctgcacccccctccccgagttgctgagcacggcccggcttcgggtgcggggctccgtacggggcgtggcgcggggctcgccgtgccgggcggggggtggcggcaggtgggggtgccgggcggggcggggccgcctcgggccggggagggctcgggggaggggcgcggcggcccccggagcgccggcggctgtcgaggcgcggcgagccgcagccattgccttttatggtaatcgtgcgagagggcgcagggacttcctttgtcccaaatctgtgcggagccgaaatctgggaggcgccgccgcaccccctctagcgggcgcggggcgaagcggtgcggcgccggcaggaaggaaatgggcggggagggccttcgtgcgtcgccgcgccgccgtccccttctccctctccagcctcggggctgtccgcggggggacggctgccttcgggggggacggggcagggcggggttcggcttctggcgtgtgaccggcggctctagagcctctgctaaccatgttcatgccttcttctttttcctacagctcctgggcaacgtgctggttattgtgctgtctcatcattttggcaaagaatt

SEQ ID NO: 2239 - DNA, 380 bp, synthetic construct
  misc_feature 1..380: note = source = /note="Description of Artificial Sequence: Synthetic polynucleotide"
  source 1..380: mol_type = other DNA
gacattgattattgactagttattaatagtaatcaattacggggtcattagttcatagcccatatatggagttccgcgttacataacttacggtaaatggcccgcctggctgaccgcccaacgacccccgcccattgacgtcaataatgacgtatgttcccatagtaacgccaatagggactttccattgacgtcaatgggtggagtatttacggtaaactgcccacttggcagtacatcaagtgtatcatatgccaagtacgccccctattgacgtcaatgacggtaaatggcccgcctggcattatgcccagtacatgaccttatgggactttcctacttggcagtacatctacgtattagtcatcgctattaccatg

SEQ ID NO: 2240 - DNA, 566 bp, synthetic construct
  misc_feature 1..566: note = source = /note="Description of Artificial Sequence: Synthetic polynucleotide"
  source 1..566: mol_type = other DNA
tcagatcgcctggagacgccatccacgctgttttgacctccatagaagacaccgggaccgatccagcctccgcggattcgaatcccggccgggaacggtgcattggaacgcggattccccgtgccaagagtgacgtaagtaccgcctatagagtctataggcccacaaaaaatgctttcttcttttaatatacttttttgtttatcttatttctaatactttccctaatctctttctttcagggcaataatgatacaatgtatcatgcctctttgcaccattctaaagaataacagtgataatttctgggttaaggcaatagcaatatttctgcatataaatatttctgcatataaattgtaactgatgtaagaggtttcatattgctaatagcagctacaatccagctaccattctgcttttattttatggttgggataaggctggattattctgagtccaagctaggcccttttgctaatcatgttcatacctcttatcttcctcccacagctcctgggcaacgtgctggtctgtgtgctggcccatcactttggcaaagaatt

SEQ ID NO: 2241-2243 - skipped (3 entries)

SEQ ID NO: 2244 - DNA, 198 bp, synthetic construct
  misc_feature 1..198: note = source = /note="Description of Artificial Sequence: Synthetic polynucleotide"
  source 1..198: mol_type = other DNA
gagctcaaaaccccacttggtgacacaactcacacatgcccacggtgcccagagcccaaatcttgtgacacacctcccccgtgcccacggtgcccagagcccaaatcttgtgacacaactcacacatgcccacggtgcccagagcccaaatcttgtgacacacctcccccgtgcccaaggtgcccagcacctgaactc

SEQ ID NO: 2245 - DNA, 15 bp, synthetic construct
  misc_feature 1..15: note = source = /note="Description of Artificial Sequence: Synthetic oligonucleotide"
  source 1..15: mol_type = other DNA
ggtggtggtggatcc

SEQ ID NO: 2246 - DNA, 30 bp, synthetic construct
  misc_feature 1..30: note = source = /note="Description of Artificial Sequence: Synthetic oligonucleotide"
  source 1..30: mol_type = other DNA
ggtggtggtggatccggtggtggtggatcc

SEQ ID NO: 2247 - DNA, 45 bp, synthetic construct
  misc_feature 1..45: note = source = /note="Description of Artificial Sequence: Synthetic oligonucleotide"
  source 1..45: mol_type = other DNA
ggtggtggtggatccggtggtggtggatccggtggtggtggatcc

SEQ ID NO: 2248 - DNA, 60 bp, synthetic construct
  misc_feature 1..60: note = source = /note="Description of Artificial Sequence: Synthetic oligonucleotide"
  source 1..60: mol_type = other DNA
ggtggtggtggatccggtggtggtggatccggtggtggtggatccggtggtggtggatcc

SEQ ID NO: 2249 - DNA, 75 bp, synthetic construct
  misc_feature 1..75: note = source = /note="Description of Artificial Sequence: Synthetic oligonucleotide"
  source 1..75: mol_type = other DNA
ggtggtggtggtagcggcggcggcggctctggtggtggtggatccggtggtggtggatccggtggtggtggatcc

SEQ ID NO: 2250 - DNA, 75 bp, synthetic construct
  misc_feature 1..75: note = source = /note="Description of Artificial Sequence: Synthetic oligonucleotide"
  source 1..75: mol_type = other DNA
ggtggtggtggatccggtggtggtggatccggtggtggtggatccggtggtggtggatccggtggtggtggatcc

SEQ ID NO: 2251 - DNA, 90 bp, synthetic construct
  misc_feature 1..90: note = source = /note="Description of Artificial Sequence: Synthetic oligonucleotide"
  source 1..90: mol_type = other DNA
ggtggtggtggtagcggcggcggcggctctggtggtggtggatccggtggtggtggatccggtggtggtggatccggtggtggtggatcc

SEQ ID NO: 2252 - DNA, 120 bp, synthetic construct
  misc_feature 1..120: note = source = /note="Description of Artificial Sequence: Synthetic polynucleotide"
  source 1..120: mol_type = other DNA
ggtggtggtggtagcggcggcggcggctctggtggtggtggatccggtggtggtggatccggtggtggtggatccggtggtggtggatccggtggtggtggatccggtggtggtggatcc

SEQ ID NO: 2253 - DNA, 120 bp, synthetic construct
  misc_feature 1..120: note = source = /note="Description of Artificial Sequence: Synthetic polynucleotide"
  source 1..120: mol_type = other DNA
ggtggtggtggatccggtggtggtggatccggtggtggtggatccggtggtggtggatccggtggtggtggatccggtggtggtggatccggtggtggtggatccggtggtggtggatcc

SEQ ID NO: 2254 - DNA, 60 bp, synthetic construct
  misc_feature 1..60: note = source = /note="Description of Artificial Sequence: Synthetic oligonucleotide"
  source 1..60: mol_type = other DNA
ggtggtggtggtagcggcggcggcggctctggtggtggtggatccggtggtggtggatcc

SEQ ID NO: 2255 - DNA, 18 bp, synthetic construct
  misc_feature 1..18: note = source = /note="Description of Artificial Sequence: Synthetic oligonucleotide"
  source 1..18: mol_type = other DNA
catcatcaccatcaccat

SEQ ID NO: 2256 - DNA, 491 bp, synthetic construct
  misc_feature 1..491: note = source = /note="Description of Artificial Sequence: Synthetic polynucleotide"
  source 1..491: mol_type = other DNA
attcgaatcccggccgggaacggtgcattggaacgcggattccccgtgccaagagtgacgtaagtaccgcctatagagtctataggcccacaaaaaatgctttcttcttttaatatacttttttgtttatcttatttctaatactttccctaatctctttctttcagggcaataatgatacaatgtatcatgcctctttgcaccattctaaagaataacagtgataatttctgggttaaggcaatagcaatatttctgcatataaatatttctgcatataaattgtaactgatgtaagaggtttcatattgctaatagcagctacaatccagctaccattctgcttttattttatggttgggataaggctggattattctgagtccaagctaggcccttttgctaatcatgttcatacctcttatcttcctcccacagctcctgggcaacgtgctggtctgtgtgctggcccatcactttggcaaagaatt

SEQ ID NO: 2257 - DNA, 387 bp, synthetic construct
  misc_feature 1..387: note = source = /note="Description of Artificial Sequence: Synthetic polynucleotide"
  source 1..387: mol_type = other DNA
tcagatcgcctggagacgccatccacgctgttttgacctccatagaagacaccgggaccgatccagcctccgcggattcgaatcccggccgggaacggtgcattggaacgcggattccccgtgccaagagtgacgtaagtaccgcctatagagtctataggcccactctgcatataaattgtaactgatgtaagaggtttcatattgctaatagcagctacaatccagctaccattctgcttttattttatggttgggataaggctggattattctgagtccaagctaggcccttttgctaatcatgttcatacctcttatcttcctcccacagctcctgggcaacgtgctggtctgtgtgctggcccatcactttggcaaagaatt

SEQ ID NO: 2258 - DNA, 292 bp, synthetic construct
  misc_feature 1..292: note = source = /note="Description of Artificial Sequence: Synthetic polynucleotide"
  source 1..292: mol_type = other DNA
tcagatcgcctggagacgccatccacgctgttttgacctccatagaagacaccgggaccgatccaggtaagtaccgcctatagagtctataggcccacaaaaaatgctttcttcttttaatatacttttttgtttatcttatttctaatactttccctaatctctttcgctggattattctgagtccaagctaggcccttttgctaatcatgttcatacctcttatcttcctcccacagctcctgggcaacgtgctggtctgtgtgctggcccatcactttggcaaagaatt

SEQ ID NO: 2259 - DNA, 90 bp, synthetic construct
  misc_feature 1..90: note = source = /note="Description of Artificial Sequence: Synthetic oligonucleotide"
  source 1..90: mol_type = other DNA
ggtggtggtggatccggtggtggtggatccggtggtggtggatccggtggtggtggatccggtggtggtggatccggtggtggtggatcc

SEQ ID NO: 2260-2321 - skipped (62 entries)

SEQ ID NO: 2322 - protein, 735 aa, synthetic construct
  REGION 1..735: note = source = /note="Description of Artificial Sequence: Synthetic polypeptide"
MAADGYLPDWLEDTLSEGIRQWWKLKPGPPPPKPAERHKDDSRGLVLPGYKYLGPFNGLDKGEPVNEADAAALEHDKAYDRQLDSGDNPYLKYNHADAEFQERLKEDTSFGGNLARAVFQAKKRVLEPLGLVEEPVKTAPGKKRPVEHSPAEPDSSSGTGKSGQQPARKRLNFGQTGDADSVPDPQPLGQPPAAPSGLGTNTMASGSGAPMADNNEGADGVGNSSGNWHCDSTWMGDRVITTSTRTWALPTYNNHLYKQISSQSGASNDNHYFGYSTPWGYFDFNRFHCHFSPRDWQRLINNNWGFRPKRLNFKLFNIQVKEVTQNDGTTTIANNLTSTVQVFTDSEYQLPYVLGSAHQGCLPPFPADVFMVPQYGYLTLNNGSQAVGRSSFYCLEYFPSQMLRTGNNFTFSYTFEDVPFHSSYAHSQSLDRLMNPLIDQYLYYLSRTNTPSGTTTQSRLQFSQAGASDIRDQSRNWLPRPCYRQQRVSKTAADNNNSDYSWTGATKYHLNGRDSLVNPGTAMASHKDDEEKYFPQSGVLIFGKQDSGKTNVDIEKVMITDEEEIRTTNPVATEQYGSVSTNLQSGNTQAATSDVNTQGVLPGMVRQDRDVYLQGPIWAKIPHTDGHFHPSPLMGGFGLKHPPPQILIKNTPVPANPSTTFSAAKFASFITQYSTGQVSVEIEWEPQKENSKRWNPEIQYTSNYNKSVNVDFTVDTNGVYSEPRPIGTRYLTRNL

SEQ ID NO: 2323 - protein, 735 aa, synthetic construct
  REGION 1..735: note = source = /note="Description of Artificial Sequence: Synthetic polypeptide"
MAADGYLPDWLEDTLSEGIRQWWKLKPGPPPPKPAERHKDDSRGLVLPGYKYLGPFNGLDKGEPVNEADAAALEHDKAYDRQLDSGDNPYLKYNHADAEFQERLKEDTSFGGNLARAVFQAKKRVLEPLGLVEEPVKTAPGKKRPVEHSPAEPDSSSGTGKSGQQPARKRLNFGQTGDADSVPDPQPLGQPPAAPSGLGTNTMASGSGAPMADNNEGADGVGNSSGNWHCDSTWMGDRVITTSTRTWALPTYNNHLYKQISSQSGASNDNHYFGYSTPWGYFDFNGFHCHFSPRDWQRLINNNWGFRPKRLNFKLFNIQVKEVTQNDGTTTIANNLTSTVQVFTDSEYQLPYVLGSAHQGCLPPFPADVFMVPQYGYLTLNNGSQAVGRSSFYCLEYFPSQMLRTGNNFTFSYTFEDVPFHSSYAHSQSLDRLMNPLIDQYLYYLSRTNTPSGTTTQSRLQFSQAGASDIRDQSRNWLPGPCYRQQRVSKTAADNNNSDYSWTGATKYHLNGRDSLVNPGTAMASHKDDEEKYFPQSGVLIFGKQDSGKTNVDIEKVMITDEEEIRTTNPVATEQYGSVSTNLQSGDTQAATSDVNTQGVLPGMARQDRDVYLQGPIWAKIPHTDGHFHPSPLMGGFGLKHPPPQILIKNTPVPANPSTTFSAAKFASFITQYSTGQVSVEIEWEPQKENSKRWNPEIQYTSNYNKSVNVDFTVDTNGVYSEPRPIGTRYLTRNL

SEQ ID NO: 2324 - protein, 735 aa, synthetic construct
  REGION 1..735: note = source = /note="Description of Artificial Sequence: Synthetic polypeptide"
MAADGYLPDWLEDTLSEGIRQWWKLKPGPPPPKPAERHKDDSRGLVLPGYKYLGPFNGLDKGEPVNEADAAALEHDKAYDRQLDSGDNPYLKYNRADAEFQERLKEDTSFGGNLARAVFQAKKRVLEPLGLVEEPVKTAPGKKRPVEHSPAEPDSSSGTGKSGQQPARKRLNFGQTGDADSVPDPQPLGQPPAAPSGLGTNTMASGSGAPMADNNEGADGVGNSSGNWHCDSTWMGDRVITTSTRTWALPTYNNHLYKQISSQSGASNDNHYFGYSTPWGYFDFNRFHCHFSPRDWQRLINNNWGFRPKRLNFKLFNIQVKEVTQNDGTTTIANNLTSTVQVFTDSEYQLPYVLGSAHQGCLPPFPADVFMVPQYGYLTLNNGSQAVGRSSFYCLEYFPSQMLRTGNNFTFSYTFEDVPFHSSYAHSQSLDRLMNPLIDQYLYYLSRTNTPSGTTTQSRLQFSQAGASDIRDQSRNWLPGPCYRQQRVSKTAADNNNSDYSWTGATKYHLNGRDSLVNPGTAMASHKDDEEKYFPQSGVLIFGKQDSGKTNVDIEKVMITDEEEIRTTNPVATEQYGSVSTNLQSGNTQAATSDVNTQGVLPGMVRQDRDVYLQGPIWAKIPHTDGHFHPSPLMGGFGLKHPPPQILIKNTPVPANPSTTFSAAKFASFITQYSTGQVSVEIEWEPQKENSKRWNPEIQYTSNYNKSVNVDFTVDTNGVYSEPRPIGTRYLTRNL

SEQ ID NO: 2325 - protein, 735 aa, synthetic construct
  REGION 1..735: note = source = /note="Description of Artificial Sequence: Synthetic polypeptide"
MAADGYLPDWLEDTLSEGIRQWWKLKPGPPPPKPAERHKDDSRGLVLPGYKYLGPFNGLDKGEPVNEADAAALEHDKAYDRQLDSGDNPYLKYNHADAEFQERLKEDTSFGGNLARAVFQAKKRVLEPLGLVEEPVKTAPGKKRPVEHSPAEPDSSSGTGKSGQQPARKRLNFGQTGDADSVPDPQPLGQPPAAPSGLGTNTMASGSGAPMADNNEGADGVGNSSGNWHCDSTWMGDRVITTSTRTWALPTYNNHLYKQISSQSGASNDNHYFGYSTPWGYFDFNRFHCHFSPRDWQRLINNNWGFRPKRLNFKLFNIQVKEVTQNDGTTTIANNLTSTVQVFTDSEYQLPYVLGSAHQGCLPPFPADVFMVPQYGYLTLNNGSQAVGRSSFYCLEYFPSQMLRTGNNFTFSYTFEDVPFHSSYAHSQSLDRLMNPLIDQYLYYLSRTNTPSGTTTQSRLQFSQAGASDIRDQSRNWLPGPCYRQQRVSKTAADNNNSDYSWTGATKYHLNGRDSLVNPGTAMASHKDDEEKYFPQSGVLIFGKQDSGKTNVDIEKVMITDEEEVRTTNPVATEQYGSVSTNLQSGNTQAATSDVNTQGVLPGMVRQDRDVYLQGPIWAKIPHTDGHFHPSPLMGGFGLKHPPPQILIKNTPVPANPSTTFSAAKFASFITQYSTGQVSVEIEWEPQKENSKRWNPEIQYTSNYNKSVNVDFTVDTNGVYSEPRPIGTRYLTRNL

SEQ ID NO: 2326 - protein, 735 aa, synthetic construct
  REGION 1..735: note = source = /note="Description of Artificial Sequence: Synthetic polypeptide"
MAADGYLPDWLEDTLSEGIRQWWKLKPGPPPPKPAERHKDDSRGLVLPGYKYLGPFNGLDKGEPVNEADAAALEHDKAYDRQLDSGDNPYLKYNHADAEFQERLKEDTSFGGNLARAVFQAKKRVLEPLGLVEEPVKTAPGKKRPVEHSPAGPDSSSGTGKSGQQPARKRLNFGQTGDADSVPDPQPLGQPPAAPSGLGTNTMASGSGAPMADNNEGADGVGNSSGNWHCDSTWMGDRVITTSTRTWALPTYNNHLYKQISSQSGASNDNHYFGYSTPWGYFDFNRFHCHFSPRDWQRLINNNWGFRPKRLNFELFNIQVKEVTQNDGTTTIANNLTSTVQVFTDSEYQLPYVLGSAHQGCLPPFPADVFMVPQYGYLTLNNGSQAVGRSSFYCLEYFPSQMLRTGNNFTFSYTFEDVPFHSSYAHSQSLDRLMNPLIDQYLYYLSRTNTPSGTTTQSRLQFSQAGASDIRDQSRNWLPGPCYRQQRVSKTAADNNNSDYSWTGATKYHLNGRDSLVNPGTAMASHKDDEEKYFPQSGVLIFGKQDSGKTNVDIEKVMITDEEEIRTTNPVATEQYGSVSTNLQSGNTQAATSDVNTQGVLPGMVWQDRDVYLQGPIWAKIPHTDGHFHPSPLMGGFGLKHPPPQILIKSTPVPANPSTTFSAAKFASFITQYSTGQVSVEIEWELQKENSKRWNPEIQYTSNYNKSVNVDFTVDTNGVYSEPRPIGTRYLTRNL

SEQ ID NO: 2327 - protein, 735 aa, synthetic construct
  REGION 1..735: note = source = /note="Description of Artificial Sequence: Synthetic polypeptide"
MAADGYLPDWLEDTLSEGIRQWWKLKPGPPPPKPAERHKDDSRGLVLPGYKYLGPFNGLDKGEPVNEADAAALEHDKAYDRQLDSGDNPYLKYNHADAEFQERLKEDTSFGGNLARAVFQAKKRVLEPLGLVEEPVKTAPGKKRPVEHSPAGPDSSSGTGKSGQQPARKRLNFGQTGDADSVPDPQPLGQPPAAPSGLGTNTMASGSGAPMADNNEGADGVGNSSGNWHCDSTWMGDRVITTSTRTWALPTYNNHLYKQISSQSGASNDNHYFGYSTPWGYFDFNRFHCYFSPRDWQRLINNNWGFRPKRLNFELFNIQVKEVTQNDGTTTIANNLTSTVQVFTDSEYQLPYVLGSAHQGCLPPFPADVFMVPQYGYLTLNNGSQAVGRSSFYCLEYFPSQMLRTGNNFTFSYTFEDVPFHSSYAHSQSLDRLMNPLIDQYLYYLSRTNTPSGTTTQSRLQFSQAGASDIRDQSRNWLPGPCYRQQRVSKTAADNNNSDYSWTGATKYHLNGRDSLVNPGTAMASHKDDEEKYFPQSGVLIFGKQDSGKTNVDIEKVMITDEEEIRTTNPVATEQYGSVSTNLQSGNTQAATSDVNTQGVLPGMVWQDRDVYLQGPIWAKIPHTDGHFHPSPLMGGFGLKHPPPQILIKSTPVPANPSTTFSAAKFASFITQYSTGQVSVEIEWELQKENSKRWNPEIQYTSNYNKSVNVDFTVDTNGVYSEPRPIGTRYLTRNL

SEQ ID NO: 2328 - protein, 734 aa, synthetic construct
  REGION 1..734: note = source = /note="Description of Artificial Sequence: Synthetic polypeptide"
MAADGYLPDWLEDTLSEGIRQWWKLKPGPPPPKPAERHKDDSRGLVLPGYKYLGPFNGLDKGEPVNEADAAALEHDKAYDRQLDSGDNPYLKYNHADAEFQERLKEDTSFGGNLARAVFQAKKRVLEPLGLVEEPVKTAPGKKRPVEHSPAEPDSSSGTGKSGQQPARKRLNFGQTGDADSVPDPQPLGQPPAAPSGLGTNTMASGSGAPMADNNEGADGVGNSSGNWHCDSTWMGDRVITTSTRTWALPTYNNHLYKQISSQSGASNDNHYFGYSTPWGYFDFNRFHCHFSPRDWQRLINNNWGFRPKRLNFKLFNIQVKEVTQNDGTTTIANNLTSTVQVFTDSEYQLPYVLGSAHQGCLPPFPADVFMVPQYGYLTLNNGSQAVGRSSFYCLEYFPSQMLRTGNNFTFSYTFEDVPFHSSYAHSQSLDRLMNPLIDQYLYYLSRTNTPSGTTTQSRLQFSQAGASDIRDQSRNWLPGPCYRQQRVSKTAADNNSDYSWTGATKYHLNGRDSLVNPGTAMASHKDDEEKYFPQSGVLIFGKQDSGKTNVDIEKVMITDEEEIRTTNPVATEQYGSVSTNLQSGNTQAATSDVNTQGVLPGMVRQDRDVYLQGPIWAKIPHTDGHFHPSPLMGGFGLKHPPPQILIKNTPVPANPSTTFSAAKFASFITQYSTGQVSVEIEWEPQKENSKRWNPEIQYTSNYNKSVNVDFTVDTNGVYSEPRPIGTRYLTRNL

SEQ ID NO: 2329 - protein, 735 aa, synthetic construct
  REGION 1..735: note = source = /note="Description of Artificial Sequence: Synthetic polypeptide"
MAADGYLPDWLEDTLSEGIRQWWKLKPGPPPPKPAERHKDDSRGLVLPGYKCLGPFNGLDKGEPVNEADAAALEHDKAYDRQLDSGDNPYLKYNHADAEFQERLKEDTSFGGNLARAVFQAKKRVLEPLGLVEEPVKTAPGKKRPVEHSPAESDSSSGTGKSGQQPARKRLNFGQTGDADSVPDPQPLGQPPAAPSGLGTNTMASGSGAPMADNNEGADGVGNSSGNWHCDSTWMGDRVITTSTRTWALPTYNNHLYKQISSQSGASNDNHYFGYSTPWGYFDFNRFHCHFSPRDWQRLINNNWGFRPKRLNFKLFNIQVKEVTQNDGTTTIANNLTSTVQVFTDSEYQLPYVLGSAHQGCLPPFPADVFMVPQYGYLTLNNGSQAVGRSSFYCLEYFPSQMLRTGNNFTFSYTFEDVPFHSSYAHSQSLDRLMNPLIDQYLYYLSRTNTPSGTTTQSRLQFSQAGASDIRDQSRNWLPGPCYRQQRVSKTAADNNNSDYSWTGATKYHLNGRDSLVNPGTAMASHKDDEEKYFPQSGVLIFGKQDSGKTNVDIEKVMITDEEEIRTTNPVATEQYGSVSTNLQSGNTQAATSDVNTQGVLPGMVWQDRDVYLQGPIWAKIPHTDGHFHPSPLMGGFGLKHPPPQILIKNTPVPANPSTTFSAAKFASFITQYSTGQVSVEIEWELQKENSKRWNPEIQYTSNYNKSVNVDFTVDTNGVYSEPRPIGTRYLTRNL

SEQ ID NO: 2330 - protein, 735 aa, synthetic construct
  REGION 1..735: note = source = /note="Description of Artificial Sequence: Synthetic polypeptide"
MAADGYLPDWLEDILSEGIRQWWKLKPGPPPPKPAERHKDDSRGLVLPGYKYLGPFNGLDKGEPVNEADAAALEHDKAYDRQLDSGDNPYLKYNHADAEFQERLKEDTSFGGNLGRAVFQAKKRVLEPLGLVEEPVKTAPGKKRPVEQSPAEPDSSSGTGKAGNQPARKRLNFGQTGDADSVPDPQPLGQPPAAPSGLGTNTMASGSGAPMADNNEGADGVGNSSGNWHCDSTWMGDRVITTSTRTWALPTYNNHLYKQISSQSGASNDNHYFGYSTPWGYFDFNRFHCHFSPRDWQRLINNNWGFRPKRLNFKLFNIQVKEVTQNDGTTTIANNLTSTVQVFTDSEYQLPYVLGSAHQGCLPPFPADVFMVPQYGYLTLNNGSQAVGRSSFYCLEYFPSQMLRTGNNFTFSYTFEDVPFHSSYAHSQSLDRLMNPLIDQYLYYLSRTNTPSGTTTQSRLQFSQAGASDIRDQSRNWLPGPCYRQQRVSKTAADNNNSDYSWTGATKYHLNGRDSLVNPGTAMASHKDDEEKYFPQSGVLIFGKQDSGKTNVDIEKVMITDEEEIRTTNPVATEQYGSVSTNLQSGNTQAATSDVNTQGVLPGMVRQDRDVYLQGPIWAKIPHTDGHFHPSPLMGGFGLKHPPPQILIKNTPVPANPSTTFSAAKFASFITQYSTGQVSVEIEWEPQKENSKRWNPEIQYTSNYNKSVNVDFTVDTNGVYSEPRPIGTRYLTRNL

SEQ ID NO: 2331 - protein, 735 aa, synthetic construct
  REGION 1..735: note = source = /note="Description of Artificial Sequence: Synthetic polypeptide"
MAADGYLPDWLEDTLSEGIRQWWKLKPGPPPPKPAERHKDDSRGLVLPGYKYLGPFNGLDKGEPVNEADAAALEHDKAYDRQLDSGDNPYLKYNHADAEFQERLKEDTSFGGNLARAVFQAKKRVLEPLGLVEEPVKTAPGKKRPVEHSPAEPDSSSGTGKSGQQPARKRLNFGQTGDADSVPDPQPLGQPPAAPSGLGTNTMASGSGAPMADNNEGADGVGNSSGNWHCDSTWMGDRVITTSTRTWALPTYNNHLYKQISSQSGASNDNHYFGYSTPWGYFDFNRFHCHFSPRDWQRLINNNWGFRPKRLNFKLFNIQVKEVTQNDGTTTIANNLTSTVQVFTDSEYQLPYVLGSAHQGCLPPFPADVFMVPQYGYLTLNNGSQAVGRSSFYCLEYFPSQMLRTGNNFTFSYTFEDVPFHSSYAHSQSLDRLMNPLIDQYLYYLSRTNTPSGTTTQSRLQFSQAGASDIRDQSRNWLPGPCYRQQRVSKTAADNNNSDYSWTGATKYHLNGRDSLVNPGTAMASHKDDEEKYFPQSGVLIFGKQDSGKTNVDIEKVMITDEEEIRTTNPVATEQYGSVSTNLQSGNTQAATSDVNTQGVLPGMVRQDRDVYLQGPIWAKIPHTDGHFHPSPLMGGFGLKHPPPQILIKNTPVPANPSTTFSAAKFASFITQYSTGQVSVEIEWEPQKENSKRWNPEIQYTSNYNKSVNVDFTVDTNGVYSEPRPIGTRCLTRNL

SEQ ID NO: 2332 - protein, 735 aa, synthetic construct
  REGION 1..735: note = source = /note="Description of Artificial Sequence: Synthetic polypeptide"
MAADGYLPDWLEDTLSEGIRQWWKLKPGPPPPKPAERHKDDSRGLVLPGYKYLGPFNGLDKGEPVNEADAAALEHDKAYDRQLDSGDNPYLKYNHADAEFQERLKEDTSFGGNLARAVFQAKKRVLEPLGLVEEPVKTAPGKKRPVEHSPAEPDSSSGTGKSGQQPARKRLNFGQTGDADSVPDPQPLGQPPAAPSGLGTNTMASGSGAPMADNNEGADGVGNSSGNWHCDSTWMGDRVITTSTRTWALPTYNNHLYKQISSQSGASNDNHYFGYSTPWGYFDFNRFHCHFSPRDWQRLINNNWGFRPKRLNFKLFNIQVKEVTQNDGTTTIANNLTSTVQVFTDSEYQLPYVLGSAHQGCLPPFPADVFMVPQYGYLTLNNGSQAVGRSSFYCLEYFPSQMLRTGNNFTFSYTFEDVPFHSSYAHSQSLDRLMNPLIDQYLYYLSRTNTPSGTTTQSRLQFSQAGASDIRDQSRNWLPGPCYRQQRVSKTAADNNNSDYSWTGATKYHLNGRDSLVNPGTAMASHKDDEEKYFPQSGVLIFGKQDSGKTNVDIEKVMITDEEEIRTTNPVATEQYGSVSTNLQSGNTQAATSDVNTQGVLPGMVRQGRDVYLQGPIWAKIPHTDGHFHPSPLMGGFGLKHPPPQILIKNTPVPANPSTTFSAAKFASFITQYSTGQVSVEIEWEPQKENSKRWNPEIQYTSNYNKSVNVDFTVDTNGVYSEPRPIGTRYLTRNL

SEQ ID NO: 2333 - protein, 735 aa, synthetic construct
  REGION 1..735: note = source = /note="Description of Artificial Sequence: Synthetic polypeptide"
MAADGYLPDWLEDTLSEGIRQWWKLKPGPPPPKPAERHKDDSRGLVLPGYKYLGPFNGLDKGEPVNEADAAALEHDKAYDRQLDSGDNPYLKYNHADAEFQERLKEDTSFGGNLARAVFQAKKRVLEPLGLVEEPVKTAPGKKRPVEHSPAEPDSSSGTGKSGQQPARKRLNFGQTGDADSVPDPQPLGQPPAAPSGLGTNTMASGSGAPMADNNEGADGVGNSSGNWHCDSTWMGDRVITTSTRTWALPTYNNHLYKQISSQSGASNDNHYFGYSTPWGYFDFNRFHCHFSPRDWQRLINNNWGFRPKRLNFKLFNIQVKEVTQNDGTTTIANNLTSTVQVFTDSEYQLPYVLGSAHQGCLPPFPADVFMVPQYGYLTLNNGSQAVGRSSFYCLEYFPSQMLRTGNNFTFSYTFEDVPFHSSYAHSQSLDRLMNPLIDQYLYYLSRTNTPSGTTTQSRLQFSQAGASDIRDQSRNWLPGPCYRQQRVSKTAADNNNSDYSWTGATKYHLNGRDSLVNPGTAMASHKDDEEKYFPQSGVLIFGKQDSGKTNVDIEKVMITDEGEIRTTNPVATEQYGSVSTNLQSGNTQAATSDVNTQGVLPGMVRQDRDVYLQGPIWAKIPHTDGHFHPSPLMGGFGLKHPPPQILIKNTPVPANPSTTFSAAKFASFITQYSTGQVSVEIEWEPQKENSKRWNPEIQYTSNYNKSVNVDFTVDTNGVYSEPRPIGTRYLTRNL

SEQ ID NO: 2334 - protein, 735 aa, synthetic construct
  REGION 1..735: note = source = /note="Description of Artificial Sequence: Synthetic polypeptide"
MAADGYLPDWLEDTLSEGIRQWWKLKPGPPPPKPAERHKDDSRGLVLPGYKYLGPFNGLDKGEPVNEADAAALEHDKAYDRQLDSGDNPYLKYNHADAEFQERLKEDTSFGGNLARAVFQAKKRVLEPLGLVEEPVKTAPGKKRPVEHSPAEPDSSSGTGKSGQQPARKRLNFGQTGDADSVPDPQPLGQPPAAPSGLGTNTMASGSGAPMADNNEGADGVGNSSGNWHCDSTWMGDRVITTSTRTWALPTYNNHLYKQISSQSGASNDNHYFGYSTPWGYFDFNRFHCHFSPRDWQRLINNNWGFRPKRLNFELFNIQVKEVTQNDGTTTIANNLTSTVQVFTDSEYQLPYVLGSAHQGCLPPFPADVFMVPQYGYLTLNNGSQAVGRSSFYCLEYFPSQMLRTGNNFTFSYTFEDVPFHSSYAHSQSLDRLMNPLIDQYLYYLSRTNTPSGTTTQSRLQFSQAGASDIRDQSRNWLPGPCYRQQRVSKTAADNNNSDYSWTGATKYHLNGRDSLVNPGTAMASHKDDEEKYFPQSGVLIFGKQDSGKTNVDIEKVMITDEEEIRTTNPVATEQYGSVSTNLQSGNTQAATSDVNTQGVLPGMVWQDRDVYLQGPIWAKIPHTDGHFHPSPLMGGFGLKHPPPQILIKSTPVPANPSTTFSAAKFASFITQYSTGQVSVEIEWELQKENSKRWNPEIQYTSNYNKSVNVDFTVDTNGVYSEPRPIGTRYLTRNL

SEQ ID NO: 2335 - protein, 735 aa, synthetic construct
  REGION 1..735: note = source = /note="Description of Artificial Sequence: Synthetic polypeptide"
MAADGYLPDWLEDILSEGIRQWWKLKPGPPPPKPAERHKDDSRGLVLPGYKYLGPFNGLDKGEPVNEADAAALEHDKAYDRQLDSGDNPYLKYNHADAEFQERLKEDTSFGGNLGRAVFQAKKRVLEPLGLVEEPVKTAPGKKRPVEQSPAEPDSSSGTGKAGNQPARKRLNFGQTGDADSVPDPQPLGQPPAAPSGLGSTTMATGSGAPMADNNEGADGVGNSSGNWHCDSTWMGDRVITTSTRTWALPTYNNHLYKQISSQSGASNDNHYFGYSTPWGYFDFNRFHCHFSPRDWQRLINNNWGFRPKRLNFKLFNIQVKEVTQNDGTTTIANNLTSTVQVFTDSEYQLPYVLGSAHQGCLPPFPADVFMVPQYGYLTLNNGSQAVGRSSFYCLEYFPSQMLRTGNNFTFSYTFEDVPFHSSYAHSQSLDRLMNPLIDQYLYYLSRTNTPSGTTTQSRLQFSQAGASDIRDQSRNWLPGPCYRQQRVSKTAADNNNSDYSWTGATKYHLNGRDSLVNPGTAMASHKDDEEKYFPQSGVLIFGKQDSGKTNVDIEKVMITDEEEIRTTNPVATEQYGSVSTNLQSGNTQAATSDVNTQGVLPGMVRQDRDVYLQGPIWAKIPHTDGHFHPSPLMGGFGLKHPPPQILIKNTPVPANPSTTFSAAKFASFITQYSTGQVSVEIEWEPQKENSKRWNPEIQYTSNYNKSVNVDFTVDTNGVYSEPRPIGTRYLTRNL

SEQ ID NO: 2336 - protein, 735 aa, synthetic construct
  REGION 1..735: note = source = /note="Description of Artificial Sequence: Synthetic polypeptide"
MAADGYLPDWLEDTLSEGIRQWWKLKPGPPPPKPAERHKDDSRGLVLPGYKYLGPFNGLDKGEPVNEADAAALEHDKAYDRQLDSGDNPYLKYNHADAEFQERLKEDTSFGGNLARAVFQAKKRVLEPLGLVEEPVKTAPGKKRPVEHSPAEPDSSSGTGKSGQQPARKRLNFGQTGDADSVPDPQPLGQPPAAPSGLGTNTMASGSGAPMADNNEGADGVGNSSGNWHCDSTWMGDRVITTSTRTWALPTYNNHLYKQISSQSGASNDNHYFGYSTPWGYFDFNRFHCHFSPRDWQRLINNNWGFRPKRLNFKLFNIQVKEVTQNDGTTTIANNLTSTVQVFTDSEYQLPYVLGSAHQGCLPPFPADVFMVPQYGYLTLNNGSQAVGRSSFYCLEYFPSQMLRTGNNFTFSYTFEDVPFHSSYAHSQSLDRLMNPLIDQYLYYLSRTNTPSGTTTQSRLQFSQAGASDIRDQSRNWLPGPCYRQQRVSKTAADNNNSDYSWTGATKYHLNGRDSLVNPGTAMASHKDDEEKYFPQSGVLIFGKQDSGKTNVDIEKVMITDEEEIRTTNPVATEQYGSVSTNLQSGNTQAATSDVNTQGVLPGMVRQDRDVYLQGPIWAKIPHTDGHFHPSPLMGGFGLKHPPPQILIKNTPVPANPSTTFSAAKFASFITQYSTGQVSVEIEWEPQKENSKRWNPEIQYTSNYNKSVNVDFTVDTNGVYSEPRPIGTRYLTRNL

SEQ ID NO: 2337 - protein, 735 aa, synthetic construct
  REGION 1..735: note = source = /note="Description of Artificial Sequence: Synthetic polypeptide"
MAADGYLPDWLEDTLSEGIRQWWKLKPGPPPPKPAERHKDDSRGLVLPGYKYLGPFNGLDKGEPVNEADAAALEHDKAYDRQLDSGDNPYLKYNHADAEFQERLKEDTSFGGNLARAVFQAKKRVLEPLGLVEEPVKTAPGKKRPVEHSPAEPDSSSGTGKSGQQPARKRLNFGQTGDADSVPDPQPLGQPPAAPSGLGTNTMASGSGAPMADNNEGADGVGNSSGNWHCDSTWMGDRVITTSTRTWALPTYNNHLYKQISSQSGASNDNHYFGYSTPWGYFDFNRFHCHFSPRDWQRLINNNWGFRPKRLNFKLFNIQVKEVTQNDGTTTIANNLTSTVQVFTDSEYQLPYVLGSAHQGCLPPFPADVFMVPQYGYLTQNNGSQAVGRSSFYCLEYFPSQMLRTGNNFTFSYTFEDVPFHSSYAHSQSLDRLMNPLIDQYLYYLSRTNTPSGTTTQSRLQFSQAGASDIRDQSRNWLPGPCYRQQRVSKTAADNNNSDYSWTGATKYHLNGRDSLVNPGTAMASHKDDEEKYFPQSGVLIFGKQDSGKTNVDIEKVMITDEEEIRTTNPVATEQYGSVSTNLQSGNTQAATSDVNTQGVLPGMVRQDRDVYLQGPIWAKIPHTDGHFHPSPLMGGFGLKHPPPQILIKNTPVPANPSTTFSAAKFASFITQYSTGQVSVEIEWEPQKENSKRWNPEIQYTSNYNKSVNVDFTVDTNGVYSEPRPIGTRYLTRNL

SEQ ID NO: 2338 - protein, 735 aa, synthetic construct
  REGION 1..735: note = source = /note="Description of Artificial Sequence: Synthetic polypeptide"
MAADGYLPDWLEDTLSEGIRQWWKLKPGPPPPKPAERHKDDSRGLVLPGYKYLGPFNGLDKGEPVNEADAAALEHDKAYDRQLDSGDNPYLKYNRADAEFQERLKEDTSFGGNLARAVFQAKKRVLEPLGLVEEPVKTAPGKKRPVEHSPAGPDSSSGTGKSGQQPARKRLNFGQTGDADSVPDPQPLGQPPAAPSGLGTNTMASGSGAPMADNNEGADGVGNSSGNWHCDSTWMGDRVITTSTRTWALPTYNNHLYKQISSQSGASNDNHYFGYSTPWGYFDFNRFHCHFSPRDWQRLINNNWGFRPKRLNFELFNIQVKEVTQNDGTTTIANNLTSTVQVFTDSEYQLPYVLGSAHQGCLPPFPADVFMVPQYGYPTLNNGSQAVGRSSFYCLEYFPSQMLRTGNNFTFSYTFEDVPFHSSYAHSQSLDRLMNPLIDQYLYYLSRTNTPSGTTTQSRLQFSQAGASDIRDQSRNWLPGPCYRQQRVSKTAADNNNSDYSWTGATKYHLNGRDSLVNPGTAMASHKDDEEKYFPQSGVLIFGKQDSGKTNVDIEKVMITDEEEIRTTNPVATEQYGSVSTNLQSGNTQAATSDVNTQGVLPGMVWQDRDVYLQGPIWAKIPHTDGHFHPSPLMGGFGLKHPPPQILIKSTPVPANPSTTFSAAKFASFITQYSTGQVSVEIEWELQKENSKRWNPEIQYTSNYNKSVNVDFTVDTNGVYSEPRPIGTRYLTRNL

SEQ ID NO: 2339 - protein, 735 aa, synthetic construct
  REGION 1..735: note = source = /note="Description of Artificial Sequence: Synthetic polypeptide"
MAADGYLPDWLEDTLSEGIRQWWKLKPGPPPPKPAERHKDDSRGLVLPGYKYLGPFNGLDKGEPVNEADAAALEHDKAYDRQLDSGDNPYLKYNHADAEFQERLKEDTSFGGNLARAVFQAKKRVLEPLGLVEEPVKTAPGKKRPVEHSPAEPDSSSGTGKSGQQPARKRLNFGQTGDADSVPDPQPLGQPPAAPSGLGTNTMASGSGAPMADNNEGADGVGNSSGNWHCDSTWMGDRVITTSTRTWALPTYNNHLYKQISSQSGASNDNHYFGYSTPWGYFDFNGFHCHFSPRDWQRLINNNWGFRPKRLNFKLFNIQVKEVTQNDGTTTIANNLTSTVQVFTDSEYQLPYVLGSAHQGCLPPFPADVFMVPQYGYLTLNNGSQAVGRSSFYCLEYFPSQMLRTGNNFTFSYTFEDVPFHSSYAHSQSLDRLMNPLIDQYLYYLSRTNTPSGTTTQSRLQFSQAGASDIRDQSRNWLPGPCYRQQRVSKTAADNNNSDYSWTGATKYHLNGRDSLVNPGTAMASHKDDEEKYFPQSGVLIFGKQDSGKTNVDIEKVMITDEEEIRTTNPVATEQYGSVSTNLQSGNTQAATSDVNTQGVLPGMVRQDRDVYLQGPIWAKIPHTDGHFHPSPLMGGFGLKHPPPQILIKNTPVPANPSTTFSAAKFASFITQYSTGQVSVEIEWEPQKENSKRWNPEIQYTSNYNKSVNVDFTVDTNGVYSEPRPIGTRYLTRNL

SEQ ID NO: 2340 - protein, 735 aa, synthetic construct
  REGION 1..735: note = source = /note="Description of Artificial Sequence: Synthetic polypeptide"
MAADGYLPDWLEDTLSEGIRQWWKLKPGPPPPKPAERHKDDSRGLVLPGYKYLGPFNGLDKGEPVNEADAAALEHDKAYDRQLDSGDNPYLKYNHADAEFQERLKEDTSFGGNLARAVFQAKKRVLEPPGLVEEPVKTAPGKKRPVEHSPAEPDSSSGTGKSGQQPARKRLNFGQTGDADSVPDPQPLGQPPAAPSGLGTNTMASGSGAPMADNNEGADGVGNSSGNWHCDSTWMGDRVITTSTRTWALPTYNNHLYKQISSQSGASNDNHYFGYSTPWGYFDFNRFHCHFSPRDWQRLINNNWGFRPKRLNFKLFNIQVKEVTQNDGTTTIANNLTSTVQVFTDSEYQLPYVLGSAHQGCLPPFPADVFMVPQYGYLTLNNGSQAVGRSSFYCLEYFPSQMLRTGNNFTFSYTFEDVPFHSSYAHSQSLDRLMNPLIDQYLYYLSRTNTPSGTTTQSRLQFSQAGASDIRDQSRNWLPGPCYRQQRVSKTAADNNNSDYSWTGATKYHLNGRDSLVNPGTAMASHKDDEEKYFPQSGVLIFGKQDSGKTNVDIEKVMITDEGEIRTTNPVATEQYGSVSTNLQSGNTQAATSDVNTQGVLPGMVRQDRDVYLQGPIWAKIPHTDGHFHPSPLMGGFGLKHPPPQILIKNTPVPANPSTTFSAAKFASFITQYSTGQVSVEIEWEPQKENSKRWNPEIQYTSNYSKSVNVDFTVDTNGVYSEPRPIGTRYLTRNL

SEQ ID NO: 2341 - protein, 735 aa, synthetic construct
  REGION 1..735: note = source = /note="Description of Artificial Sequence: Synthetic polypeptide"
MAADGYLPDWLEDILSEGIRQWWKLKPGPPPPKPAERHKDDSRGLVLPGYKYLGPFNGLDKGEPVNEADAAALEHDKAYDRQLDSGDNPYLKYNHADAEFQERLKEDTSFGGNLGRAVFQAKKRVLEPLGLVEEPVKTAPGKKRPVEQSPAEPDSSSGTGKAGNQPARKRLNFGQTGDADSVPDPQPLGQPPAAPSGLGSTTMATGSGAPMADNNEGADGVGNSSGNWHCDSQWLGDRVITTSTRTWALPTYNNHLYKQISSQSGASNDNHYFGYSTPWGYFDFNRFHCHFSPRDWQRLINNNWGFRPKRLNFKLFNIQVKEVTQNDGTTTIANNLTSTVQVFTDSEYQLPYVLGSAHQGCLPPFPADVFMVPQYGYLTLNNGSQAVGRSSFYCLEYFPSQMLRTGNNFTFSYTFEDVPFHSSYAHSQSLDRLMNPLIDQYLYYLSRTNTPSGTTTQSRLQFSQAGASDIRDQSRNWLPGPCYRQQRVSKTAADNNNSDYSWTGATKYHLNGRDSLVNPGTAMASHKDDEEKYFPQSGVLIFGKQDSGKTNVDIEKVMITDEEEIRTTNPVATEQYGSVSTNLQSGNTQAATSDVNTQGVLPGMVRQDRDVYLQGPIWAKIPHTDGHFHPSPLMGGFGLKHPPPQILIKNTPVPANPSTTFSAAKFASFITQYSTGQVSVEIEWEPQKENSKRWNPEIQYTSNYNKSVNVDFTVDTNGVYSEPRPIGTRYLTRNL

SEQ ID NO: 2342 - protein, 735 aa, synthetic construct
  REGION 1..735: note = source = /note="Description of Artificial Sequence: Synthetic polypeptide"
MAADGYLPDWLEDTLSEGIRQWWKLKPGPPPPKPAERHKDDSRGLVLPGYKYLGPFNGLDKGEPVNEADAAALEHDKAYDRQLDSGDNPYLKYNHADAEFQERLKEDTSFGGNLARAVFQAKKRVLEPLGLVEEPVKTAPGKKRPVEHSPAEPDSSSGTGKSGQQPARKRLNFGQTGDADSVPDPQPLGQPPAAPSGLGTNTMASGSGAPMADNNEGADGVGNSSGNWHCDSTWMGDRVITTSTRTWALPTYNNHLYKQISSQSGASNDNHYFGYSTPWGYFDFNRFHCHFSPRDWQRLINNNWGFRPKRLNFKLFNIQVKEVTQNDGTTTIANNLTSTVQVFTDSEYQLPYVLGSAHQGCLPPFPADVFMVPQYGYLTLNNGSQAVGRSSFYCLEYFPSQMLRTGNNFTFSYTFEDVPFHSSYAHSQSLDRLMNPLIDQYLYYLSRTNTPSGTTTQSRLQFSQAGASDIRDQSRNWLPGPCYRQQRVSKTAADNNNSDYSWTGATKYHLNGRDSLVNPGTAMASHKDDEEKYFPQSGVLIFGKQDSGKTNVDIEKVMITDEEEIRTTNPVATEQYGSVSTNLQSGNTQAATSDVNTQGVLPGTVRQDRDVYLQGPIWAKIPHTDGHFHPSPLMGGFGLKHPPPQILIKNTPVPANPSTTFSAAKFASFITQYSTGQVSVEIEWEPQKENSKRWNPEIQYTSNYNKSVNVDFTVDTNGVYSEPRPIGTRYLTRNL

SEQ ID NO: 2343 - protein, 735 aa, synthetic construct
  REGION 1..735: note = source = /note="Description of Artificial Sequence: Synthetic polypeptide"
MAADGYLPDWLEDILSEGIRQWWKLKPGPPPPKPAERHKDDSRGLVLPGYKYLGPFNGLDKGEPVNEADAAALEHDKAYDRQLDSGDNPYLKYNHADAEFQERLKEDTSFGGNLGRAVFQAKKRVLEPLGLVEEPVKTAPGKKRPVEHSPAEPDSSSGTGKSGQQPARKRLNFGQTGDADSVPDPQPLGQPPAAPSGLGTNTMASGSGAPMADNNEGADGVGNSSGNWHCDSTWMGDRVITTSTRTWALPTYNNHLYKQISSQSGASNDNHYFGYSTPWGYFDFNRFHCHFSPRDWQRLINNNWGFRPKRLNFKLFNIQVKEVTQNDGTTTIANNLTSTVQVFTDSEYQLPYVLGSAHQGCLPPFPADVFMVPQYGYLTLNNGSQAVGRSSFYCLEYFPSQMLRTGNNFTFSYTFEDVPFHSSYAHSQSLDRLMNPLIDQYLYYLSRTNTPSGTTTQSRLQFSQAGASDIRDQSRNWLPGPCYRQQRVSKTAADNNNSDYSWTGATKYHLNGRDSLVNPGTAMASHKDDEEKYFPQSGVLIFGKQDSGKTNVDIEKVMITDEEEIRTTNPVATEQYGSVSTNLQSGNTQAATSDVNTQGVLPGMVRQDRDVYLQGPIWAKIPHTDGHFHPSPLMGGFGLKHPPPQILIKNTPVPANPSTTFSAAKFASFITQYSTGQVSVEIEWEPQKENSKRWNPEIQYTSNYNKSVNVDFTVDTNGVYSEPRPIGTRYLTRNL

SEQ ID NO: 2344 - protein, 735 aa, synthetic construct
  REGION 1..735: note = source = /note="Description of Artificial Sequence: Synthetic polypeptide"
MAADGYLPDWLEDTLSEGIRQWWKLKPGPPPPKPAERHKDDSRGLVLPGYKYLGPFNGLDKGEPVNEADAAALEHDKAYDRQLDSGDNPYLKYNHADAEFQERLKEDTSFGGNLARAVFQAKKRVLEPLGLVEEPVKTAPGKKRPVEHSPAESDSSSGTGKSGQQPARKRLNFGQTGDADSVPDPQPLGQPPAAPSGLGTNTMASGSGAPMADNNEGADGVGNSSGNWHCDSTWMGDRVITTSTRTWALPTYNNHLYKQISSQSGASNDNHYFGYSTPWGYFDFNRFHCHFSPRDWQRLINNNWGFRPKRLNFKLFNIQVKEVTQNDGTTTIANNLTSTVQVFTDSEYQLPYVLGSAHQGCLPPFPADVFMVPQYGYLTLNNGSQAVGRSSFYCLEYFPSQMLRTGNNFTFSYTFEDVPFHSSYAHSQSLDRLMNPLIDQYLYYLSRTNTPSGTTTQSRLQFSQAGASDIRDQSRNWLPGPCYRQQRVSKTAADNNNSDYSWTGATKYHLNGRDSLVNPGTAMASHKDDEEKYFPQSGVLIFGKQDSGKTNVDIEKVMITDEEEIRTTNPVATEQYGSVSTNLQSGNTQAATSDVNTQGVLPGMVWQDRDVYLQGPIWAKIPHTDGHFHPSPLMGGFGLKHPPPQILIKNTPVPANPSTTFSAAKFASFITQYSTGQVSVEIEWELQKENSKRWNPEIQYTSNYNKSVNVDFTVDTNGVYSEPRPIGTRYLTRNL

SEQ ID NO: 2345 - protein, 735 aa, synthetic construct
  REGION 1..735: note = source = /note="Description of Artificial Sequence: Synthetic polypeptide"
MAADGYLPDWLEDTLSEGIRQWWKLKPGPPPPKPAERHKDDSRGLVLPGYKYLGPFNGLDKGEPVNEADAAALEHDKAYDRQLDSGDNPYLKYNHADAEFQERLKEDTSFGGNLARAVFQAKKRVLEPLGLVEEPVKTAPGKKRPVEHSPAEPDSSSGTGKSGQQPARKRLNFGQTGDADSVPDPQPLGQPPAAPSGLGTNTMASGSGAPMADNNEGADGVGNSSGNWHCDSTWMGDRVITTSTRTWALPTYNNHLYKQISSQSGASNDNHYFGYSTPWGYFDFNRFHCHFSPRDWQRLINNNWGFRPKRLNFKLFNIQVKEVTQNDGTTTIANNLTSTVQVFTDSEYQLPYVLGSAHQGCLPPFPADVFMVPQYGYLTLNNGSQAVGRSSFYCLEYFPSQMLRTGNNFTFSYTFEDVPFHSSYAHSQSLDRLMNPLIDQYLYYLSRTNTPSGTTTQSRLQFSQAGASDIRDQSRNWLPGPCYRQQRVSKTAADNNNSDYSWTGATKYHLNGRDSLVNPGTAMASHKDDEEKYFPQSGVLIFRKQDSGKTNVDIEKVMITDEEEIRTTNPVATEQYGSVSTNLQSGNTQAATSDVNTQGVLPGMVRQDRDVYLQGPIWAKIPHTDGHFHPSPLMGGFGLKHPPPQILIKNTPVPANPSTTFSAAKFASFITQYSTGQVSVEIEWEPQKENSKRWNPEIQYTSNYNKSVNVDFTVDTNGVYSEPRPIGTRYLTRNL

SEQ ID NO: 2346 - protein, 735 aa, synthetic construct
  REGION 1..735: note = source = /note="Description of Artificial Sequence: Synthetic polypeptide"
MAADGYLPDWLEDTLSEGIRQWWKLKPGPPPPKPAERHQDDSRGLVLPGYKYLGPFNGLDKGEPVNEADAAALEHDKAYDRQLDSGDNPYLKYNHADAEFQERLKEDTSFGGNLGRAVFQAKKRVLEPLGLVEEPVKTAPGKKRPVEHSPAEPDSSSGTGKAGQQPARKRLNFGQTGDADSVPDPQPLGQPPAAPSGLGTNTTATGSGAPMADNNEGADGVGNSSGNWHCDSTWMGDRVITTSTRTWALPTYNNHLYKQISSQSGASNDNHYFGYSTPWGYFDFNRFHCHFSPRDWQRLINNNWGFRPKRLNFKLFNIQVKEVTQNDGTTTIANNLTSTVQVFADSEYQLPYVLGSAHQGCLPPFPADVFMVPQYGYLTLNNGSQAVGRSSFYCLEYFPSQMLRTGNNFTFSYTFEDVPFHSSYAHSQSLDRLMNPLIDQYLYYLSKTNAPSGTTTMSRLQFSQAGASDIRDQSRNWLPGPCYRQQRVSKTAADNNNSDYSWTGATKYHLNGRDSLVNPGPAMASHKDDEEKYFPQSGVLIFGKQDSGKTNVDIEKVMITDEEEIRTTNPVATEQYGSVSTNLQSGNTQAATTDVNTQGVLPGMVWQDRDVYLQGPIWAKIPHTDGHFHPSPLMGGFGLKHPPPQILIKNTPVPANPSTTFSAAKFASFITQYSTGQVSVEIEWELQKENSKRWNPEIQYTSNYNKSVNVDFTVDTNGVYSEPRPIGTRYLTRNL

SEQ ID NO: 2347 - protein, 735 aa, synthetic construct
  REGION 1..735: note = source = /note="Description of Artificial Sequence: Synthetic polypeptide"
MAADGYLPDWLEDTLSEGIRQWWKLKPGPPPPKPAERHQDDSRGLVLPGYKYLGPFNGLDKGEPVNEADAAALEHDKAYDRQLDSGDNPYLKYNHADAEFQERLKEDTSFGGNLGRAVFQAKKRVLEPLGLVEEPVKTAPGKKRPVEHSPAEPDSSSGTGKAGQQPARKRLNFGQTGDADSVPDPQPLGQPPAAPSGLGTNTMATGSGAPMADNNEGADGVGNSSGNWHCDSTWMGDRVITTSTRTWALPTYNNHLYKQISSQSGASNDNHYFGYSTPWGYFDFNRFHCHFSPRDWQRLINNNWGFRPKRLNFKLFNIQVKEVTQNDGTTTIANNLTSTVQVFTDSEYQLPYVLGSAHQGCLPPFPADVFMVPQYGYLTLNNGSQAVGRSSFYCLEYFPSQMLRTGNNFTFSYTFEDVPFHSSYAHSQSLDRLMNPLIDQYLYYLSKTNAPSGTTTMSRLQFSQAGASDIRDQSRNWLPGPCYRQQRVSKTAADNNNSDYSWTGATKYHPNGRDSLVNPGPAMASHKDDEEKYFPQSGVLIFGKQDSGKTNVDIEKVMITDEEEIRTTNPVATEQYGSVSTNLQSGNTQAATTDVNTQGVLPGMVWQDRDVYLHGPIWAKIPHTDGHFHPSPLMGGFGLKHPPPQILIKNTPVPANPSTTFSAAKFASFITQYSTGQVSVEIEWELQKENSKRWNPEIQYTSNYNKSVNVDFTVDTNGVYSEPRPIGTRYLTRNL

SEQ ID NO: 2348 - protein, 735 aa, synthetic construct
  REGION 1..735: note = source = /note="Description of Artificial Sequence: Synthetic polypeptide"
MAADGYLPDWLEDTLSEGIRQWWKLKPGPPPPKPAERHQDDSRGLVLPGYKYLGPFNGLDKGEPVNEADAAALEHDKAYDRQLDSGDNPYLKYNHADAEFQERLKEDTSFGGNLGRAVFQAKKRVLEPLGLVEEPVKTAPGKKRPVEHSPAEPDSSSGTGKAGQQPARKRLNFGQTGDADSVPDPQPLGQPPAAPSGLGTNTMATGSGAPMADNNEGADGVGNSSGNWHCDSTWMGDRAITTSTRTWALPTYNNHLYKQISSQSGASNDNHYFGYSTPWGYFDFNRFHCHFSPRDWQRLINNNWGFRPKRLNFKLFNIQVKEVTQNDGTTTIANNLTSTVQVFTDSEYQLPYVLGSAHQGCLPPFPADVFMVPQYGYLTLNNGSQAVGRSSFYCLEYFPSQMLRTGNNFTFSYTFEDVPFHSSYAHSQSLDRLMNPLIDQYLYYLSKTNAPSGTTTMSRLQFSQAGASDIRDQSRNWLPGPCYRQQRVSKTAADNNNSDYSWTGATKYHLNGRDSLVNPGPAMASHKDDEEKYFPQSGVLIFGKQDSGKTNVDIEKVMITDEEEIRTTNPVATEQYGSVSTNLQSGNTQAATTDVNTQGVLPGMVWQDRDVYLQGPIWAKIPHTDGHFHPSPLMGGFGLKHPPPQILIKNTPVPANPSTTFSAAKLASFITQYSTGQVSVEIEWELQKENSKRWNPEIQYTSNYNKSVNVDFTVDTNGVYSEPRPIGTRYLTRNL

SEQ ID NO: 2349 - protein, 735 aa, synthetic construct
  REGION 1..735: note = source = /note="Description of Artificial Sequence: Synthetic polypeptide"
MAADGYLPDWLEDTLSEGIRQWWKLKPGPPPPKPAERHQDDSRGLVLPGYKYLGPFNGLDKGEPVNEADAAALEHDKAYDRQLDSGDNPYLKYNHADAEFQERLKEDTSFGGNLGRAVFQAKKRVLEPLGLVEEPVKTAPGKKRPVEHSPAEPDSSSGTGKAGQQPARKRLNFGQTGDADSVPDPQPPGQPPAAPSGLGTNTMATGSGAPMADNNEGADGVGNSSGNWHCDSTWMGDRVITTSTRTWALPTYNNHLYKQISSQSGASNDNHYFGYSTPWGYFDFNRFHCHFSPRDWQRLINNNWGFRPKRLNFKLFNIQVKEVTQNDGTTTIANNLTSTVQVFTDSEYQLPYVLGSAHQGCLPPFPADVFMVPQYGYLTLNNGSQAVGRSSFYCLEYFPSQMLRTGNNFTFSYTFEDVPFHSSYAHSQSLDRLMNPLIDQYLYYLSKTNAPSGTTTMSRLQFSQAGASDIRDQSRNWLPGPCYRQQRVSKTAADNNNSDYSWTGATKYHLNGRDSLVNPGPAMASHKDDEEKYFPQSGVLIFGKQDSGKTNVDIEKVMITDEEEVRTTNPVATEQYGSVSTNLQSGNTQAATTDVNTQGVLPGMVWQDRDVYLQGPIWAKIPHTDGHFHPSPLMGGFGLKHPPPQILIKNTPVPANPSTTFSAAKFASFITQYSTGQVSVEIEWELQKENSKRWNPEIQYTSNYNKSVNVDFTVDTNGVYSEPRPIGTGYLTRNL

SEQ ID NO: 2350 - protein, 735 aa, synthetic construct
  REGION 1..735: note = source = /note="Description of Artificial Sequence: Synthetic polypeptide"
MAADGYLPDWLEDTLSEGIRQWWKLKPGPPPPKPAERHQDDSRGLVLPGYKYLGPFNGLDKGEPVNEADAAALEHDKAYDRQLDSGDNPYLKYNHADAEFQERLKEDTSFGGNLGRAVFQAKKRVLEPLGLVEEPVKTAPGKKRPVEHSPAEPDSSSGTGKAGQQPARKRLNFGQTGDADSVPDPQPLGQPPAAPSGLGTNTVATGSGAPMADNNEGADGVGNSSGNWHCDSTWMGDRVITTSTRTWALPTYNNHLYKQISSQSGASNDNHYFGYSTPWGYFDFNRFHCHFSPRDWQRLINNNWRFRPKRLNFKLFNIQVKEVTQNDGTTTIADNLTSTVQVFTDSEYQLPYVLGSAHQGCLPPFPADVFMVPQYGYLTLNNGSQAVGRSSFYCLEYFPSQMLRTGNNFTFSYTFEDVPLHSSYAHSQSLDRLMNPLIDQYLYYLSKTNAPSGTTTMSRLQFSQAGASDIRDQSRNWLPGPCYRQQRVSKTAADNNNSDYSWTGATKYHLNGRDSLVNPGPAMASHKDDEEKYFPQSGVLIFGKQDSGKTNVDIEKVMITDEEEIRTTNPVATEQYGSVSTNLQSGNTQAATTDVNTQGVLPGMVWQDRDVYLQGPIWAKIPHTDGHFHPSPLMGGFGLKHPPPQILIKNTPVPANPSTTFSAAKLASFITQYSTGQVSVEIEWELQKENSKRWNPEIQYTSNYNKSVNVDFTADTNGVYSEPRPIGTRYLTRNL

SEQ ID NO: 2351 - protein, 735 aa, synthetic construct
  REGION 1..735: note = source = /note="Description of Artificial Sequence: Synthetic polypeptide"
MAADGYLPDWLEDTLSEGIRQWWKLKPGPPPPKPAERHQDDSRGLVLPGYKYLGPFNGLDKGEPVNEADAAALEHDKAYDRQLDSGDNPYLKYNHADAEFQERLKEDTSFGGNLGRAVFQAKKRVLEPLGLVEEPVKTAPGKKRPVEHSPAEPDSSSGTGKAGQQPARKRSNFGQTGDADSVPDPQPLGQPPAAPSGLGTNTMATGSGAPMADNNEGADGVGNSSGNWHCDSTWMGDRVITTSTRTWALPTYNNHLYKQISSQSGASNDNHYFGYSTPWGYFDFNRFHCHFSPRDWQRLINNNWGFRPKRLNFKLFNIQVKEVAQNDGTTTIANNLTSTVQVFTDSEYQLPYVLGSAHQGCLPPFPADVFMVPQYGYLTLNNGSQAVGRSSFYCLEYFPSQMLRTGNNFTFSYTFEDVPFHSSYAHSQSLDRLMNPLIDQYLYYLSKTNAPSGTTTMSRLQFSQAGASDIRDQSRNWLPGPCYRQQRVSKTAADNNNSDYSWTGATKYHLNGRDSLVNPGPAMASHKDDEEKYFPQSGVLIFGKQDSGKTNVDIKKVMITDEEEIRTTNPVATEQYGSVSTNLQSGNTQAATTDVNTQGVLPGMVWQDRDVYLQGPIWAKIPHTDGHFHPSPLMGGFGLKHPPPQILIKNTPVPANPSTTFSAAKFASFITQYSTGQVSVEIEWELQKENSKRWNPEIQYTSNYNKSVNVDFTVDTNGVYSEPRPIGTRYLTRNL

SEQ ID NO: 2352 - protein, 734 aa, synthetic construct
  REGION 1..734: note = source = /note="Description of Artificial Sequence: Synthetic polypeptide"
MAADGYLPDWLEDTLSEGIRQWWKLKPGPPPPKPAERHQDDSRGLVLPGYKYLGPFNGLDKGEPVNEADAAALEHDKAYDRQLDSGDNPYLKYNHADAEFQERLKEDTSFGGNLGRAVFQAKKRVLEPLGLVEEPVKTAPGKKRPVEHSPAEPDSSSGTGKAGQQPARKRLNFGQTGDADSVPDPQPLGQPPAAPSGLGTNTMATGSGAPMADNNEGADGVGNSSGNWHCDSTWMGDRVITTSTRTWALPTYNNHLYKQISSQSGASNDNHYFGYSTPWGYFDFNRFHCHFSPRDWQRLINNWGFRPKRLNFKLFNIQVKEVTQNDGTTTIANNLTSTVQVFTDSEYQLPYVLGSAHQGCLPPFPADVFMVPQYGYLTLNNGSQAVGRSSFYCLEYFPSQMLRTGNNFTFSYTFEDVPFHSSYAHSQSLDRLMNPLIDQYLYYLSKTNAPSGTTTMSRLQFSQAGASDIRDQSRNWLPGPCYRQQRVSKTAADNNNSDYSWTGATKYHLNGRDSLVNPGPAMASHKDDEEKYFPQSGVLIFGKQDSGKTNVDIEKVMITDEEEIRTTNPVATEQYGSVSTNLQSGNTQAATTDVNTQGVLPGMVWQDRDVYLQGPIWAKIPHTDGHFHPSPLMGGFGLKHPPPQILIKNTPVPANPSTTFSAAKFASFITQYSTGQVSVEIEWELQKENSKRWNPEIQYTSNYNKSVNVDFTVDTNGVYSEPRPIGTRYLTRNL

SEQ ID NO: 2353 - protein, 735 aa, synthetic construct
  REGION 1..735: note = source = /note="Description of Artificial Sequence: Synthetic polypeptide"
MAADGYLPDWLEDTLSEGIRQWWKLKPGPPPPKPAERHQDDSRGLVLPGYKYLGPFNGLDKGEPVNEADAAALEHDKAYDRQLDSGDNPYLKYNHADAEFQERLKEDTSFGGNLGRAVFQAKKRVLEPLGLVEEPVKTAPGKKRPVEHSPAEPDSSSGTGKAGQQPARKRLNFGQTGDADSVPDPQPLGQPPAAPSGLGTNTMATGSGAPMADNNEGADGVGNSSGNWHCDSTWMGDRVITTSTRTWALPTYNNHLYKQISSQSGASNDNHYFGYSTPWGYFDFNRFHCHFSPRDWQRLINNNWGFRPKRLNFKLFNIQVKEVTQNDGTTTIANNLTSTVQVFTDSEYQLPYVLGSAHQGCLPPFPADVFMVPQYGYLTLNNGSQAVGRSSFYCLEYFPSQMLRTGNNFTFSYTFEDVPFHSSYAHSQSLDRLMNPLIDQYLYYLSKTNAPSGTTTMSRLQFSQAGASDIRDQSRNWLPGPCYRQQRVSKTAADNNNSDYSWTGATKYHLNGRDSLVNPGPAMASHKDDEEKYFPQSGVLIFGKQDSGKTNVDIEKVMITDEEEIRTTNPVATEQYGSVSTNLQSGNTQAATTDVNTQGVLPGMVWQDRDVYLQGPIWAKIPHTDGHFHPSPLMGGFGLKHPPPQILIKNTPVPANPSTTFSAAKFASFITQYSTGQVSVEIEWELQKENSKRWNPEIQYTSNYNKSVNVDFTVDTNGVYSEPRPIDTRYLTRNL

SEQ ID NO: 2354 - protein, 735 aa, synthetic construct
  REGION 1..735: note = source = /note="Description of Artificial Sequence: Synthetic polypeptide"
MAADGYLPDWLEDTLSEGIRQWWKLKPGPPPPKPAERHQDDSRGLVLPGYKYLGPFNGLDKGEPVNEADAAALEHDKAYDRQLDSGDNPYLKYNHADAEFQERLKEDTSFGGNLGRAVFQAKKRVLEPLGLVEEPVKTAPGKKRPVEHSPAEPDSSSGTGKAGQQPARKRLNFGQTGDADSVPDPQPLGQPPAAPSGLGTNTMATGSGAPMADNNEGADGVGNSSGNWHCDSTWMGDRVITTSTRTWALPTYNNHLYKQISSQSGASNDNHYFGYSTPWGYFDFNRFHCHFSPRDWQRLINNNWGFRPKRLNFKLFNIQVKEVTQNDGTTTIANNLTSTVQVFTDSEYQLPYVLGSAHQGCLPPFPADVFMVPQYGYLTLNNGSQAVGRSSFYCLEYFPSQMLRTGNNFTFSYTFEDVPFHSSYAHSQSLDRLMNPLINQYLYYLSKTNAPSGTTTMSRLQFSQAGASDIRDQSRNWLPGPCYRQQRVSKTAADNNNSDYSWTGATKYHLNGRDSLVNPGPAMASHKDDEEKYFPQSGVLIFGKQDSGKTNVDIEKVMITDEEEIRTTNPVATEQYGSVSTNLQSGNTQAATTDVNTQGVLPGMVWQDRDVYLQGPIWAKIPHTDGHFHPSPLMGGFGLKHPPPQILIKNTPVPANPSTTFSAAKFASFITQYSTGQVSVEIEWELQKENSKRWNPEIQYTSNYNKSVNVDFTVDTNGVYSEPRPIGTRYLTRNL

SEQ ID NO: 2355 - protein, 735 aa, synthetic construct
  REGION 1..735: note = source = /note="Description of Artificial Sequence: Synthetic polypeptide"
MAADGYLPDWLEDTLSEGIRQWWKLKPGPPPPKPAERHQDDSRGLVLPGYKYLGPFNGLDKGEPVNEADAAALEHDKAYDRQLDSGDNPYLKYNHADAEFQERLKEDTSFGGNLGRAVFQAKKRVLEPLGLVEEPVKMAPGKKRPVEHSPAEPDSSSGTGKAGQQPARKRLNFGQTGDADSVPDPQPLGQPPAAPSGLGTNTTATGSGAPMADNNEGADGVGNSSGNWHCDSTWMGDRVITTSTRTWALPTYNNHLYKQISSQSGASNDNHYFGYSTPWGYFDFNRFHCHFSPRDWQRLINNNWGFRPKRLNFKLFNIQVKEVTQNDGTTTIANNLTSTVQVFTDSEYQLPYVLGSAHQGCLPPFPADVFMVPQYGYLTLNNGSQAVGRSSFYCLEYFPSQMLRTGNNFTFSYTFEDVPFHSSYAHSQSLDRLMNPLIDQYLYYLSKTNAPSGTTTMSRLQFSQAGASDIRDQSRNWLPGPCYRQQRVSKTAADNNNSDYSWTGATKYHLNGRDSLVNPGPAMASHKDDEEKYFPQSGVLIFGKQDSGKTNVDIEKVMITDEEEIRTTNPVATEQYGSVSTNLQSGNTQAATTDVNTQGVLPGMVWQDRDVYLQGPIWAKIPHTDGHFHPSPLMGGFGLKHPPPQILIKNTPVPANPSTTFSAAKFASFITQYSTGQVSVEIEWELQKENSKRWNPEIQYTSNYNKSVNVDFTVDTNGVYSEPRPIGTRYLTRNL

SEQ ID NO: 2356 - protein, 735 aa, synthetic construct
  REGION 1..735: note = source = /note="Description of Artificial Sequence: Synthetic polypeptide"
MAADGYLPDWLEDTLSEGIRQWWKLKPGPPPPKPAERHQDDSRGLVLPGYKYLGPFNGLDKGEPVNEADAAALEHDKAYDRQLDSGDNPYLKYNHADAEFQERLKEDTSFGGNLGRAVFQAKKRVLEPLGLVEEPVKTAPGKKRPVEHSPAEPDSSSGTGKAGQQPARKRLNFGQTGDADSVPDPQPLGQPPAAPSGLGTNTMATGSGAPMADNNEGADGVGNSSGNWHCDSTWMGDRVITTSTRTWALPTYNNHLYKQISSQSGASNDNHYFGYSTPWGYFDFNRFHCHFSPRDWQRLINNNWGFRPKRLNFKLFNIQVKEVTQNDGTTTIANNLTSTVQVFTDSEYQLPYVLGSAHQGCLPPFPADVFMVPQYGYLTLNNGSQAVGRSSFYCLEYFPSQMLRTGNNFTFSYTFEDVPFHSSYAHSQSLDRLMNPLIDQYLYYLSKTNAPSGTTTMSRLQFSQAGASDIRDQSRNWLPGPCYRQQRVSKTAADNNNSDYSWTGATKYHLNGRDSLVNPGPAMASHKDDEEKYFPQSGVLIFGKQDSGKTNVDIEKVMITDEEEIRTTNPMATEQYGSVSTNLQSGNTQAATTDVNTQGVLPGMVWQDRDVYLQGPIWAKIPHTDGHFHPSPLMGGFGLKHPPPQILIKNTPVPANPSTTFSAAKFASFITQYSTGQVSVEIEWELQKENSKRWNPEIQYTSNYNKSVNVDFTVDTNGVYSEPRPIGTRYLTRNL

SEQ ID NO: 2357 - protein, 735 aa, synthetic construct
  REGION 1..735: note = source = /note="Description of Artificial Sequence: Synthetic polypeptide"
MAADGYLPDWLEDTLSEGIRQWWKLKPGPPPPKPAERHQDDSRGLVLPGYKYLGPFNGLDKGEPVNEADAAALEHDKAYDRQLDSGDNPYLKYNHADAEFQERLKEDTSFGGNLGRAVFQAKKRVLEPLGLVEEPVKTAPGKKRPVEHSPAEPDSSSGTGKAGQQPARKRLNFGQTGDADSVPDPQPLGQPPAAPSGLGTNTMATGSGAPMADNNEGADGVGNSSGNWHCDSTWMGDRVITTSTRTWALPTYNNHLYKQISSQSGASNDNHYFGYSTPWGYFDFNRFHCHFSPRDWQRLINNNWGFRPKRLNFKLFNIQVKEVTQNDGTTTIANNLTSTVQVFTDSEYQLPYVLGSAHQGCLPPFPADVSMVPQYGYLTLNNGSQAVGRSSFYCLEYFPSQMLRTGNNFTFSYTFEDVPFHSSYAHSQSLDRLMNPLIDQYLYYLSKTNAPSGTTTMSRLQFSQAGASDIRDQSRNWLPGPCYRQQRVSKTAADNNNSDYSWTGATKYHLNGRDSLVNPGPAMASHKDDEEKYFPQSGVLIFGKQDSGKTNVDIEKVMITDEEEIRTTNPVATEQYGSVSTNLQSGNTQAATTDVNTQGVLPGMVWQDRDVYLQGPIWAKIPHTDGHFHPSPLMGGFGLKHPPPQILIKNTPVPANPSTTFSAAKLASFITQYSTGQVSVEIEWELQKENSKRWNPEIQYTSNYNKSVNVDFTVDTNGVYSEPRPIGTRYLTRNL

SEQ ID NO: 2358 - protein, 735 aa, synthetic construct
  REGION 1..735: note = source = /note="Description of Artificial Sequence: Synthetic polypeptide"
MAADGYLPDWPEDTLSEGIRQWWKLKPGPPPPKPAERHQDDSRGLVLPGYKYLGPFNGLDKGEPVNEADAAALEHDKAYDRQLDSGDNPYLKYNHADAEFQERLKEDTSFGGNLGRAVFQAKKRVLEPLGLVEEPVKTAPGKKRPVEHSPAEPDSSSGTGKAGQQPARKRLNFGQTGDADSVPDPQPLGQPPAAPSGLGTNTMATGSGAPMADNNEGADGVGNSSGNWHCDSTWMGDRVITTSTRTWALPTYNNHLYKQISSQSGASNDNHYFGYSTPWGYFDFNRFHCHFSPRDWQRLINNNWGFRPKRLNFKLFNIQVKEVTQNDGTTTIANNLTSTVQVFTDSEYQLPYVLGSAHQGCLPPFPADVFMVPQYGYLTLNNGSQAVGRSSFYCLEYFPSQMLRTGNNFTFSYTFEDVPFHSSYAHSQSLDRLMNPLIDQYLYYLSKTNAPSGTTTMSRLQFSQAGASDIRDQSRNWLPGPCYRQQRVSKTAADNNNSDYSWTGATKYHLNGRDSLVNPGPAMASHKDDEEKYFPQSGVLIFGKQDSGKTNVDIEKVMITDEEEIRTTNPVATEQYGSVSTNLQSGNTQAATTDVNTQGVLPGMVWQDRDVYLQGPIWAKIPHTDGHFHPSPLMGGFGLKHPPPQILIKNTPVPANPSTTFSAAKFASFITQYSTGQVSVEIEWELQKENSKRWNPEIQYTSNYNKSVNVDFTVDTNGVYSEPRPIGTRYLTRNL

SEQ ID NO: 2359 - protein, 735 aa, synthetic construct
  REGION 1..735: note = source = /note="Description of Artificial Sequence: Synthetic polypeptide"
MAADGYLPDWLEDTLSEGIRQWWKLKPGPPPPKPAERHQDDSRGLVLPGYKYLGPFNGLDKGEPVNEADAAALEHDKAYDRQLDSGDNPYLKYNHADAEFQERLKEDTSFGGNLGRAVFQAKKRVLEPLGLVEEPVKTAPGKKRPVEHSPAEPDSSSGTGKAGQQPARKRLNFGQTGDADSVPDPQPLGQPPAAPSGLGTNTMATGSGAPMADNNEGADGVGNSSGNWHCDSTWMGDRVITTSTRTWALPTYNNHLYKQISSQSGASNDNHYFGYSTPWGYFDFNRFHCHFSPRDWQRLINNNWGFRPKRLNFKLFNIQVKEVTQNDGTTTIANNLTSTVQVFTDSEYQLPYVLGSAHQGCLPPFPADVFMVPQYGYLTLNNGSQAVGRSSFYCLEYFPSQMLRTGNNFTFSYTFEDVPFHSSYAHSQSLDRLMNPLIDQYLYYLSKTNAPSGTTTMSRLQFSQAGASDIRDQSRNWLPGPCYRQQRVSKTAADNNNSDYSWTGATKYHLNGRDSLVNPGPAMASHKDDEEKFFPQSGVLIFGKQDSGKTNVDIEKVMITDEEEIRTTNPVATEQYGSVSTNLQSGNTQAATTDVNTQGVLPGMVWQDRDVYLQGPIWAKIPHTDGHFHPSPLMGGFGLKHPPPQILIKNTPVPANPSTTFSAAKFASFITQYSTGQVSVEIEWELQKENSKRWNPEIQYTSNYNKSVNVDFTVDTNGVYSEPRPIGTRYLTRNL

SEQ ID NO: 2360 - protein, 735 aa, synthetic construct
  REGION 1..735: note = source = /note="Description of Artificial Sequence: Synthetic polypeptide"
MAADGYLPDWLEDTLSEGIRQWWKLKPGPPPPKPAERHQDDSRGLVLPGYKYLGPFNGLDKGEPVNEADAAALEHDKAYDRQLDSGDNPYLKYNHADAEFQERLKEDTSFGGNLGRAVFQAKKRVLEPLGLVEEPVKTAPGKKRPVEHSPAEPDSSSGIGKAGQQPARKRLNFGQTGDADSVPDPQPLGQPPAAPSGLGTNTMATGSGAPMADNNEGADGVGNSSGNWHCDSTWMGDRVITTSTRTWALPTYNNHLYKQISSQSGASNDNHYFGYSTPWGYFDFNRFHCHFSPRDWQRLINNNWGFRPKRLNFKLFNIQVKEVTQNDGTTTIANNLTSTVQVFTDSEYQLPYVLGSAHQGCLPPFPADVFMVPQYGYLTLNNGSQAVGRSSFYCLEYFPSQMLRTGNNFTFSYTFEDVPFHSSYAHSQSLDRLMNPLIDQYLYYLSKTNAPSGTTTMSRLQFSQAGASDIRDQSRNWLPGPCYRQQRVSKTAADNNNSDYSWTGATKYHLNGRDSLVNPGPAMASHKDDEEKYFPQSGVLIFGKQDSGKTNVDIEKVMITDEEEIRTTNPVATEQYGSVSTNLQSGNTQAATTDVNTQGVLPGMVWQDRDVYLQGPIWAKIPHTDGHFHPSPLMGGFGLKHPPPQILIKNTPVPANPSTTFSAAKFASFITQYSTGQVSVEIEWELQKENSKRWNPEIQYTSNYNKSVNVDFTVDTNGVYSEPRPIGTRYLTRNL

SEQ ID NO: 2361 - protein, 735 aa, synthetic construct
  REGION 1..735: note = source = /note="Description of Artificial Sequence: Synthetic polypeptide"
MAADGYLPDWLEDTLSEGIRQWWKLKPGPPPPKPAERHQDDSRGLVLPGYKYLGPFNGLDKGEPVNEADAAALEHDKAYDRQLDSGDNPYLKYNHADAEFQERLKEDTSFGGNLGRAVFQAKKRVLEPLGLVEEPVKTAPGKKRPVEHSPAEPDSSSGTGKAGQQPARKRLNFGQTGDADSVPDPQPLGQPPAAPSGLGTNTMATGSGAPMADNNEGADGVGNSSGNWHCDSTWMGDRVITTSTRTWALPTYNNHLYKQISSQSGASNDNHYFGYSTPWGYFDFNRFHCHFSPRDWQRLINNNWRFRPKRLNFKLFNIQVKEVTQNDGTTTIANNLTSTVQVFTDSEYQLPYVLGSAHQGCLPPFPADVFMVPQYGYLTLNNGSQAVGRSSFYCLEYFPSQMLRTGNNFTFSYTFEDVPFHSSYAHSQSLDRLMNPLIDQYLYYLSKTNAPSGTTTMSRLQFSQAGASDIRDQSRNWLPGPCYRQQRVSKTAADNNNSDYSWTGATKYHLNGRDSLVNPGPAMASHKDDEEKYFPQSGVLIFGKQDSGKTNVDIEKVMITDEEEIRTTNPVATEQYGSVSTNLQSGNTQAATTDVNTQGVLPGMVWQDRDVYLQGPIWAKIPHTDGHFHPSPLMGGFGLKHPPPQILIKNTPVPANPSTTFSAAKLASFITQYSTGQVSVEIEWELQKENSKRWNPEIQYTSNYNKSVNVDFTVDTNGVYSEPRPIGTRYLTRNL

SEQ ID NO: 2362 - protein, 735 aa, synthetic construct
  REGION 1..735: note = source = /note="Description of Artificial Sequence: Synthetic polypeptide"
MAADGYLPDWLEDTLSEGIRQWWKLKPGPPPPKPAERHQDDSRGLVLPGYKYLGPFNGLDKGEPVNEADAAALEHDKAYDRQLDSGDNPYLKYNHADAEFQERLKEDTSFGGNLGRAVFQAKKRVLEPLGLVEEPVKTAPGKKRPVEHSPAEPDSSSGTGKAGQQPARKRLNFGQTGDADSVPDPQPLGQPPAAPSGLGTNTMATGSGAPMADNNEGADGVGNSSGNWHCDSTWMGDRVITTSTRTWALPTYNNHLYKQISSQSGASNDNHYFGYSTPWGYFDFNRFHCHFSPRDWQRLINNNWGFRPKRLNFKLFNIQVKEVTQNDGTTTIANNLTSTVQVFTDSEYQLPYVLGSAHQGCLPPFPADVFMVPQYGYLTLNNGSQAVGRSSFYCLEYFPSQMLRTGNNFTFSYTFEDVPFHSSYAHSQSLDRLMNPLIDQYLYYLSKTNAPSGTTTMSRLQFSQAGASDIRDQSRNWLPGPCYRQQRVSKTAADNNNSDYSWTGATKYHLNGRDSLVNPGPAMASHKDDEEKYFPQSGVLIFGKQDSGKTNVDIEKVMITDEEEIRTTNPVATEQYGSVSTNLQSGNTQAATTDVNTQGVLPGMVWQDRDVYLQGPIWAKIPHTDGHFHPSPLMGGFGLKHPPPQILIKNTPVPANPSTTFSAAKFASFITQYSTGQVSVEIEWELQKENSKRWNPEIQYTSNYNKSVNVDFTVDTNGVYSEPRPIGTRYLARNL

SEQ ID NO: 2363 - protein, 735 aa, synthetic construct
  REGION 1..735: note = source = /note="Description of Artificial Sequence: Synthetic polypeptide"
MAADGYLPDWLEDTLSEGIRQWWKLKPGPPPPKPAERHQDDSRGLVLPGYKYLGPFNGLDKGEPVNEADAAALEHDKAYDRQLDSGDNPYLKYNHADAEFQERLKEDTSFGGNLGRAVFQAKKRVLEPLGLVEEPVKTAPGKKRPVEHSPAEPDSSSGTGKAGQQPARKRLNFGQTGDADSVPDPQPLGQPPAAPSGLGTNTMATGSGAPMADNNEGADGVGNSSGNWHCDSTWMGDRVITTSTRTWALPTYNNHLYKQISSQSGASNDDHYFGYSTPWGYFDFNRFHCHFSPRDWQRLINNNWGFRPKRLNFKLFNIQVKEVTQNDGTTTIANNLTSTVQVFTDSEYQLPYVLGSAHQGCLPPFPADVFMVPQYGYLTLNNGSQAVGRSSFYCLEYFPSQMLRTGNNFTFSYTFEDVPFHSSYAHSQSLDRLMNPLIDQYLYYLSKTNAPSGTTTMSRLQFSQAGASDIRDQSRNWLPGPCYRQQRVSKTAADNNNSDYSWTGATKYHLNGRDSLVNPGPAMASHKDDEEKYFPQSGVLIFGKQDSGKTNVDIEKVMITDEEEIRTTNPVATEQYGSVSTNLQSGNTQAATTDVNTQGVLPGMVWQDRDVYLQGPIWAKIPHTDGHFHPSPLMGGFGLKHPPPQILIKNTPVPANPSTTFSAAKFASFITQYSTGQVSVEIEWELQKENSKRWNPEIQYTSNYNKSVNVDFTVDTNGVYSEPRPIGTRYLTRNL

SEQ ID NO: 2364 - protein, 735 aa, synthetic construct
  REGION 1..735: note = source = /note="Description of Artificial Sequence: Synthetic polypeptide"
MAADGYLPDWLEDTLSEGIRQWWKLKPGPPPPKPAERHQDDSRGLVLPGYKYLGPFNGLDKGEPVNEADAAALEHDKAYDRQLDSGDNPYLKYNHADAEFQERLKEDTSFGGNLGRAVFQAKKGVLEPLGLVEEPVKTAPGKKRPVEHSPAEPDSSSGTGKAGQQPARKRLNFGQTGDADSVPDPQPLGQPPAAPSGLGTNTMATGSGAPMADNNEGADGVGNSSGNWHCDSTWMGDRVITTSTRTWALPTYNNHLYKQISSQSGASNDNHYFGYSTPWGYFDFNRFHCHFSPRDWQRLINNNWGFRPKRLNFKLFNIQVKEVTQNDGTTTIANNLTSTVQVFTDSEYQLPYVLGSAHQGCLPPFPADVFMVPQYGYLTLNNGSQAVGRSSFYCLEYFPSQMLRTGNNFTFSYTFEDVPFHSSYAHSQSLDRLMNPLIDQYLYYLSKTNAPSGTTTMSRLQFSQAGASDIRDQSRNWLPGPCYRQQRVSKTAADNNNSDYSWTGATKYHLNGRDSLVNPGPAMASHKDDEEKYFPQSGVLIFGKQDSGKTNVDIEKVMITDEEEIRTTNPVATEQYGSVSTNLQSGNTQAATTDVNTQGVLPGMVWQDRDVYLQGPIWAKIPHTDGHFHPSPLMGGFGLKHPPPQILIKNTPVPANPSTTFSAAKLASFITQYSTGQVSVEIEWELQKENSKRWNPEIQYTSNYNKSVNVDFTVDTNGVYSEPRPIGTRYLTRNL

SEQ ID NO: 2365 - protein, 735 aa, synthetic construct
  REGION 1..735: note = source = /note="Description of Artificial Sequence: Synthetic polypeptide"
MAADGYLPDWLEDTLSEGIRQWWKLKPGPPPPKPAERHQDDSRGLVLPGYKYLGPFNGLDKGEPVNEADAAALEHDKAYDRQLDSGDNPYLKYNHADAEFQERLKEDTSFGGNLGRAVFQAKKRVLEPLGLVEEPVKTAPGKKRPVEHSPAEPDSPSGTGKAGQQPARKRLNFGQTGDADSVPDPQPLGQPPAAPSGLGTNTMATGSGAPMADNNEGADGVGNSSGNWHCDSTWMGDRVITTSTRTWALPTYNNHLYKQISSQSGASNDNHYFGYSTPWGYFDFNRFHCHFSPRDWQRLINNNWGFRPKRLNFKLFNIQVKEVTQNDGTTTIANNLTSTVQVFTDSEYQLPYVLGSAHQGCLPPFPADVFMVPQYGYLTLNNGSQAVGRSSFYCLEYFPSQMLRTGNNFTFSYTFEDVPFHSSYAHSQSLDRLMNPLIDQYLYYLSKTNAPSGTTTMSRLQFSQAGASDIRDQSRNWLPGPCYRQQRVSKTAADNNNSDYSWTGATKYHLNGRDSLVNPGPAMASHKDDEEKYFPQSGVLIFGKQDSGKTNVDIEKVMITDEEEIRTTNPVATEQYGSVSTNLQSGNTQAATTDVNTQGVLPGMVWQDRDVYLQGPIWAKIPHTDGHFHPSPLMGGFGLKHPPPQILIKNTPVPANPSTTFSAAKFASFITQYSTGQVSVEIEWELQKENSKRWNPEIQYTSNYNKSVNVDFTVDTNGVYSEPRPIGTRYLTRNL

SEQ ID NO: 2366 - protein, 735 aa, synthetic construct
  REGION 1..735: note = source = /note="Description of Artificial Sequence: Synthetic polypeptide"
MAADGYLPDWLEDTLSEGIRQWWKLKPGPPPPKPAERHQDDSRGLVLPGYKYLGPFNGLDKGEPVNEADAAALEHDKAYDRQLDSGDNPYLKYNHADAEFQERLKEDTSFGGNLGRAVFQAKKRVLEPLGLVEEPVKTAPGKKRPVEHSPAEPDSSSGTGKAGQQPARKRLNFGQTGDADSVPDPQPLGQPPAAPSGLGTNTMATGSGAPMADNNEGADGVGNSSGNWHCDSTWMGDRVITTSTRTWALPTYNNHPYKQISSQSGASNDNHYFGYSTPWGYFDFNRFHCHFSPRDWQRLINNNWGFRPKRLNFKLFNIQVKEVTQNDGTTTIANNLTSTVQVFTDSEYQLPYVLGSAHQGCLPPFPADVFMVPQYGYLTLNNGSQAVGRSSFYCLEYFPSQMLRTGNNFTFSYTFEDVPFHSSYAHSQSLDRLMNPLIDQYLYYLSKTNAPSGTTTMSRLQFSQAGASDIRDQSRNWLPGPCYRQQRVSKTAADNNNSDYSWTGATKYHLNGRDSLVNPGPAMASHKDDEEKYFPQSGVLIFGKQDSGKTNVDIEKVMITDEEEIRTTNPVATEQYGSVSTNLQSGNTQAATTDVNTQGVLPGMVWQDRDVYLQGPIWAKIPHTDGHFHPSPLMGGFGLKHPPPQILIKNTPVPANPSTTFSAAKFASFITQYSTGQVSVEIEWELQKENSKRWNPEIQYTSNYNKSVNVDFTVDTNGVYSEPRPIGTRYLTRNL

SEQ ID NO: 2367 - protein, 735 aa, synthetic construct
  REGION 1..735: note = source = /note="Description of Artificial Sequence: Synthetic polypeptide"
MAADGYLPDWLEDTLSEGIRQWWKLKPGPPPPKPAERHQDDSRGLVLPGYKYLGPFNGLDKGEPVSEADVAALEHDKAYDRQLDSGDNPYLKYNHADAEFQERLKEDTSFGGNLGRAVFQAKKRVLEPLGLVEEPVKTAPGKKRPVEHSPAEPDSSSGTGKAGQQPARKRLNFGQTGDADSVPDPQPLGQPPAAPSGLGTNTMATGSGAPMADNNEGADGVGNSSGNWHCDSTWMGDRVITTSTRTWALPTYNNHLYKQISSQSGASNDNHYFGYSTPWGYFDFNRFHCHFSPRDWQRLINNNWGFRPKRLNFKLFNIQVKEVTQNDGTTTIANNLTSTVQVFTDSEYQLPYVLGSAHQGCLPPFPADVFMVPQYGYLTLNNGSQAVGRSSFYCLEYFPSQMLRTGNNFTFSYTFEDVPFHSSYAHSQSLDRLMNPLIDQYLYYLSKTNAPSGTTTMSRLQFSQAGASDIRDQSRNWLPGPCYRQQRVSKTAADNNNSDYSWTGATKYHLNGRDSLVNPGPAMASHKDDEEKYFPQSGVLIFGKQDSGKTNVDIEKVMITDEEEIRTTNPVATEQYGSVSTNLQSGNTQAATTDVNTQGVLPGMVWQDRDVYLQGPIWAKIPHTDGHFHPSPLMGGFGLKHPPPQILIKNTPVPANPSTTFSAAKFASFITQYSTGQVSVEIEWELQKENSKRWNPEIQYTSNYNKSVNVDFTVDTNGVYSEPRPIGTRYLTRNL

SEQ ID NO: 2368 - protein, 735 aa, synthetic construct
  REGION 1..735: note = source = /note="Description of Artificial Sequence: Synthetic polypeptide"
MAADGYLPDWLEDTLSEGIRQWWKLKPGPPPPKPAERHQDDSRGLVLPGYKYLGPFNGLDKGEPVNEADAAALEHDKAYDRQLDSGDNPYLKYNHADAEFQERLKEDTSFGGNLGRAVFQAKKRVLEPLGLVEEPVKTAPGKKRPVEHSPAEPDSSSGTGKAGQQPARKRLNFGQTGDADSVPDPQPLGQPPAAPSGLGTNTMATGSGAPMADNNEGADGVGNSSGNWHCDSTWMGDRVITTSTRTWALPTYNNHLYKQISSQSGASNDNHYFGYSTPWGYFDFNRFHCHFSPRDWQRLINNNWGFRPKRLNFKLFNIQVKEVTQNDGTTTIANNLTSTVQVFTDSEYQLPYVLGSAHQGCLPPFPADVFMVPQYGYLTLNNGSQAVGRSSFYCLEYFPSQMLRTGNNFTFSYTFEDVPFHSSYAHSQSLDRLMNPLIDQYLYYLSKTNAPSGTTTMSRLQFSQAGASDIRDQSRNWLPGPCYRQQRVSKTAADNNNSDYSWTGATKYHLNGRDSLVNPGPAMASHKDDEEKYFPQSGVLIFGKQDSGKINVDIEKVMITDEEEIRTTNPVATEQYGSVSTNLQSGNTQAATTDVNTQGVLPGMVWQDRDVYLQGPIWAKIPHTDGHFHPSPLMGGFGLKHPPPQILIKNTPVPANPSTTFSAAKFASFITQYSTGQVSVEIEWELQKENSKRWNPEIQYTSNYNKSVNVDFTVDTNGVYSEPRPIGTRYLTRNL

SEQ ID NO: 2369 - protein, 735 aa, synthetic construct
  REGION 1..735: note = source = /note="Description of Artificial Sequence: Synthetic polypeptide"
MAADGYLPDWLEDTLSEGIRQWWKLKPGPPPLKPAERHQDDSRGLVLPGYKYLGPFNGLDKGEPVNEADAAALEHDKAYDRQLDSGDNPYLKYNHADAEFQERLKEDTSFGGNLGRAVFQAKKRVLEPLGLVEEPVKTAPGKKRPVEHSPAEPDSSSGTGKAGQQPARKRLNFGQTGDADSVPDPQPLGQPPAAPSGLGTNTMATGSGAPMADNNEGADGVGNSSGNWHCDSTWMGDRVITTSTRTWALPTYNNHLYKQISSQSGASNDNHYFGYSTPWGYFDFNRFHCHFSPRDWQRLINNNWGFRPKRLNFKLFNIQVKEVTQNDGTTTIANNLTSTVQVFTDSEYQLPYVLGSAHQGCLPPFPADVFMVPQYGYLTLNNGSQAVGRSSFYCLEYFPSQMLRTGNNFTFSYTFEDVPFHSSYAHSQSLDRLMNPLIDQYLYYLSKTNAPSGTTTMSRLQFSQAGASDIRDQSRSWLPGPCYRQQRVSKTAADNNNSDYSWTGATKYHLNGRDSLVNPGPAMASHKDDEEKYFPQSGVLIFGKQDSGKTNVDIEKVMITDEEEIRTTNPVATEQYGSVSTNLQSGNTQAATTDVNTQGVLPGMVWQDRDVYLQGPIWAKIPHTDGHFHPSPLMGGFGLKHPPPQILIKNTPVPANPSTTFSAAKFASFITQYSTGQVSVEIEWELQKENSKRWNPEIQYTSNYNKSVNVDFTVDTNGVYSEPRPIGTRYLTRNL

SEQ ID NO: 2370 - protein, 735 aa, synthetic construct
  REGION 1..735: note = source = /note="Description of Artificial Sequence: Synthetic polypeptide"
MAADGYLPDWLEDTLSEGIRQWWKLKPGPPPPKPAERHQDDSRGLVLPGYKYLGPFNGLDKGEPVNEADAAALEHDKAYDRQLDSGDNPYLKYNHADAEFQERLKEDTSFGGNLGRAVFQAKKRVLEPLGLVEEPVKTAPGKKRPVEHSPAEPDSSSGTGKAGQQPARKRLNFGQTGDADSVPDPQPLGQPPAAPSGLGTNTMATGSGAPMADNNEGADGVGNSSGNWHCDSTWMGDRVITTSTRTWALPTYNNHLYKQISSQSGASNDNHYFGYSTPWGYFDFNRFHCHFSPRDWQRLINNNWGFRPKRLNFKLFNIQVKEVTQNDGTTTIANNLTSTVQVFTDSEYQLPYVLGSAHQGCLPPFPADVFMVPQYGYLTLNNGSQAVGRSSFYCLEYFPSQMLRTGNNFTFSYTFEDVPFHSSYAHSQSLDRLMNPLIDQYLYYLSKTNAPSGTTTMSRLQFSQAGASDIRDQSRNWLPGPCYRQQRVSKTAADNNNSDYSWTGATKYHLNGRDSLVNPGPAMASHKDDEEKYFPQSGVLIFGKQDSGKTNVDIEKVMITDEEEIGTTNPVATEQYGSVSTNLQSGNTQAATTDVNTQGVLPGMVWQDRDVYLQGPIWAKIPHTDGHFHPSPLMGGFGLKHPPPQILIKNTPVPANPSTTFSAAKFASFITQYSTGQVSVEIEWELQKENSKRWNPEIQYTSNYNKSVNVDFTVDTNGVYSEPRPIGTRYLTRNL

SEQ ID NO: 2371 - protein, 735 aa, synthetic construct
  REGION 1..735: note = source = /note="Description of Artificial Sequence: Synthetic polypeptide"
MAADGYLPDWLEDTLSEGIRQWWKLKPGPPPPKPAERHQDDSRGLVLPGYKYLGPFNGLDKGEPVNEADAAALEHDKAYDRQLDSGDNPYLKYNHADAEFQERLKEDTSFGGNLGRAVFQAKKRVLEPLGLVEEPVKTAPGKKRPVEHSPAEPDSSSGTGKAGQQPARKRLNFGQTGDADSVPDPQPLGQPPAAPSGLGTNTMATGSGAPMADNNEGADGVGNSSGNWHCDSTWMGDRVITTSTRTWALPTYNNHLYKQISSQSGASNDNHYFGYSTPWGYFDFNRFHCHFSPRDWQRLINNNWGFRPKRLNFKLFNIQVKEVTQNDGTTTIANNLTSTVQVFTDSEYRLPYVLGSAHQGCLPPFPADVFMVPQYGYLTLNNGSQAVGRSSFYCLEYFPSQMLRTGNNFTFSYTFEDVPFHSSYAHSQSLDRLMNPLIDQYLYYLSKTNAPSGTTTMSRLQFSQAGASDIRDQSRNWLPGPCYRQQRVSKTAADNNNSDYSWTGATKYHLNGRDSLVNPGPAMASHKDDEEKYFPQSGVLIFGKQDSGKTNVDIEKVMITDEEEIRTTNPVATEQYGSVSTNLQSGNTQAATTDVNTQGVLPGMVWQDRDVYLQGPIWAKIPHTDGHFHPSPLMGGFGLKHPPPQILIKNTPVPANPSTTFSAAKFASFITQYSTGQVSVEIEWELQKENSKRWNPEIQYTSNYNKSVNVDFTVDTNGVYSEPRPIGTRYLTRNL

SEQ ID NO: 2372 - protein, 735 aa, synthetic construct
  REGION 1..735: note = source = /note="Description of Artificial Sequence: Synthetic polypeptide"
MAADGYLPDWLEDTLSEGIRQWWKLKPGPPPPKPAERHQDDSRGLVLPGYKYLGPFNGLDKGEPVNEADAAALEHDKAYDRQLDSGDNPYLKYNHADAEFQERLKEDTSFGGNLGRAVFQAKKRVLEPLGLVEEPVKTAPGKKRPVEHSPAEPDSSSGTGKAGQQPARKRLNFGQTGDADSVPDPQPLGQPPAAPSGLGTNTMATGSGAPMADNNEGADGVGNSSGNWHCDSTWMGDRVITTSTRTWALPTYNNHLYKQISSQSGASNDNHYFGYSTPWGYFDFNRFHCHFSPRDWQRLINNNWGFRPKRLNFKLFNIQVKEVTQNDGTTTIANNLTSTVQVFTDSEYQLPYVLGSAHQGCLPPFPADVFMVPQYGYLTLNNGSQAVGRSSFYCLEYFPSQMLRTGNNFTFSYTFEDVPFHSSYAHSQSLDRLMNPLIDQYLYYLSKTNAPSGTTTMSRLQFSQAGASDIRDQSRNWLPGPCYRQQRVSKTAADNNNSDYSWTGATKYHLNGRDSLVNPGPAMASHKDDEEKYFPQSGVLIFGKQDSGKTNVDIEKVMITDEEEIRTTNPVATEQYGSVSTNLQSGNTQAATTDVNTQGVLPGMVWQDRDVYLQGPIWAKIPHTDGHFHPSPLMGGFGLKHPPPQILIKNTPVPANPSTTFSAAKFASFITQYSTGQVSVEIEWELQKENSKRWNPKIQYTSNYNKSVNVDFTVDTNGVYSEPRPIGTRYLTRNL

SEQ ID NO: 2373 - protein, 735 aa, synthetic construct
  REGION 1..735: note = source = /note="Description of Artificial Sequence: Synthetic polypeptide"
MAADGYLPDWLEDTLSEGIRQWWKLKPGPPPPKPAERHQDDSRGLVLPGYKYLGPFNGLDKGEPVNEADAAALEHDKAYDRQLDSGDNPYLKYNHADAESQERLKEDTSFGGNLGRAVFQAKKRVLEPLGLVEEPVKTAPGKKRPVEHSPAEPDSSSGTGKAGQQPARKRLNFGQTGDADSVPDPQPLGQPPAAPSGLGTNTMATGSGAPMADNNEGADGVGNSSGNWHCDSTWMGDRVITTSTRTWALPTYNNHLYKQISSQSGASNDNHYFGYSTPWGYFDFNRFHCHFSPRDWQRLINNNWGFRPKRLNFKLFNIQVKEVTQNDGTTTIANNLTSTVQVFTDSEYQLPYVLGSAHQGCLPPFPADVFMVPQYGYLTLNNGSQAVGRSSFYCLEYFPSQMLRTGNNFTFSYTFEDVPFHSSYAHSQSLDRLMNPLIDQYLYYLSKTNAPSGTTTMSRLQFSQAGASDIRDQSRNWLPGPCYRQQRVSKTAADNNNSDYSWTGATKYHLNGRDSLVNPGPAMASHKDDEEKYFPQSGVLIFGKQDSGKTNVDIEKVMITDEEEIRTTNPVATEQYGSVSTNLQSGNTQAATTDVNTQGVLPGMVWQDRDVYLQGPIWAKIPHTDGHFHPSPLMGGFGLKHPPPQILIKNTPVPANPSTTFSAAKFASFITQYSTGQVSVEIEWELQKENSKRWNPEIQYTSNYNKSVNVDFTVDTNGVYSEPRPIGTRYLTRNL

SEQ ID NO: 2374 - protein, 735 aa, synthetic construct
  REGION 1..735: note = source = /note="Description of Artificial Sequence: Synthetic polypeptide"
MAADGYLPDWLEDTLSEGIRQWWKLKPGPPPPKPAERHQDDSRGLVLPGYKYLGPFNGLDKGEPVNEADAAALEHDKAYDRQLDSGDNPYLKYNHADAEFQERLKEDTSFGGNLGRAVFQAKKRVLEPLGLVEEPVKTAPGKKRPVEHSPAEPDSSSGTGKAGQQPARKRLNFGQTGDADSVPDPQPLGQPPAAPSGLGTNTMATGSGAPTADNNEGADGVGNSSGNWHCDSTWMGDRVITTSTRTWALPTYNNHLYKQISSQSGASNDNHYFGYSTPWGYFDFNRFHCHFSPRDWQRLINNNWGFRPKRLNFKLFNIQVKEVTQNDGTTTIANNLTSTVQVFTDSEYQLPYVLGSAHQGCLPPFPADVFMVPQYGYLTLNNGSQAVGRSSFYCLEYFPSQMLRTGNNFTFSYTFEDVPFHSSYAHSQSLDRLMNPLIDQYLYYLSKTNAPSGTTTMSRLQFSQAGASDIRDQSRNWLPGPCYRQQRVSKTAADNNNSDYSWTGATKYHLNGRDSLVNPGPAMASHKDDEEKYFPQSGVLIFGKQDSGKTNVDIEKVMITDEEEIRTTNPVATEQYGSVSTNLQSGNTQAATTDVNTQGVLPGMVWQDRDVYLQGPIWAKIPHTDGHFHPSPLMGGFGLKHPPPQILIKNTPVPANPSTTFSAAKFASFITQYSTGQVSVEIEWELQKENSKRWNPEIQYTSNYNKSVNVDFTVDTNGVYSEPRPIGTRYLTRNL

SEQ ID NO: 2375 - protein, 735 aa, synthetic construct
  REGION 1..735: note = source = /note="Description of Artificial Sequence: Synthetic polypeptide"
MAADGYLPDWLEDTLSEGIRQWWKLKPGPPPPKPAERHQDDSRGLVLPGYKYLGPFNGLDKGEPVNEADAAALEHDKAYDRQLDSGDNPYLKYNHADAEFQERLKEDTSFGGNLGRAVFQAKKRVLEPLGLVEEPVKTAPGKKRPVEHSPAEPDASSGTGKAGQQPARKRLNFGQTGDADSVPDPQPLGQPPAAPSGLGTNTMATGSGAPMADNNEGADGVGNSSGNWHCDSTWMGDRVITTSTRTWALPTYNNHLYKQISSQSGASNDNHYFGYSTPWGYFDFNRFHCHFSPRDWQRLINNNWGFRPKRLNFKLFNIQVKEVTQNDGTTTIANNLTSTVQVFTDSEYQLPYVLGSAHQGCLPPFPADVFMVPQYGYLTLNNGSQAVGRSSFYCPEYFPSQMLRTGNNFTFSYTFEDVPFHSSYAHSQSLDRLMNPLIDQYLYYLSKTNAPSGTTTMSRLQFSQAGASDIRDQSRNWLPGPCYRQQRVSKTAADNNNSDYSWTGATKYHLNGRDSLVNPGPAMASHKDDEEKYFPQSGVLIFGKQDSGKTNVDIEKVMITDEEEIRTTNPVATEQYGSVSTNLQSGNTQAATTDVNTQGVLPGMVWQDRDVYLQGPIWAKIPHTDGHFHPSPLMGGFGLKHPPPQILIKNTPVPANPSTTFSAAKFASFITQYSTGQVSVEIEWELQKENSKRWNPEIQYTSNYNKSVNVDFTVDTNGVYSEPRPIGTRYLTRNL

SEQ ID NO: 2376 - protein, 735 aa, synthetic construct
  REGION 1..735: note = source = /note="Description of Artificial Sequence: Synthetic polypeptide"
MAADGYLPDWLEDTLSEGIRQWWKLKPGPPPPKPAERHQDDSRGLVLPGYKYLGPFNGLDKGEPVNEADAAALEHDKAYDRQLDSGDNPYLKYNHADAEFQERLKEDTSFGGNLGRAVFQAKKRVLEPLGLVEEPVKTAPGKKRPVEHSPAEPDSSSGTGKAGQQPARKRLNFGQTGDADSVPDPQPLGQPPAAPSGLGTNTMATGSGAPMADNNEGADGVGNSSGNWHCDSTWMGDRVITTSTRTWALPTYNNHLYKQISSQSGASNDNHYFGYSTPWGYFDFNRFHCHFSPRDWQRLINNNWGLRPKRLNFKLFNIQVKEVTQNDGTTTIANNLTSTVQVFTDSEYQLPYVLGSAHQGCLPPFPADVFMVPQYGYLTLNNGSQAVGRSSFYCLEYFPSQMLRTGNNFTFSYTFEDVPFHSSYAHSQSLDRLMNPLIDQYLYYLSKTNAPSGTTTMSRLQFSQAGASDIRDQSRNWLPGPCYRQQRVSKTAADNNNSDYSWTGATKYHLNGRDSLVNPGPAMASHKDDEEKYFPQSGVLIFGKQDSGKTNVDIEKVMITDEEEIRTTNPVATEQYGSVSTNLQSGNTQAATTDVNTQGVLPGMVWQDRDVYLQGPIWAKIPHTDGHFHPSPLMGGFGLKHPPPQILIKNTPVPANPSTTFSAAKFASFITQYSTGQVSVEIEWELQKENSKRWNPEIQYTSNYNKSVNVDFTVDTNGVYSEPRPIGTRYLTRNL

SEQ ID NO: 2377 - protein, 735 aa, synthetic construct
  REGION 1..735: note = source = /note="Description of Artificial Sequence: Synthetic polypeptide"
MAADGYLPDWLEDTLSEGIRQWWKLKPGPPPPKPAERHQDDSRGLVLPGYKYLGPFNGLDKGEPVNEADAAALEHDKAYDRQLDSGDNPYLKYNHADAEFQERLKEDTSFGGNLGRAVFQAKKRVLEPLGLVEEPVKTAPGKKRPVEHFPAEPDSSSGTGKAGQQPARKRLNFGQTGDADSVPDPQPLGQPPAAPSGLGTNTMATGSGAPMADNNEGADGVGNSSGNWHCDSTWMGDRVITTSTRTWALPTYNNHLYKQISSQSGASNDNHYFGYSTPWGYFDFNRFHCHFSPRDWQRLINNNWGFRPKRLNFKLFNIQVKEVTQNDGTTTIANNLTSTVQVFTDSEYQLPYVLGSAHQGCLPPFPADVFMVPQYGYLTLNNGSQAVGRSSFYCLEYFPSQMLRTGNNFTFSYTFEDVPFHSSYAHSQSLDRLMNPLIDQYLYYLSKTNAPSGTTTMSRLQFSQAGASDIRDQSRNWLPGPCYRQQRVSKTAADNNNSDYSWTGATKYHLNGRDSLVNPGPAMASHKDDEEKYFPQSGVLIFGKQDSGKTNVDIEKVMITDEEEIRTTNPVATEQYGSVSTNLQSGNTQAATTDVNTQGVLPGMVWQDRDVYLQGPIWAKIPHTDGHFHPSPLMGGFGLKHPPPQILIKNTPVPANPSTTFSAAKFASFITQYSTGQVSVEIEWELQKENSKRWNPEIQYTSNYNKSVNVDFTVDTNGVYSEPRPIGTRYLTRNL

SEQ ID NO: 2378 - protein, 735 aa, synthetic construct
  REGION 1..735: note = source = /note="Description of Artificial Sequence: Synthetic polypeptide"
MAADGYLPDWLKDTLSEGIRQWWKLKPGPPPPKPAERHQDDSRGLVLPGYKYLGPFNGLDKGEPVNEADAAALEHDKAYDRQLDSGDNPYLKYNHADAEFQERLKEDTSFGGNLGRAVFQAKKRVLEPLGLVEEPVKTAPGKKRPVEHSPAEPDSSSGTGKAGQQPARKRLNFGQTGDADSVPDPQPLGQPPAAPSGLGTNTMATGSGAPMADNNEGADGVGNSSGNWHCDSTWMGDRVITTSTRTWALPTYNNHLYKQISSQSGASNDNHYFGYSTPWGYFDFNRFHCHFSPRDWQRLINNNWGFRPKRLNFKLFNIQVKEVTQNDGTTTIANNLTSTVQVFTDSEYQLPYVLGSAHQGCLPPFPADVFMVPQYGYLTLNNGSQAVGRSSFYCLEYFPSQMLRTGNNFTFSYTFEDVPFHSSYAHSQSLDRLMNPLIDQYLYYLSKTNAPSGTTTMSRLQFSQAGASDIRDQSRNWLPGPCYRQQRVSKTAADNNNSDYSWTGATKYHLNGRDSLVNPGPAMASHKDDEEKYFPQSGVLIFGKQDSGKTNVDIEKVMITDEEEIRTTNPVATEQYGSVSTNLQSGNTQAATTDVNTQGVLPGMVWQDRDVYLQGPIWAKIPHTDGHFHPSPLMGGFGLKHPPPQILIKNTPVPANPSTTFSAAKFASFITQYSTGQVSVEIEWELQKENSKRWNPEIQYTSNYNKSVNVDFTVDTNGVYSEPRPIGTRYLTRNL

SEQ ID NO: 2379 - protein, 735 aa, synthetic construct
  REGION 1..735: note = source = /note="Description of Artificial Sequence: Synthetic polypeptide"
MAADGYLPDWLEDTLSEGIRQWWKLKPGPPPPKPAERHQDDSRGLVLPGYKYLGPFNGLDKGEPVNEADVAALEHDKAYDRQLDSGDNPYLKYNHADAEFQERLKEDTSFGGNLGRAVFQAKRRVLEPLGLVEEPVKTAPGKKRPVEHSPAEPDSSSGTGKAGQQPARKRLNFGQTGDADSVPDPQPLGQPPAAPSGLGTNTMATGSGAPMADNNEGADGVGNSSGNWHCDSTWMGDRVITTSTRTWALPTYNNHLYKQISSQSGASNDNHYFGYSTPWGYFDFNRFHCHFSPRDWQRLINNNWGFRPKRLNFKLFNIQVKEVTQNDGTTTIANNLTSTVQVFTDSEYQLPYVLGSAHQGCLPPFPADVFMVPQYGYLTLNNGSQAVGRSSFYCLEYFPSQMLRTGNNFTFSYTFEDVPFHSSYAHSQSLDRLMNPLIDQYLYYLSKTNAPSGTTTMSRLQFSQAGASDIRDQSRNWLPGPCYRQQRVSKTAADNNNSDYSWTGATKYHLNGRDSLVNPGPAMASHKDDEEKYFPQSGVLIFGKQDSGKTNVDIEKVMITDEEEIRTTNPVATEQYGSVSTNLQSGNTQAATTDVNTQGVLPGMVWQDRDVYLQGPIWAKIPHTDGHFHPSPLMGGFGLKHPPPQILIKNTPVPANPSTTFSAAKFASFITQYSTGQVSVEIEWELQKENSKRWNPEIQYTSNYNKSVNVDFTVDTNGVYSEPRPIGTRYLTRNL

SEQ ID NO: 2380 - protein, 735 aa, synthetic construct
  REGION 1..735: note = source = /note="Description of Artificial Sequence: Synthetic polypeptide"
MAADGYLPDWLEDTLSEGIRQWWKLKPGPPPPKPAERHQDDSRGLVLPGYKYLGPFNGLDKGEPVNEADAAALEHDKAYDRQLDSGDNPYLKYNHADAEFQERLKEDTSFGGNLGRAVFQAKKRVLEPLGLVEEPVKTAPGKKRPVEHSPAEPDSSSGTGKAGQQPARKRLNFGQTGDADSVPDPQPLGQPPAAPSGLGTNTMATGSGAPMADNNEGADGVGNSSGNWHCDSTWMGDRVITTSTRTWALPTYNNHLYKQISSQSGASNDNHYFGYSTPWGYFDFNRFHCHFSPRDWQRLINNNWGFRPKRLNFKLFNIQVKEVTQNDGTTTIANNLTSTVQVFTDSEYQLPYVLGSAHQGCLPPFPADVFMVPQYGYLTLNNGSQAVGRSSFYCLEYFPSQMLRTGNNFTFSYTFEDVPFHSSYAHSQSLDRLMNPLIDQYLYYLSKTNALSGTTTMSRLQFSQAGASDIRDQSRNWLPGPCYRQQRVSKTAADNNNSDYSWTGATKYHLNGRDSLVNPGPAMASHKDDEEKYFPQSEVLIFGKQDSGKTNVDIEKVMITDEEEIRTTNPVATEQYGSVSTNLQSGNTQAATTDVNTQGVLPGMVWQDRDVYLQGPIWAKIPHTDGHFHPSPLMGGFGLKHPPPQILIKNTPVPANPSTTFSAAKLASFITQYSTGQVSVEIEWELQKENSKRWNPEIQYTSNYNKSVNVDFTVDTNGVYSEPRPIGTRYLTRNL

SEQ ID NO: 2381 - protein, 735 aa, synthetic construct
  REGION 1..735: note = source = /note="Description of Artificial Sequence: Synthetic polypeptide"
MAADGYLPDWLEDTLSEGIRQWWKLKPGPPPPKPAERHQDDSRGLVLPGYKYLGPFNGLDKGEPVNEADAAALEHDKAYDRQLDSGDNPYLKYNHADAEFQERLKEDTSFGGNLGRAVFQAKKRVLEPLGLVEEPVKTAPGKKRPVEHSPAEPDSSSGTGKAGQQPARKRLNFGQTGDADSVPDPQPLGQPPAAPSGLGTNTMATGSGAPMADNNEGADGVGNSSGNWHCDSTWMGDRVITTSTRTWALPTYNNHLYKQISSQSGASNDNHYFGYSTPWGYFDFNRFHCHFSPRDWQRLINNNWGFRPKRLNFKLFNIQVKEVTQNDGTTTIANNLTSTVQVFTDSEYQLPYALGSAHQGCLPPFPADVFMVPQYGYLTLNNGSQAVGRSSFYCLEYFPSQMLRTGNNFTFSYTFEDVPFHSSYAHSQSLDRLMNPLIDQYLYYLSKTNAPSGTTTMSRLQFSQAGASDIRDQSRNWLPGPCYRQQRVSKTAADNNNSDYSWTGATKYHLNGRDSLVNPGPAMASHKDDEEKYFPQSGVLIFGKQDSGKTNVDIEKVMITDEEEIRTTNPVATEQYGSVSTNLQSGNTQAATTDVNTQGVLPGMVWQDRDVYLQGPIWAKIPHTDGHFHPSPLMGGFGLKHPPPQILIKNTPVPANPSTTFSAAKFASFITQYSTGQVSVEIEWELQKENSKRWNPEIQYTSNYNKSVNVDFTVDTNGVYSEPRPIGTRYLTRNL

SEQ ID NO: 2382 - protein, 735 aa, synthetic construct
  REGION 1..735: note = source = /note="Description of Artificial Sequence: Synthetic polypeptide"
MAADGYLPDWLEDTLSEGIRQWWKLKPGPPPPKPAERHQDDSRGLVLPGYKYLGPFNGLDKGEPVNEADAAALEHDKAYDRQLDSGDNPYLKYNHADAEFQERLKEDTSFGGNLGRAVFQAKKRVLEPLGLVEEPVKTAPGKKRPVEHSPAEPDSSSGTGKAGQQPARKRLNFGQTGDADSVPDPQPLGQPPAAPSGLGTNTMATGSGAPMADNNEGADGVGNSSGNWHCDSTWMGDRVITTSTRTWALPTYNNHLYKQISSQSGASNDNHYFGYSTPWGYFDFSRFHCHFSPRDWQRLINNNWGFRPKRLNFKLFNIQVKEVTQNDGTTTIANNLTSTVQVFTDSEYQLPYVLGSAHQGCLPPFPADVFMVPQYGYLTLNNGSQAVGRSSFYCLEYFPSQMLRTGNNFTFSYTFEDVPFHSSYAHSQSLDRLMNPLIDQYLYYLSKTNAPSGTTTMSRLQFSQAGASDIRDQSRNWLPGPCYRQQRVSKTAADNNNSDYSWTGATKYHLNGRDSLVNPGPAMASHKDDEEKYFPQSGVLIFGKQDSGKTNVDIEKVMITDEEEIRTTNPVATEQYGSVSTNLQSGNTQAATTDVNTQGVLPGMVWQDRDVYLQGPIWAKIPHTDGHFHPSPLMGGFGLKHPPPQILIKNTPVPANPSTTFSAAKFASFITQYSTGQVSVEIEWELQKENSKRWNPEIQYTSNYNKSVNVDFTVDTNGVYSEPRPIGTRYLTRNL

SEQ ID NO: 2383 - protein, 735 aa, synthetic construct
  REGION 1..735: note = source = /note="Description of Artificial Sequence: Synthetic polypeptide"
MAADGYLPDWLEDTLSEGIRQWWKLKPGPPPPKPAERHQDDSRGLVLPGYKYLGPFNGLDKGEPVNEADAAALEHDKAYDRQLDSGDNPYLKYNHADAEFQERLKEDTSFGGNLGRAVFQAKKRVLEPLGLVEEPVKTAPGKKRPVEHSPAEPDSSSGTGKAGQQPARKRLNFGQTGDADSVPDPQPLGQPPAAPSGLGTNTMATGSGAPMADNNEGADGVGNSSGNWHCDSTWMGDRVITTSTRTWALPTYNNHLYKQISSQSGASNDNHYVGYSTPWGYFDFNRFHCHFSPRDWQRLINNNWGFRPKRLNFKLFNIQVKEVTQNDGTTTIANNLTSTVQVFTDSEYQLPYVLGSAHQGCLPPFPADVFMVPQYGYLTLNNGSQAVGRSSFYCLEYFPSQMLRTGNNFTFSYTFEDVPFHSSYAHSQSLDRLMNPLIDQYLYYLSKTNAPSGTTTMSRLQFSQAGASDIRDQSRNWLPGPCYRQQRVSKTAADNNNSDYSWTGATKYHLNGRDSLVNPGPAMASHKDDEEKYFPQSGVLIFGKQDSGKTNVDIEKVMITDEEEIRTTNPVATEQYGSVSTNLQSGNTQAATTDVNTQGVLPGMVWQDRDVYLQGPIWAKIPHTDGHFHPSPLMGGFGLKHPPPQILIKNTPVPANPSTTFSAAKFASFITQYSTGQVSVEIEWELQKENSKRWNPEIQYTSNYNKSVNVDFTVDTNGVYSEPRPIGTRYLTRNL

SEQ ID NO: 2384 - protein, 735 aa, synthetic construct
  REGION 1..735: note = source = /note="Description of Artificial Sequence: Synthetic polypeptide"
MAADGYLPDWLEDTLSEGIRQWWKLKPGPPPPKPAERHQDDSRGLVLPGYKYLGPFNGLDKGEPVNEADAAALEHDKAYDRQLDSGDNPYLKYNHADAEFQERLKEDTSFGGNLGRAVFQAKKRVLEPLGLVEEPVKTAPGKKRPVEHSPAEPDSSSGTGKAGQQPARKRLNFGQTGDADSVPDPQPLGQPPAAPSGLGTNTMATGSGAPMADNNEGADGVGNSSGNWHCDSTWMGDRVITTSTRTWALPTYNNHLYKQISSQSGASNDNHYFGYSTPWGHFDFNRFHCHFSPRDWQRLINNNWGFRPKRLNFKLFNIQVKEVTQNDGTTTIANNLTSTVQVFTDSEYQLPYVLGSAHQGCLPPFPADVFMVPQYGYLTLNNGSQAVGRSSFYCLEYFPSQMLRTGNNFTFSYTFEDVPFHSSYAHSQSLDRLMNPLIDQYLYYLSKTNAPSGTTTMSRLQFSQAGASDIRDQSRNWLPGPCYRQQRVSKTAADNNNSDYSWTGATKYHLNGRDSLVNPGPAMASHKDDEEKYFPQSGVLIFGKQDSGKTNVDIEKVMITDEEEIRTTNPVATEQYGSVSTNLQSGNTQAATTDVNTQGVLPGMVWQDRDVYLQGPIWAKIPHTDGHFHPSPLMGGFGLKHPPPQILIKNTPVPANPSTTFSAAKFASFITQYSTGQVSVEIEWELQKENSKRWNPEIQYTSNYNKSVNVDFTVDTNGVYSEPRPIGTRYLTRNL

SEQ ID NO: 2385 - protein, 735 aa, synthetic construct
  REGION 1..735: note = source = /note="Description of Artificial Sequence: Synthetic polypeptide"
MAADGYLPDWLEDTLSEGIRQWWKLKPGPPPPKPAERHQDDSRGLVLPGYKYLGPFNGLDKGEPVNEADVAALEHDKAYDRQLDSGDNPYLKYNHADAEFQERLKEDTSFGGNLGRAVFQAKKRVLEPLGLVEEPVKTAPGKKRPVEHSPAEPDSSSGTGKAGQQPARKRLNFGQTGDADSVPDPQPLGQPPAAPSGLGTNTMATGSGAPMADNNEGADGVGNSSGNWHCDSTWMGDRVITTSTRTWALPTYNNHLYKQISSQSGASNDNHYFGYSTPWGYFDFNRFHCHFSPRDWQRLINNDWGFRPKRLNFKLFNIQVKEVTQNDGTTTIANNLTSTVQVFTDSEYQLPYVLGSAHQGCLPPFPADVFMVPQYGYLTLNNGSQAVGRSSFYCLEYFPSQMLRTGNNFTFSYTFEDVPFHSSYAHSQSLDRLMNPLIDQYLYYLSKTNAPSGTTTMSRLQFSQAGASDIRDQSRNWLPGPCYRQQRVSKTAADNNNSDYSWTGATKYHLNGRDSLVNPGPAMASHKDDEEKYFPQSGVLIFGKQDSGKTNVDIEKVMITDEEEIRTTNPVATEQYGSVSTNLQSGNTQAATTDVNTQGVLPGMVWQDRDVYLQGPIWAKIPHTDGHFHPSPLMGGFGLKHPPPQILIKNTPVPANPSTTFSAAKFASFITQYSTGQVSVEIEWELQKENSKRWNPEIQYTSNYNKSVNVDFTVDTNGVYSEPRPIGTRYLTRNL

SEQ ID NO: 2386 - protein, 735 aa, synthetic construct
  REGION 1..735: note = source = /note="Description of Artificial Sequence: Synthetic polypeptide"
MAADGYLPDWLEDTLSEGIRQWWKLKPGPPPPKPAERHQDDSRGLVLPGYKYLGPFNGLDKGEPVNEADAAALEHDKAYDRQLDSGDNPYLKYNHADAEFQERLKEDTSFGGNLGRAVFQAKKRVLEPLGLVEEPVKTAPGKKRPVEHSPAEPDSSSGTGKAGQQPARKRLNFGQTGDADSVPDPQPLGQPPAAPSGLGTNTMATGSGAPMADNNEGADGVGNSSGNWHCDSTWMGDRVITTSTRTWALPTYNNHLYKQISSQSGASNDNHYFGYSTPWGYFDFNRFHCHFSPRDWQRLINNNWGFRPKRLNFKLFNIQVKEVTQNDGTTTIANNLTSTVQVFTDSEYQLPYVLGSAHQGCLPPFPADVFMVPQYGYLTLNNGSQAVGRSSFYCLEYFPSQMLRTGNNFTFSYTFEDVPFHSSYAHSQSLDRLMNPLIDQYLYYLSKTNAPSGTTTMSRLQFSQAGASDIRDQSRNWLPGPCYRQQRVSKTAADNNNSDYSWTGATKYHLNGRDSLVNPGPAMASHKDDEEKYFPQSGVLIFGKQDSEKTNVDIEKVMITDEEEIRTTNPVATEQYGSVSTNLQSGNTQAATTDVNTQGVLPGMVWQDRDVYLQGPIWAKIPHTDGHFHPSPLMGGFGLKHPPPQILIKNTPVPANPSTTFSAAKFASFITQYSTGQVSVEIEWELQKENSKRWNPEIQYTSNYNKSVNVDFTVDTNGVYSEPRPIGTRYLTRNL

SEQ ID NO: 2387 - protein, 735 aa, synthetic construct
  REGION 1..735: note = source = /note="Description of Artificial Sequence: Synthetic polypeptide"
MAADGYLPDWLEDTLSEGIRQWWKLKPGPPPPKPAERHQDDSRGLVLPGYKYLGPFNGLDKGEPVNEADAAALEHDKAYDRQLDSGDNPYLKYNHADAEFQERLKEDTSFGGNLGRAVFQAKKRVLEPLGLVEEPVKTAPGKKRPVEHSPAEPDSSSGTGKAGQQPARKRLNFGQTGDADSVPDPQPLGQPPAAPSGLGTNTMATGSGAPMADNNEGADGVGNSSGNWHCDSTWMGDRVITTSTRTWALPTYNNHLYKQISSQSGASNDNHYFGYSTPWGYFDFNRFHCHFSPRDWQRLINNNWGFRPKRLNFKLFNIQVKEVTQNDGTTTIANNLTSTVQVFTDSEYQLPYVLGSAHQGCLPPFPADVFMVPQYGYLTLNNGSQAVGRSSFYCLEYFPSQMLRTGNNFTFSYTFEDVPFHSSYAHSQSLDRLMNPLIDQYLYYLSKTNAPSGTTTMSRLQFSQAGASDIRDQSRNWLPGPCYRQQRVSKTAADNNNSDYSWTGATKYHLNGRDSLVNPGPAMASHKDDEEKYFPQSGVLIFGKQDSGKTNVDIEKVMITDEEEIRTTNPVATEQYGSVSTNLQSGNTQAATTDVNTQGVLPGMVWQDRDVYLQGPIWAKIPHTDGHFHPSPLMGGFGLKHPPPQILIKNTPVPANPSTTFSAAKFASFITQYSTGQVSVEIEWELQKENSKRWNPEIQYTSNYNKSVNVDFTVDTNGVYSEPRPIGTRYLTRNL

SEQ ID NO: 2388 - protein, 735 aa, synthetic construct
  REGION 1..735: note = source = /note="Description of Artificial Sequence: Synthetic polypeptide"
MAADGYLPDWLEDTLSEGIRQWWKLKPGPPPPKPAERHQDDSRGLVLPGYKYLGPFNGLDKGEPVNEADVAALEHDKAYDRQLDSGDNPYLKYNHADAEFQERLKEDTSFGGNLGRAVFQAKKRVLEPLGLVEEPVKTAPGKKRPVEHSPAEPDSSSGTGKAGQQPARKRLNFGQTGDADSVPDPQPLGQPPAAPSGLGTNTMATGSGAPMADNNEGADGVGNSSGNWHCDSTWMGDRVITTSTRTWALPTYNNHLYKQISSQSGASNDNHYFGYSTPWGYFDFNRFHCHFSPRDWQRLINNNWGFRPKRLNFKLFNIQVKEVTQNDGTTTIANNLTSTVQVFTDSEYQLPYVLGSAHQGCLPPFPADVFMVPQYGYLTLNNGSQAVGRSSFYCLEYFPSQMLRTGNNFTFSYTFEDVPFHSSYAHSQSLDRLMNPLIDQYLYYLSKTNAPSGTTTMSRLQFSQAGASDIRDQSRNWLPGPCYRQQRVSKTAADNNNSDYSWTGATKYHLNGRDSLVNPGPAMASHKDDEEKYFPQSGVLIFGKQDSGKTNVDIEKVMITDEEEIRTTNPVATEQYGSVSTNLQSGNTQAATTDVNTQGVLPGMVWQDRDVYLQGPIWAKIPHTDGHFHPSPLMGGFGLKHPPPQILIKNTPVPANPSTTFSAAKFASFITQYSTGQVSVEIEWELQKENSKRWNPEIQYTSNYNKSVNVDFTVDTNGVYSEPRPIGTRYLTRNL

SEQ ID NO: 2389 - protein, 735 aa, synthetic construct
  REGION 1..735: note = source = /note="Description of Artificial Sequence: Synthetic polypeptide"
MAADGYLPDWLEDTLSEGIRQWWKLKPGPPPPKPAERHQDDSRGLVLPGYKYLGPFNGLDKGEPVNEADAAALEHDKAYDRQLDSGDNPYLKYNHADAEFQERLKEDTSFGGNLGRAVFQAKKRVLEPLGLVEEPVKTAPGKKRPVEHSPAEPDSSSGTGKAGQQPARKRLNFGQTGDADSVPDPQPLGQPPAAPSGLGTNTMATGSGAPMADNNEGADGVGNSSGNWHCDSTWMGDRVITTSTRTWALPTYNNHLYKQISSQSGASNDNHYFGYSTPWGYFDFNRFHCHFSPRDWQRLINNNWGFRPKRLNFKLFNIQVKEVTQNDGTTTIANNLTSTVQVFTDSEYQLPYVLGSAHQGCLPPFPADVFMVPQYGYLTLNNGSQAVGRSSFYCLEYFPSQMLRTGNNFTFSYTFEDVPFHSSYAHSQSLDRLMNPLIDQYLYYLSKTNAPSGTTTMSRLQFSQAGASDIRDQSRNWLPGPCYRQQRVSKTAADNNNSDYPWTGATKYHLNGRDSLVNPGPAMASHKDDEEKYFPQSGVLIFGKQDSGKTNVDIEKVMITDEEEIRTTNPVATEQYGSVSTNLQSGNTQAATTDVNTQGVLPGMVWQDRDVYLQGPIWAKIPHTDGHFHPSPLMGGFGLKHPPPQILIKNTPVPANPSTTFSAAKFASFITQYSTGQVSVEIEWELQKENSKRWNPEIQYTSNYNKSVNVDFTVDTNGVYSEPRPIGTRYLTRNL

SEQ ID NO: 2390 - protein, 735 aa, synthetic construct
  REGION 1..735: note = source = /note="Description of Artificial Sequence: Synthetic polypeptide"
MAADGYLPDWLEDTLSEGIRQWWKLKPGPPPPKPAERHQDDSRGLVLPGYKYLGPFNGLDKGEPVNEADAAALEHDKAYDRQLDSGDNPYLKYNHADAEFQERLKEDTSFGGNLGRAVFQAKKRVLEPLGLVEEPVKTAPGKKRPVEHSPAEPDSSSGTGKAGQQPARKRLNFGQTGDADSVPDPQPLGQPPAAPSGLGTNTMATGSGAPMADNNEGADGVGNSSGNWHCDSTWMGDRVITTSTRTWALPTYNNHLYKQISSQSGASNDNHYFGYSTPWGYFDFNRFHCHFSPRDWQRLINNNWGFRPKRLNFKLFNIQVKEVTQNDGTTTIANNLTSTVQVFTDSEYQLPYVLGSAHQGCLPPFPADVFMVPQYGYLTLNNGSQAVGRSSFYCLEYFPSQMLRTGNNFTFSYTFEDVPFHSSYAHSQSLDRLMNPLIDQYLYYLSKTNAPSGTTTMSRLQFSQAGASDIRDQSRNWLPGPCYRQQRVSKTAADNNNSDYSWTGATKYHLNGRDSLVNPGPAMASHKDDEEKYFPQSGVLIFGKQDSGKTNVDIEKVMITDEEEIRTTNPVATEQYGSVSTNLQSGNTQAATTDVNTQGALPGMVWQDRDVYLQGPIWAKIPHTDGHFHPSPLMGGFGLKHPPPQILIKNTPVPANPSTTFSAAKFASFITQYSTGQVSVEIEWELQKENSKRWNPEIQYTSNYNKSVNVDFTVDTNGVYSEPRPIGTRYLTRNL

SEQ ID NO: 2391 - protein, 735 aa, synthetic construct
  REGION 1..735: note = source = /note="Description of Artificial Sequence: Synthetic polypeptide"
MAADGYLPDWLEDTLSEGIRQWWKLKPGPPPPKPAERHQDDSRGLVLPGYKYLGPFNGLDKGEPVNEADAAALEHDKAYDRQLDSGDNPYLKYNHADAEFQERLKEDTSFGGNLGRAVFQAKKRVLEPLGLVEEPVKTAPGKKRPVEHSPAEPDSSSGTGKAGQQPARKRLNFGQTGDADSVPDPQPLGQPPAAPSGLGTNTMATGSGAPMADNNEGADGVGNSSGNWHCDSTWMGDRVITTSTRTWALPTYNNHLYKQISSQSGASNDNHYFGYSTPWGYFDFNRFHCHFSPRDWQRLINNNWGFRPKRLNFKLFNIQVKEVTQNDGTTTIANNLTSTVQVFTDSEYQLPYVLGSAHQGCLPPFPADVFMVPQYGYLTLNNGSQAVGRSSFYCLEYFPSQMLRTGNNFTFSYTFEDVPFHSSYAHSQSLDRLMNPLIDQYLYYLSKTNAPSGTTTMSRLQFSQAGASDIRDQSRNWLPGPCYRQQRVSKTAADNNNSDYSWTGATKYHLNGRDSLVNPGPAMASHKDDEEKYFPQSGVLIFGKQDSGKTNVDIEKVMITDEEEIRTTNPVATEQYGSVSTNLQSGNTQAATTDVNTQGVLPGMVWQDRDVYLQGPIWAKIPHTDGHFHPSPLMGGFGLKHPPPQILIKNTPVPANPSTTFSAAKLASFITQYSTGQVSVEVEWELQKENSKRWNPEIQYTSNYNKSVNVDFTVDTNGVYSEPRPIGTRYLTRNL

SEQ ID NO: 2392 - protein, 735 aa, synthetic construct
  REGION 1..735: note = source = /note="Description of Artificial Sequence: Synthetic polypeptide"
MAADGYLPDWLEDTLSEGIRQWWKLKPGPPPPKPAERHQDDSRGLVLPGYKYLGPFNGLDKGEPVNEADVAALEHDKAYDRQLDSGDNPYLKYNHADAEFQERLKEDTSFGGNLGRAVFQAKKRVLEPLGLVEEPVKTAPGKKRPVEHSPAEPDSSSGTGKAGQQPARKRLNFGQTGDADSVPDPQPLGQPPAAPSGLGTNTMATGSGAPMADNNEGADGVGNSSGNWHCDSTWMGDRVITTSTRTWALPTYNNHLYKQISSQSGASNDNHYFGYSTPWGYFDFNRFHCHFSPRDWQRLINNNWGFRPKRLNFKLFNIQVKEVTQNDGTTTIANNLTSTVQVFTDSEYQLPYVLGSAHQGCLPPFPADVFMVPQYGYLTLNSGSQAVGRSSFYCLEYFPSQMLRTGNNFTFSYTFEDVPFHSSYAHSQSLDRLMNPLIDQYLYYLSKTNAPSGTTTMSRLQFSQAGASDIRDQSRNWLPGPCYRQQRVSKTAADNNNSDYSWTGATKYHLNGRDSLVNPGPAMASHKDDEEKYFPQSGVLIFGKQDSGKTNVDIEKVMITDEEEIRTTNPVATEQYGSVSTNLQSGNTQAATTDVNTQGVLPGMVWQDRDVYLQGPIWAKIPHTDGHFHPSPLMGGFGLKHPPPQILIKNTPVPANPSTTFSAAKFASFITQYSTGQVSVEIEWELQKENSKRWNPEIQYTSNYNKSVNVDFTVDTNGVYSEPRPIGTRYLTRNL

SEQ ID NO: 2393 - protein, 735 aa, synthetic construct
  REGION 1..735: note = source = /note="Description of Artificial Sequence: Synthetic polypeptide"
MAADGYLPDWLEDTLSEGIRQWWKLKPGPPPPKPAERHQDDSRGLVLPGYKYLGPFNGLDKGEPVNEADVAALEHDKAYDRQLDSGDNPYLKYNHADAEFQERLKEDTSFGGNLGRAVFQAKKRVLEPLGLVEEPVKTAPGKKRPVEHSPAEPDSSSGTGKAGQQPARKRLNFGQTGGADSVPDPQPLGQPPAAPSGLGTNTMATGSGAPMADNNEGADGVGNSSGNWHCDSTWMGDRVITTSTRTWALPTYNNHLYKQISSQSGASNDNHYFGYSTPWGYFDFNRFHCHFSPRDWQRLINNNWGFRPKRLNFKLFNIQVKEVTQNDGTTTIANNLTSTVQVFTDSEYQLPYVLGSAHQGCLPPFPADVFMVPQYGYLTLNNGSQAVGRSSFYCLEYFPSQMLRTGNNFTFSYTFEDVPFHSSYAHSQSLDRLMNPLIDQYLYYLSKTNAPSGTTTMSRLQFSQAGASDIRDQSRNWLPGPCYRQQRVSKTAADNNNSDYSWTGATKYHLNGRDSLVNPGPAMASHKDDEEKYFPQSGVLIFGKQDSGKTNVDIEKVMITDEEEIRTTNPVATEQYGSVSTNLQSGNTQAATTDVNTQGVLPGMVWQDRDVYLQGPIWAKIPHTDGHFHPSPLMGGFGLKHPPPQILIKNTPVPANPSTTFSAAKFASFITQYSTGQVSVEIEWELQKENSKRWNPEIQYTSNYNKSVNVDFTVDTNGVYSEPRPIGTRYLTRNL

SEQ ID NO: 2394 - protein, 735 aa, synthetic construct
  REGION 1..735: note = source = /note="Description of Artificial Sequence: Synthetic polypeptide"
MAADGYLPDWLEDTLSEGIRQWWKLKPGPPPPKPAERHQDDSRGLVLPGYKYLGPFNGLDKGEPVNEADAAALEHDKAYDRQLDSGDNPYLKYNHADAEFQERLKEDTSFGGNLGRAVFQAKKRVLEPLGLVEEPVKTAPGKKRPVEHSPAEPDSSSGTGKAGQQPARKRLNFGQTGDADSVPDPQPLGQPPAAPSGLGTNTMATGSGAPMADNNEGADGVGNSSGNWHCDSTWMGDRVITTSTRTWALPTYNNHLYKQISSQSGASNDNHYFGYSTPWGYFDFNRFHCHFSPRDWQRLINNNWGFRPKRLNFKLFNIQVKEVTQNDGTTTIANNLTSTVQVFTDSEYQLPYALGSAHQGCLPPFPADVFMVPQYGYLTLNNGSQAVGRSSFYCLEYFPSQMLRTGNNFTFSYTFEDVPFHSSYAHSQSLDRLMNPLIDQYLYYLSKTNAPSGTTTMSRLQFSQAGASDIRDQSRNWLPGPCYRQQRVSKTAADNNNSDYSWTGATKYHLNGRDSLVNPGPAMASHKDDEEKYFPQSGVLIFGKQDSGKTNVDIEKVMITDEEEIRTTNPVATEQYGSVSTNLQSGNTQAATTDVNTQGVLPGMVWQDRDVYLQGPIWAKIPHTDGHFHPSPLMGGFGLKHPPPQILIKNTPVPANPSTTFSAAKFASFITQYSTGQVSVEIEWELQKEDSKRWNPEIQYTSNYNKSVNVDFTVDTNGVYSEPRPIGTRYLTRNL

SEQ ID NO: 2395 - protein, 735 aa, synthetic construct
  REGION 1..735: note = source = /note="Description of Artificial Sequence: Synthetic polypeptide"
MAADGYLPDWLEDTLSEGIRQWWKLKPGPPPPKPAERHQDDSRGLVLPGYKYLGPFNGLDKGEPVNEADAAALEHDKAYDRQLDSGDNPYLKYNHADAEFQERLKEDTSFGGNLGRAVFQAKKRVLEPLGLVEEPVKTAPGKKRPVEHSPAEPDSSSGTGKAGQQPARKRLNFGQTGDADSVPDPQPLGQPPAAPSGLGTNTMATGSGAPMADNNEGADGVGNSSGNWHCDSTWMGDRVITTSTRTWALPTYNNHLYKQISSQSGASNDNHYFGYSTPWGYFDFNRFHCHFSPRDWQRLINNNWGFRPKRLNFKLFNIQVKEVTQNDGTTTIANNLTSTVQVFTDSEYQLPYVLGSAHQGCLPPFPADVFMVPQYGYLTLNNGSQAVGRSSFYCLEYFPSQMLRTGNNFTFSYTFEDVPFHSSYAHSQSLDRLMNPLIDQYLYYLSKTNAPSGTTTMSRLQFSQAGASDIRDQSRNWLPGPCYRQQRVSKTAADNNNSDYSWTGATKYHLNGRDSLVNPGPAMASHKDDEEKYFPQSGVLIFGKQDSGKTNVDIEKVMITDEEEIRTTNPVATEQYGSVSTNLQSGNTQAATTDVNTQGVLPGMVWQDRDVYLQGPIWAKIPHTDGHFHPSPLMGGFGLKHPPPQILIKNTPVPANPSTTSSAAKFASFITQYSTGQVSVEIEWELQKENSKRWNPEIQYTSNYNKSVNVDFTVDTNGVYSEPRPIGTRYLTRNL

SEQ ID NO: 2396 - protein, 735 aa, synthetic construct
  REGION 1..735: note = source = /note="Description of Artificial Sequence: Synthetic polypeptide"
MAADGYLPDWLEDTLSEGIRQWWKLKPGPPPLKPAERHQDDSRGLVLPGYKYLGPFNGLDKGEPVNEADAAALEHDKAYDRQLDSGDNPYLKYNHADAEFQERLKEDTSFGGNLGRAVFQAKKRVLEPLGLVEEPVKTAPGKKRPVEHSPAEPDSSSGTGKAGQQPARKRLNFGQTGDADSVPDPQPLGQPPAAPSGLGTNTMATGSGAPMADNNEGADGVGNSSGNWHCDSTWMGDRVITTSTRTWALPTYNNHLYKQISSQSGASNDNHYFGYSTPWGYFDFNRFHCHFSPRDWQRLINNNWGFRPKRLNFKLFNIQVKEVTQNDGTTTIANNLTSTVQVFTDSEYQLPYVLGSAHQGCLPPFPADVFMVPQYGYLTLNNGSQAVGRSSFYCLEYFPSQMLRTGNNFTFSYTFEDVPFHSSYAHSQSLDRLMNPLIDQYLYYLSKTNAPSGTTTMSRLQFSQAGASDIRDQSRNWLPGPCYRQQRVSKTAADNNNSDYSWTGATKYHLNGRDSLVNPGPAMASHKDDEEKYFPQSGVLIFGKQDSGKTNVDIEKVMITDEEEIRTTNPVATEQYGSVSTNLQSGNTQAATTDVNTQGVLPGMVWQDRDVYLQGPIWAKIPHTDGHFHPSPLMGGFGLKHPPPPILIKNTPVPANPSTTFSAAKFASFITQYSTGQVSVEIEWELQKENSKRWNPEIQYTSNYNKSVNVDFTVDTNGVYSEPRPIGTRYLTRNL

SEQ ID NO: 2397 - protein, 735 aa, synthetic construct
  REGION 1..735: note = source = /note="Description of Artificial Sequence: Synthetic polypeptide"
MAADGYLPDWLEDTLSEGIRQWWKLKPGPPPPKPAERHQDDSRGLVLPGYKYLGPFNGLDKGEPVNEADAAALEHDKAYDRQLDSGDNPYLKYNHADAEFQERLKEDTSFGGNLGRAVFQAKKRVLEPLGLVEEPVKTAPGKKRPVEHSPAEPDSSSGTGKAGQQPARKRLNFGQTGDADSVPDPQPLGQPPAAPSGLGTNTMATGSGAPMADNNEGADGVGNSSGNWHCDSTWMGDRVITTSTRTWALPTYNNHLYKQISSQSGASNDNHYFGYSTPWGYFDFNRFHCHFSPRDWQRLINNNWGFRPKRLNFKLFNIQVKEVTQNDGTTTIANNLTSTVQVFTDSEYQLPYVLGSAHQGCLPPFPADVFMVPQYGYLTLNNGSQAVGRSSFYCLEYFPSQMLRTGNNFTFSYTFEDVPFHSSYAHSQSLDRLMNPLIDQYLYYLSKTNAPSGTTTMSRLQFSQAGASDIRDQSRNWLPGPCYRQQRVSKTAADNNNSDYSWTGATKYHLNGRDSLVNPGPAMASHKDDEEKYFPQSGVLIFGKQDSGKTNVDIEKVMITDEEEIRATNPVATEQYGSVSTNLQSGNTQAATTDVNTQGVLPGMVWQDRDVYLQGPIWAKIPHTDGHFHPSPLMGGFGLKHPPPQILIKNTPVPANPSTTFSAAKFASFITQYSTGQVSVEIEWELQKENSKRWNPEIQYTSNYNKSVNVDFTVDTNGVYSEPRPIGTRYLTRNL

SEQ ID NO: 2398 - protein, 735 aa, synthetic construct
  REGION 1..735: note = source = /note="Description of Artificial Sequence: Synthetic polypeptide"
MAADGYLPDWLEDTLSEGIRQWWKLKPGPPPPKPAERHQDDSRGLVLPGYKYLGPFNGLDKGEPVNEADAAALEHDKAYDRQLDSGDNPYLKYNHADAEFQERLKEDTSFGGNLGRAVFQAKKRVLEPLGLVEEPVKTAPGKKRPVEHSPAEPDSSSGTGKAGQQPARKRLNFGQTGDADSVPDPQPLGQPPAAPSGLGTNTMATGSGAPMADNNEGADGVGNSSGNWHCDSTWMGDRVITTSTRTWALPTYNNHLYKQISSQSGASNDNHYFGYSTPWGYFDFNRFHCHFSPRDWQRLISNNWGFRPKRLNFKLFNIQVKEVTQNDGTTTIANNLTSTVQVFTDSEYQLPYVLGSAHQGCLPPFPADVFMVPQYGYLTLNNGSQAVGRSSFYCLEYFPSQMLRTGNNFTFSYTFEDVPFHSSYAHSQSLDRLMNPLIDQYLYYLSKTNAPSGTTTMSRLQFSQAGASDIRDQSRNWLPGPCYRQQRVSKTAADNNNSDYSWTGATKYHLNGRDSLVNPGPAMASHKDDEEKYFPQSGVLIFGKQDSGKTNVDIEKVMITDEEEIRTTNPVATEQYGSVSTNLQSGNTQAATTDVNTQGVLPGMVWQDRDVYLQGPIWAKIPHTDGHFHPSPLMGGFGLKHPPPQILIKNTPVPANPSTTFSAAKFASFITQYSTGQVSVEIEWEPQKENSKRWNPEIQYTSNYNKSVNVDFTVDTNGVYSEPRPIGTRYLTRNL

SEQ ID NO: 2399 - protein, 735 aa, synthetic construct
  REGION 1..735: note = source = /note="Description of Artificial Sequence: Synthetic polypeptide"
MAADGYLPDWLEDTLSEGIRQWWKLKPGPPPPKPAERHQDDSRGLVLPGYKYLGPFNGLDKGEPVNEADAAALEHDKAYDRQLDSGDNPYLKYNHADAEFQERLKEDTSFGGNLGRAVFQAKKGVLEPLGLVEEPVKTAPGKKRPVEHSPAEPDSSSGTGKAGQQPARKRLNFGQTGDADSVPDPQPLGQPPAAPSGLGTNTMATGSGAPMADNNEGADGVGNSSGNWHCDSTWMGDRVITTSTRTWALPTYNNHLYKQISSQSGASNDNHYFGYSTPWGYFDFNRFHCHFSPRDWQRLINNNWGFRPKRLNFKLFNIQVKEVTQNDGTTTIANNLTSTVQVFTDSEYQLPYVLGSAHQGCLPPFPADVFMVPQYGYLTLNNGSQAVGRSSFYCLEYFPSQMLRTGNNFTFSYTFEDVPFHSSYAHSQSLDRLMNPLIDQYLYYLSKTNAPSGTTTMSRLQFSQAGASDIRDQSRNWLPGPCYRQQRVSKTAADNNNSDYSWTGATKYHLNGRDSLVNPGPAMASHKDDEEKYFPQSGVLIFGKQDSGKTNVDIEKVMITDEEEIRTTNPVATEQYGSVSTNLQSGNTQAATTDVNTQGVLPGMVWQDRDVYLQGPIWAKIPHTDGHFHPSPLMGGFGLKHPPPQILIKNTPVPANPSTTFSAAKFASFITQYSTGQVSVEIEWELQKENSKRWNPEIQYTSNYNKSVNVDFTVDTNGVYSEPRPIGTRYLTRNL

SEQ ID NO: 2400 - protein, 735 aa, synthetic construct
  REGION 1..735: note = source = /note="Description of Artificial Sequence: Synthetic polypeptide"
MAADGYLPDWLEDTLSEGIRQWWKLKPGPPPPKPAERHQDDSRGLVLPGYKYLGPFNGLDKGEPVNEADAAALEHDKAYDRQLDSGDNPYLKYNHADAEFQERLKEDTSFGGNLGRAVFQAKKRVLEPLGLVEEPVKTAPGKKRPVEHSPAEPDSSSGTGKAGQQPARKRLNFGQTGDADSVPDPQPLGQPPAAPSGLGTNTMATGSGAPMADNNEGADGVGNSSGNWHCDSTWMGDRVITTSTRTWALPTYNNHLYKQISSQSGASNDNHYFGYSTPWGYFDFNRFHCHFSPRDWQRLINNNWGFRPKRLNFKLFNIQVKEVTQNDGTTTIANNLTSTVQVFTDSEYQLPYVLGSAHQGCLPPFPADVFMVPQYGYLTLNNGSQAVGRSSFYCLEYFPSQMLRTGNNFTFSYTFEDVPFHSSYAHSQSLDRLMNPLIDQYLYYLSRTNAPSGTTTMSRLQFSQAGASDIRDQSRNWLPGPCYRQQRVSKTAADNNNSDYSWTGATKYHLNGRDSLVNPGPAMASHKDDEEKYFPQSGVLIFGKQDSGKTNVDIEKVMITDEEEIRTTNPVATEQYGSVSTNLQSGNTQAATTDVNTQGVLPGMVWQDRDVYLQGPIWAKIPHTDGHFHPSPLMGGFGLKHPPPQILIKNTPVPANPSTTFSAAKFASFITQYSTGQVSVEIEWELQKENSKRWNPEIQYTSNYNKSVNVDFTVDTNGVYSEPRPIGTRYLTRNL

SEQ ID NO: 2401 - protein, 735 aa, synthetic construct
  REGION 1..735: note = source = /note="Description of Artificial Sequence: Synthetic polypeptide"
MAADGYLPDWLEDTLSEGIRQWWKLKPGPPPPKPAERHQDDSRGLVLPGYKYLGPFNGLDKGEPVNEADAAALEHDKAYDRQLDSGDNPYLKYNHADAEFQERLKEDTSFGGNLGRAVFQAKKRVLEPLGLVEEPVKTAPGKKRPVEHSPAEPDSSSGTGKAGQQPARKRLNFGQTGDADSVPDPQPLGQPPAAPSGLGTNTMATGSGAPMADNNEGADGVGNSSGNWHCDSTWMGDRVITTSTRTWALPTYNNHLYKQISSQSGASNDNHYFGYSTPWGYFDFNRFHCHFSPRDWQRLINNNWGFRPKRLNFKLFNIQVKEVTQNDGTTTIANNLTSTVQVFTDSEYQLPYVLGSAHQGCLPPFPADVFMVPQYGYLTLNNGSQAVGRSSFYCLEYFPSQMLRTGNNFTFSYTFEDVPFHSSYAHSQSLDRLMNPLIDQYLYYLSKTNAPSGTTTMSRLQFSQAGASDIRDQSRNWLPGPCYRQQRVSKTAADNNNSDYSWTGATKYHLNGRDSLVNPGPAMASHKDDEEKYFPQSGVLIFGKQDSGKTNVDIEKVMITDEEEIRTTNPVATEQYGSVSTNLQSGNTQAATTDVNTQGVLPGMVWQDRDVYLQGPIWAKIPHTDGHFHPSPLMGGFGLKHPPPQILIKNTPVPANPSTTFSAAKFASFITQYSTGQVSVEIEWELQKENSKRWNPEIQYTSNYNKSVNVDLTVDTNGVYSEPRPIGTRYLTRNL

SEQ ID NO: 2402 - protein, 735 aa, synthetic construct
  REGION 1..735: note = source = /note="Description of Artificial Sequence: Synthetic polypeptide"
MAADGYLPDWLEDTLSEGIRQWWKLKPGPPPLKPAERHQDDSRGLVLPGYKYLGPFNGLDKGEPVNEADAAALEHDKAYDRQLDSGDNPYLKYNHADAEFQERLKEDTSFGGNLGRAVFQAKKRVLEPLGLVEEPVKTAPGKKRPVEHSPAEPDSSSGTGKAGQQPARKRLNFGQTGDADSVPDPQPLGQPPAAPSGLGTNTMAAGSGAPMADNNEGADGVGNSSGNWHCDSTWMGDRVITTSTRTWALPTYNNHLYKQISSQSGASNDNHYFGYSTPWGYFDFNRFHCHFSPRDWQRLINNNWGFRPKRLNFKLFNIQVKEVTQNDGTTTIANNLTSTVQVFTDSEYQLPYVLGSAHQGCLPPFPADVFMVPQYGYLTLNNGSQAVGRSSFYCLEYFPSQMLRTGNNFTFSYTFEDVPFHSSYAHSQSLDRLMNPLIDQYLYYLSKTNAPSGTTTMSRLQFSQAGASDIRDQSRNWLPGPCYRQQRVSKTAADNNNSDYSWTGATKYHLNGRDSLVNPGPAMASHKDDEEKYFPQSGVLIFGKQDSGKTNVDIEKVMITDEEEIRTTNPVATEQYGSVSTNLQSGNTQAATTDVNTQGVLPGMVWQDRDVYLQGPIWAKIPHTDGHFHPSPLMGGFGLKHPPPQILIKNTPVPANPSTTFSAAKFASFITQYSTGQVSVEIEWELQKENSKRWNPEIQYTSNYNKSVNVDFTVDTNGVYSEPRPIGTRYLTRNL

SEQ ID NO: 2403 - protein, 735 aa, synthetic construct
  REGION 1..735: note = source = /note="Description of Artificial Sequence: Synthetic polypeptide"
MAADGYLPDWLEDTLSEGIRQWWKLKPGPPPPKPAERHQDDSRGLVLPGYKYLGPFNGLDKGEPVNEADAAALEHDKAYDRQLDSGDNPYLKYNHADAEFQERLKEDTSFGGNLGRAVFQAKKRVLEPLGLVEEPVKTAPGKKRPVEHSPAEPDSSSGTGKAGQQPARKRLNFGQTGDADSVPDPQPLGQPPAAPSGLGTNTMATGSGAPMADNNEGADGVGNSSGNWHCDSTWMGDRVITTSTRTWALPTYNNHLYKQISSQSGASNDNHYFGYSTPWGYFDFNRFHCHFSPRDWQRLINNNWGFRPKRLNFKLFNIQVKEVTQNDGTTTIANNLTSTVQVFTDSEYQLPYVLGSAHQGCLPPFPADVFMVPQYGYLTLNNGSQAVGRSSFYCLEYFPSQMLRTGNNFTFSYTFEDVPFHSSYAHSQSLDRLMNPLIDQYLYYLSKTNAPSGTTTMSRLQFSQAGASDIRDQSRNWLPGPCYRQQRVSKTAADNNNSDYSWTGATKYHLNGRDSLVNPGPAMASHKDDEEKYFPQSGVLIFGKQDSGKTNVDIEKVMITDEEEIRTTNPVATEQYGSVSTNLQSGDTQAATTDVNTQGVLPGMVWQDRDVYLQGPIWAKIPHTDGHFHPSPLMGGFGLKHPPPQILIKNTPVPANPSTTFSAAKFASFITQYSTGQVSVEIEWELQKENSKRWNPEIQYTSNYNKSVNVDFTVDTNGVYSEPRPIGTRYLTRNL

SEQ ID NO: 2404 - protein, 735 aa, synthetic construct
  REGION 1..735: note = source = /note="Description of Artificial Sequence: Synthetic polypeptide"
MAADGYLPDWLEDTLSEGIRQWWKLKPGPPPPKPAERHQDDSRGLVLPGYKYLGPFNGLDKGEPVNEADAAALEHDKAYDRQLDSGGNPYLKYNHADAEFQERLKEDTSFGGNLGRAVFQAKKRVLEPLGLVEEPVKTAPGKKRPVEHSPAEPDSSSGTGKAGQQPARKRLNFGQTGDADSVPDPQPLGQPPAAPSGLGTNTMATGSGAPMADNNEGADGVGNSSGNWHCDSTWMGDRVITTSTRTWALPTYNNHLYKQISSQSGASNDNHYFGYSTPWGYFDFNRFHCHFSPRDWQRLINNNWGFRPKRLNFKLFNIQVKEVTQNDGTTTIANNLTSTVQVFTDSEYQLPYVLGSAHQGCLPPFPADVFMVPQYGYLTLNNGSQAVGRSSFYCLEYFPSQMLRTGNNFTFSYTFEDVPFHSSYAHSQSLDRLMNPLIDQYLYYLSKTNAPSGTTTMSRLQFSQAGASDIRDQSRNWLPGPCYRQQRVSKTAADNNNSDYSWTGATKYHLNGRDSLVNPGPAMASHKDDEEKYFPQSGVLIFGKQDSGKTNVDIEKVMITDEEEIRTTNPVATEQYGSVSTNLQSGNTQAATTDVNTQGVLPGMVWQDRDVYLQGPIWAKIPHTDGHFHPSPLMGGFGLKHPPPQILIKNTPVPANPSTTFSAAKFASFITQYSTGQVSVEIEWELQKENSKRWNPEIQYTSNYNKSVNVDFTVDTNGVYSEPRPIGTRYLTRNL

SEQ ID NO: 2405 - protein, 735 aa, synthetic construct
  REGION 1..735: note = source = /note="Description of Artificial Sequence: Synthetic polypeptide"
MAADGYLPDWLEDTLSEGIRQWWKLKPGPPPPKPAERHQDDSRGLVLPGYKYLGPFNGLDKGEPVNEADAAALEHDKAYDRQLDSGDNPYLKYNHADAEFQERLKEDTSFGGNLGRAVFQAKKRVLEPLGLVEEPVKTAPGKKRPVEHSPAEPDSSSGTGKAGQQPARKRLNFGQTGDADSVPDPQPLGQPPAAPSGLGTNTMATGSGAPMADNNEGADGVGNSSGNWHCDSTWMGDRVITTSTRTWALPTYNNHLYKQISSQSGASNDNHYFGYSTPWGYFDFNRFHCHFSPRDWQRLINNNWGFRPKRLNFKLFNIQVKEVTQNDGTTTIANNLTSTVQVFTDSEYQLPYVLGSAHQGCLPPFPADVFMVPQYGYLTLNNGSQAVGRSSFYCLEYFPSQMLRTGNNFTFSYTFEDVPFHSSYAHSQSLDRLMNPLIDQYLYYLSKTNAPSGTTTMSRLQFSQAGASDIRDQSRNWLPGPCYRQQRVSKTAADNNNSDYSWTGATKYHLNGRDSLVNPGPAMASHKDDEEKYFPQSGVLIFGKQDSGKTNVDIEKVMITDEEEIRTTNPVATEQYGSVSTNLQSGNTQAATTDVNTQGVLPGMVWQDRDVYLQGPIWAKIPHTDGHFHPSPLMGGFGLKHPPPQILIKNTPVPANPSTTFSAAKLASFITQYSTGQVSVEIEWELQKENSKRWNPEIQYTSNYNKSVNVDFTVDTNGVYSEPRPIGTRYLTRNL

SEQ ID NO: 2406 - protein, 735 aa, synthetic construct
  REGION 1..735: note = source = /note="Description of Artificial Sequence: Synthetic polypeptide"
MAADGYLPDWLEDTLSEGIRQWWKLKPGPPPPKPAERHQDDSRGLVLPGYKYLGPFNGLDKGEPVNEADAAALEHDKAYDRQLDSGDNPYLKYNHADAEFQERLKEDTSFGGNLGRAVFQAKKRVLEPLGLVEEPVKTAPGKKRPVEHSPAEPDSSSGTGKAGQQPARKRLNFGQTGDADSVPDPQPLGQPPAAPSGLGTNTMATGSGAPMADNNEGADGVGNSSGNWHCDSTWMGDRVITTSTRTWALPTYNNHLYKQISSQSGASNDNHYFGYSTPWGYFDFNRFHCHFSPRDWQRLINNNWGFRPKRLNFKLFNIQVKEVTQSDGTTTIANNLTSTVQVFTDSEYQLPYVLGSAHQGCLPPFPADVFMVPQYGYLTLNNGSQAVGRSSFYCLEYFPSQMLRTGNNFTFSYTFEDVPFHSSYAHSQSLDRLMNPLIDQYLYYLSKTNAPSGTTTMSRLQFSQAGASDIRDQSRNWLPGPCYRQQRVSKTAADNNNSDYSWTGATKYHLNGRDSLVNPGPAMASHKDDEEKYFPQSGILIFGKQDSGKTNVDIEKVMITDEEEIRTTNPVATEQYGSVSTNLQSGNTQAATTDVNTQGVLPGMVWQDRDVYLQGPIWAKIPHTDGHFHPSPLMGGFGLKHPPPQILIKNTPVPANPSTTFSAAKFASFITQYPTGQVSVEIEWELQKENSKRWNPEIQYTSNYNKSVNVDFTVDTNGVYSEPRPIGTRYLTRNL

SEQ ID NO: 2407 - protein, 735 aa, synthetic construct
  REGION 1..735: note = source = /note="Description of Artificial Sequence: Synthetic polypeptide"
MAADGYLPDWLEDTLSEGIRQWWKLKPGPPPPKPAERHQDDSRGLVLPGYKYLGPFNGLDKGEPVNEADAAALEHDKAYDRQLDSGDNPYLKYNHADAEFQERLKEDTSFGGNLGRAVFQAKKRVLEPLGLVEEPVKTAPGKKRPVEHSPAEPDASSGTGKAGQQPARKRLNFGQTGDADSVPDPQPLGQPPAAPSGLGTNTMATGSGAPMADNNEGADGVGNSSGNWHCDSTWMGDRVITTSTRTWALPTYNNHLYKQISSQSGASNDNHYFGYSTPWGYFDFNRFHCHFSPRDWQRLINNNWGFRPKRLNFKLFNIQVKEVTQNDGTTTIANNLTSTVQVFTDSEYQLPYVLGSAHQGCLPPFPADVFMVPQYGYLTLNNGSQAVGRSSFYCLEYFPSQMLRTGNNFTFSYTFEDVPFHSSYAHSQSLDRLMNPLIDQYLYYLSKTNAPSGTTTMSRLQFSQAGASDIRDQSRNWLPGPCYRQQRVSKTAADNNNSDYSWTGATKYHLNGRDSLVNPGPAMASHKDDEEKYFPQSGVLIFGKQDSGKTNVDIEKVMITDEEEIRTTNPVATEQYGSVSTNLQSGNTQAATTDVNTQGVLPGMVWQDRDVYLQGPIWAKIPHTDGHFHPSPLMGGFGLKHPPPQILIKNTPVPANPSTTFSAAKFASFITQYSTGQVSVEIEWELQKENSKRWNPEIQYTSNYNKSVNVDFTVDTNGVYSEPRPIGTRYLTRNL

SEQ ID NO: 2408 - protein, 735 aa, synthetic construct
  REGION 1..735: note = source = /note="Description of Artificial Sequence: Synthetic polypeptide"
MAADGYLPDWLEDTLSEGIRQWWKLKPGPPPPKPAERHQDDSRGLVLPGYKYLGPFNGLDKGGPVNEADAAALEHDKAYDRQLDSGDNPYLKYNHADAEFQERLKEDTSFGGNLGRAVFQAKKRVLEPLGLVEEPVKTAPGKKRPVEHSPAEPDSSSGTGKAGQQPARKRLNFGQTGDADSVPDPQPLGQPPAAPSGLGTNTMATGSGAPMADNNEGADGVGNSSGNWHCDSTWMGDRVITTSTRTWALPTYNNHLYKQISSQSGASNDNHYFGYSTPWGYFDFNRFHCHFSPRDWQRLINNNWGFRPKRLNFKLFNIQVKEVTQNDGTTTIANNLTSTVQVFTDSEYQLPYVLGSAHQGCLPPFPADVFMVPQYGYLTLNNGSQAVGRSSFYCLEYFPSQMLRTGNNFTFSYTFEDVPFHSSYAHSQSLDRLMNPLIDQYLYYLSKTNAPSGTTTMSRLQFSQAGASDIRDQSRNWLPGPCYRQQRVSKTAADNNNSDYSWTGATKYHLNGRDSLVNPGPAMASHKDDEEKYFPQSGVLIFGKQDSGKTNVDIEKVMITDEEEIRTTNPVATEQYGSVSTNLQSGNTQAATTDVNTQGVLPGMVWQDRDVYLQGPIWAKIPHTDGHFHPSPLMGGFGLKHPPPQILIKNTPVPANPSTTFSAAKFASFITQYSTGQVSVEIEWELQKENSKRWNPEIQYTSNYNKSVNVDFTVDTNGVYSEPRPIGTRYLTRNL

SEQ ID NO: 2409 - protein, 735 aa, synthetic construct
  REGION 1..735: note = source = /note="Description of Artificial Sequence: Synthetic polypeptide"
MAADGYLPDWLEDTLSEGIRQWWKLKPGPPPPKPAERHQDDSRGLVLPGYKYLGPFNGLDKGEPVNEADAAALEHDKAYDRQLDSGDNPYLKHNHADAEFQERLKEDTSFGGNLGRAVFQAKKRVLEPLGLVEEPVKTAPGKKRPVEHSPAEPDSSSGTGKAGQQPARKRLNFGQTGDADSVPDPQPLGQPPAAPSGLGTNTMATGSGAPMADNNEGADGVGNSSGNWHCDSTWMGDRVITTSTRTWALPTYNNHLYKQISSQSGASNDNHYFGYSTPWGYFDFNRFHCHFSPRDWQRLINNNWGFRPKRLNFKLFNIQVKEVTQNDGTTTIANNLTSTVQVFTDSEYQLPYVLGSAHQGCLPPFPADVFMVPQYGYLTLNNGSQAVGRSSFYCLEYFPSQMLRTGNNFTFSYTFEDVPFHSSYAHSQSLDRLMNPLIDQYLYYLSKTNAPSGTTTMSRLQFSQAGASDIRDQSRNWLPGPCYRQQRVSKTAADNNNSDYSWTGATKYHLNGRDSLVNPGPAMASHKDDEEKYFPQSGVLIFGKQDSGKTNVDIEKVMITDEEEIRTTNPVATEQYGSVSTNLQSGNTQAATTDVNTQGVLPGMVWQDRDVYLQGPIWAKIPHTDGHFHPSPLMGGFGLKHPPPQILIKNTPVPANPSTTFSAAKFASFITQYSTGQVSVEIEWELQKENSKRWNPEIQYTSNYNKSVNVDFTVDTNGVYSEPRPIGTRYLTRNL

SEQ ID NO: 2410 - protein, 735 aa, synthetic construct
  REGION 1..735: note = source = /note="Description of Artificial Sequence: Synthetic polypeptide"
MAADGYLPDWLEDTLSEGIRQWWKLKPGPPPPKPAERHQDDSRGLVLPGYKYLGPFNGLDKGEPVNEADAAALEHDKAYDRQLDSGDNPYLKYNHADAEFQERLKEDTSFGGNLGRAVFQAKKRVLEPLGLVEEPVKTAPGKKRPVEHSPAEPDSSSGTGKAGQQPARKRLNFGQTGDADSVPDPQPLGQPPAAPSGLGTNTMATGSGAPMADNNEGADGVGNSSGNWHCDSTWMGDRVITTSTRTWALPTYNNHLYKQISSQSGASNDNHYFGYSTPWGYFDFNRFHCHFSPRDWQRLINNNWGFRPKRLNFKLFNIQVKEVTQNDGTTTIANNLTSTVQVFTDSEYQLPYVLGSAHQGCLPPFPAGVFMVPQYGYLTLNNGSQAVGRSSFYCLEYFPSQMLRTGNNFTFSYTFEDVPFHSSYAHSQSLDRLMNPLIDQYLYYLSKTNAPSGTTTMSRLQFSQAGASDIRDQSRNWLPGPCYRQQRVSKTAADNNNSDYSWTGATKYHLNGRDSLVNPGPAMASHKDDEEKYFPQSGVLIFGKQDSGKTNVDIEKVMITDEEEIRTTNPVATEQYGSVSTNLQSGNTQAATTDVNTQGVLPGMVWQDRDVYLQGPIWAKIPHTDGHFHPSPLMGGFGLKHPPPQILIKNTPVPANPSTTFSAAKFASFITQYSTGQVSVEIEWELQKENSKRWNPEIQYTSNYNKSVNVDFTVDTNGVYSEPRPIGTRYLTRNL

SEQ ID NO: 2411 - protein, 735 aa, synthetic construct
  REGION 1..735: note = source = /note="Description of Artificial Sequence: Synthetic polypeptide"
MAADGYLPDWLEDTLSEGIRQWWKLKPGPPPPKPAERHQDDSRGLVLPGYKYLGPFNGLDKGEPVNEADAAALEHDKAYDRQLDSGDNPYLKYNHADAEFQERLKEDTSFGGNLGRAVFQAKKRVLEPLGLVEEPVKTAPGKKRPVEHSPAEPDSSSGTGKAGQQPARKRLNFGQTGDADSVPDPQPLGQPPAAPSGLGTNTTATGSGAPMADNNEGADGVGNSSGNWHCDSTWMGDRVITTSTRTWALPTYNNHLYKQISSQSGASNDNHYFGYSTPWGYFDFNRFHCHFSPRDWQRLINNNWGFRPKRLNFKLFNIQVKEVTQNDGTTTIANNLTSTVQVFTDSEYQLPYVLGSAHQGCLPPFPADVFMVPQYGYLTLNNGSQAVGRSSFYCLEYFPSQMLRTGNNFTFSYTFEDVPFHSSYAHSQSLDRLMNPLIDQYLYYLSKTNAPSGTTTMSRLQFSQAGASDIRDQSRNWLPGPCYRQQRVSKTAADNNNSDYSWTGATKYHLNGRDSLVNPGPAMASHKDDEEKYFPQSGVLIFGKQDSGKTNVDIEKVMITDEEEIRTTNPVATEQYGSVSTNLQSGNTQAATTDVNTQGVLPGMVWQDRDVYLQGPIWAKIPHTDGHFHPSPLMGGFGLKHPPPQILIKNTPVPANPSTTFSAAKFASFITQYSTGQVSVEIEWELQKENSKRWNPEIQYTSNYNKSVNVDFTVDTNGVYSEPRPIGTRYLTRNL

SEQ ID NO: 2412 - protein, 735 aa, synthetic construct
  REGION 1..735: note = source = /note="Description of Artificial Sequence: Synthetic polypeptide"
MAADGYLPDWLEDTLSEGIRQWWKLKPGPPPPKPAERHQDDSRGLVLPGYKYLGPFNGLDKGEPVNEADAAALEHDKAYDRQLDSGDNPYLKYNHADAEFQERLKEDTSFGGNLGRAVFQAKKRVLEPLGLVEEPVKTAPGKKRPVEHSPAEPDSSSGTGKAGQQPARKRLNFGQTGDADSVPDPQPLGQPPAAPSGLGTNTMATGSGAPMADNNEGADGVGNSSGNWHCDSTWMGDRVITTSTRTWALPTYNNHLYKQISSQSGASNDNHYFGYSTPWGYFDFNRFHCHFSPRDWQRLIINNWGFRPKRLNFKLFNIQVKEVTQNDGTTTIANNLTSTVQVFTDSEYQLPYVLGSAHQGCLPPFPADVFMVPQYGYLTLNNGSQAVGRSSFYCLEYFPSQMLRTGNNFTFSYTFEDVPFHSSYAHSQSLDRLMNPLIDQYLYYLSKTNAPSGTTTMSRLQFSQAGASDIRDQSRNWLPGPCYRQQRVSKTAADNNNSDYSWTGATKYHLNGRDSLVNPGPAMASHKDDEEKYFPQSGVLIFGKQDSGKTNVDIEKVMITDEEEIRTTNPVATEQYGSVSTNLQSGNTQAATTDVNTQGVLPGMVWQDRDVYLQGPIWAKIPHTDGHFHPSPLMGGFGLKHPPPQILIKNTPVPANPSTTFSAAKFASFITQYSTGQVSVEIEWELQKENSKRWNPEIQYTSNYNKSVNVDFTVDTNGVYSEPRPIGTRYLTRNL

SEQ ID NO: 2413 - protein, 735 aa, synthetic construct
  REGION 1..735: note = source = /note="Description of Artificial Sequence: Synthetic polypeptide"
MAADGYLPDWLEDTLSEGIRQWWKLKPGPPPPKPAERHQDDSRGLVLPGYKYLGPFNGLDKGEPVNEADAAALEHDKAYDRQLDSGDNPYLKYNHADAEFQERLKEDTSFGGNLGRAVFQAKKRVLEPLGLVEEPVKTAPGKKRPVEHSPAEPDSSSGTGKAGQQPARKRLNFGQTGDADSVPDPQPLGQPPAAPSGLGTNTMATGSGAPMADNNEGADGVGNSSGNWHCDSTWMGDRVITTSTRTWALPTYNNHLYKQISSQSGASNDNHYFGYSTPWGYFDFNRFHCHFSPRDWQRLINNNWGFRPKRLNFKLFNIQVKEVTQNDGTTTIANNLTSTVQVFTDSEYQLPYVLGSAHQGCLPPFPADVFMVPQYGYLTLNNGSQAVGRSSFYCLEYFPSQMLRTGNNFTFSYTFEDVPFHSSYAHSQSLDRLMNPLIDQYLYYLSKTNAPSGTTTMSRLQFSQAGASDIRDQSRNWLPGPCYRQQRVSKTAADNNNSDYSWTGATKYHLNGRDSLVNPGPAMASHKDDEEKYFPQSGVLIFGKQDSGKTNVDIEKVMITDEEEIRTTNPVATEQYGSVSTNLQSGNTQAATTDVNTQGVLPGMVWQDRDVYQQGPIWAKIPHTDGHFHPSPLMGGFGLKHPPPQILIKNTPVPANPSTTFSAAKLASFITQYSTGQVSVEVEWELQKENSKRWNPEIQYTSNYNKSVNVDFTVDTNGVYSEPRPIGTRYLTRNL

SEQ ID NO: 2414 - protein, 735 aa, synthetic construct
  REGION 1..735: note = source = /note="Description of Artificial Sequence: Synthetic polypeptide"
MAADGYLPDWLEDTLSEGIRQWWKLKPGPPPPKPAERHQDDSRGLVLPGYKYLGPFNGLDKGEPVNEADAAALEHDKAYDRQLDSGDNPYLKYNHADAEFQERLKEDTSFGGNLGRAVFQAKKRVLEPLGLVEEPVKTAPGKKRPVEHSPAEPDSSSGTGKAGQQPARKRLNFGQTGDADSVPDPQPLGQPPAAPSGLGTNTMATGSGAPMADSNEGADGVGNSSGNWHCDSTWMGDRVITTSTRTWALPTYNNHLYKQISSQSGASNDNHYFGYSTPWGYFDFNRFHCHFSPRDWQRLINNNWGFRPKRLNFKLFNIQVKEVTQNDGTTTIANNLTSTVQVFTDSEYQLPYVLGSAHQGCLPPFPADVFMVPQYGYLTLNNGSQAVGRSSFYCLEYFPSQMLRTGNNFTFSYTFEDVPFHSSYAHSQSLDRLMNPLIDQYLYYLSKTNAPSGTTTMSRLQFSQAGASDIRDQSRNWLPGPCYRQQRVSKTAADNNNSDYSWTGATKYHLNGRDSLVNPGPAMASHKDDEEKYFPQSGVLIFGKQDSGKTNVDIEKVMITDEEEIRTTNPVATEQYGSVSTNLQSGNTQAATTDVNTQGVLPGMVWQDRDVYLQGPIWAKIPHTDGHFHPSPLMGGFGLKHPPPQILIKNTPVPANPSTTFSAAKFASFITQYSTGQVSVEIEWELQKENSKRWNPEIQYTSNYNKSVNVDFTVDTNGVYSEPRPIGTRYLTRNL

SEQ ID NO: 2415 - protein, 735 aa, synthetic construct
  REGION 1..735: note = source = /note="Description of Artificial Sequence: Synthetic polypeptide"
MAADGYLPDWLEDTLSEGIRQWWKLKPGPPPPKPAERHQDDSRGLVLPGYKYLGPFNGLDKGEPVNEADAAALEHDKAYDRQLDSGDNPYLKYNHADAEFQERLKEDTSFGGNLGRAVFQAKKRVLEPLGLVEEPVKTAPGKKRPVEHSPAEPDSSSGTGKAGQQPARKRLNFGQTGDADSVPDPQPLGQPPAAPSGLGTNTMATGSGAPMADNNEGADGVGNSSGNWHCDSTWMGDRVITTSTRTWALPTYNNHLYKQISSQSGASNDNHYFGYSTPWGYFDFNRFHCHFSPRDWQRLINNNWGFRPKRLNFKLFNIQVKEVTQNDGTTTIANNLTSTVQVFTDSEYQLPYVLGSAHQGCLPPFPADVSMVPQYGYLTLNNGSQAVGRSSFYCLEYFPSQMLRTGNNFTFSYTFEDVPFHSSYAHSQSLDRLMNPLIDQYLYYLSKTNAPSGTTTMSRLQFSQAGASDIRDQSRNWLPGPCYRQQRVSKTAADNNNSDYSWTGATKYHLNGRDSLVNPGPAMASHKDDEEKYFPQSGVLIFGKQDSGKTNVDIEKVMITDEEEIRTTNPVATEQYGSVSTNLQSGNTQAATTDVNTQGVLPGMVWQDRDVYLQGPIWAKIPHTDGHFHPSPLMGGFGLKHPPPQILIKNTPVPANPSTTFSAAKFASFITQYSTGQVSVEIEWELQKENSKRWNPEIQYTSNYNKSVNVDFTVDTNGVYSEPRPIGTRYLTRNL

SEQ ID NO: 2416 - protein, 735 aa, synthetic construct
  REGION 1..735: note = source = /note="Description of Artificial Sequence: Synthetic polypeptide"
MAADGYLPDWLEDTLSEGIRQWWKLKPGPPPPKPAERHQDDSRGLVLPGYKYLGPFNGLDKGEPVNEADVAALEHDKAYDRQLDSGDNPYLKYNHADAEFQERLKEDTSFGGNLGRAVFQAKKRVLEPLGLVEEPVKTAPGKKRPVEHSPAEPDSSSGTGKAGQQPARKRLNFGQTGDADSVPDPQPLGQPPAAPSGLGTNTMATGSGAPMADNNEGADGVGNSSGNWHCDSTWMGDRVITTSTRTWALPTYNNHLYKQISSQSGASNDNHYFGYSTPWGYFDFNRFHCHFSPRDWQRLINNNWGFRPKRLNFKLFNIQVKEVTQNDGTTTIANNLTSTVQVFTDSEYQLPYVLGSAHQGCLPPFPADVFMVPQYGYLTLNNGSQAVGRSSFYCLEYFPSQMLRTGNNFTFSYTFEDVPFHSSYAHSQSLDRLMNPLIDQYLYYLSKTNAPSGTTTMSRLQFSQAGASDIRDQSRNWLPGPCYRQQRVSKTAADNNNSDYSWTGATKYHLNGRDSLVNPGPAMASHKDDEEKYFPQSGVLIFGKQDSGKTNVDIEKVMITDEEEIRTTNPVATEQYGPVSTNLQSGNTQAATTDVNTQGVLPGMVWQGRDVYLQGPIWAKIPHTDGHFHPSPLMGGFGLKHPPPQILIKNTPVPANPSTTFSAAKFASFITQYSTGQVSVEIEWELQKENSKRWNPEIQYTSNYNKSVNVDFTVDTNGVYSEPRPIGTRYLTRNL

SEQ ID NO: 2417 - protein, 735 aa, synthetic construct
  REGION 1..735: note = source = /note="Description of Artificial Sequence: Synthetic polypeptide"
MAADGYLPDWLEGTLSEGIRQWWKLKPGPPPPKPAERHQDDSRGLVLPGYKYLGPFNGLDKGEPVNEADAAALEHDKAYDRQLDSGDNPYLKYNHADAEFQERLKEDTSFGGNLGRAVFQAKKRVLEPLGLVEEPVKTAPGKKRPVEHSPAEPDSSSGTGKAGQQPARKRLNFGQTGDADSVPDPQPLGQPPAAPSGLGTNTMATGSGAPMADNNEGADGVGNSSGNWHCDSTWMGDRVITTSTRTWALPTYNNHLYKQISSQSGASSDNHYFGYSTPWGYFDFNRFHCHFSPRDWQRLINNNWGFRPKRLNFKLFNIQVKEVTQNDGTTTIANNLTSTVQVFTDSEYQLPYVLGSAHQGCLPPFPADVFMVPQYGYLTLNNGSQAVGRSSFYCLEYFPSQMLRTGNNFTFSYTFEDVPFHSSYAHSQSLDRLMNPLIDQYLYYLSKTNAPSGTTTMSRLQFSQAGASDIRDQSRNWLPGPCYRQQRVSKTAADNNNSDYSWTGATKYHLNGRDSLVNPGPAMASHKDDEEKYFPQSGVLIFGKQDSGKTNVDIEKVMITDEEEIRTTNPVATEQYGSVSTNLQSGNTQAATTDVNTQGVLPGMVWQDRDVYLQGPIWAKIPHTDGHFHPSPLMGGFGLKHPPPQILIKNTPVPANPSTTFSAAKLASFITQYSTGQVSVEIEWELQKENSKRWNPEIQYTSNYNKSVNVDFTVDTNGVYSEPRPIGTRYLTRNL

SEQ ID NO: 2418 - protein, 735 aa, synthetic construct
  REGION 1..735: note = source = /note="Description of Artificial Sequence: Synthetic polypeptide"
MAADGYLPDWLEDTLSEGIRQWWKLKPGPPPPKPAERHQDDSRGLVLPGYKYLGPFNGLDKGEPVNEADVAALEHDKAYDRQLDSGDNPYLKYNHADAEFQERLKEDTSFGGNLGRAVFQAKKRVLEPLGLVEEPVKTAPGKKRPVEHSPAEPDSSSGTGKAGQQPARKRLNFGQTGDADSVPDPQPLGQPPAAPSGLGTNTMATGSGAPMADNNEGADGVGNSSGNWHCDSTWMGDRVITTSTRTWALPTYNNHLYKQISSQSGASNDNHYFGYSTPWGYFDFNRFHCHFSPRDWQRLINNNWGFRPKRPNFKLFNIQVKEVTQNDGTTTIANNLTSTVQVFTDSEYQLPYVLGSAHQGCLPPFPADVFMVPQYGYLTLNNGSQAVGRSSFYCLEYFPSQMLRTGNNFTFSYTFEDVPFHSSYAHSQSLDRLMNPLIDQYLYYLSKTNAPSGTTTMSRLQFSQAGASDIRDQSRNWLPGPCYRQQRVSKTAADNNNSDYSWTGATKYHLNGRDSLVNPGPAMASHKDDEEKYFPQSGVLIFGKQDSGKTNVDIEKVMITDEEEIRTTNPVATEQYGSVSTNLQSGNTQAATTDVNTQGVLPGMVWQDRDVYLQGPIWAKIPHTDGHFHPSPLMGGFGLKHPPPQILIKNTPVPANPSTTFSAAKFASFITQYSTGQVSVEIEWELQKENSKRWNPEIQYTSNYNKSVNVDFTVDTNGVYSEPRPIGTRYLTRNL

SEQ ID NO: 2419 - protein, 735 aa, synthetic construct
  REGION 1..735: note = source = /note="Description of Artificial Sequence: Synthetic polypeptide"
MAADGYLPDWLEDTLSEGIRQWWKLKPGPPPPKPAERHQDDSRGLELPGYKYLGPFNGLDKGEPVNEADAAALEHDKAYDRQLDSGDNPYLKYNHADAEFQERLKEDTSFGGNLGRAVFQAKKRVLEPLGLVEEPVKTAPGKKRPVEHSPAEPDSSSGTGKAGQQPARKRLNFGQTGDADSVPDPQPLGQPPAAPSGLGTNTMATGSGAPMADNNEGADGVGNSSGNWHCDSTWMGDRVITTSTRTWALPTYNNHLYKQISSQSGASNDNHYFGYSTPWGYFDFNRFHCHFSPRDWQRLINNNWGFRPKRLNFKLFNIQVKEVTQNDGTTTIANNLTSTVQVFTDSEYQLPYVLGSAHQGCLPPFPADVFMVPQYGYLTLNNGSQAVGRSSFYCLEYFPSQMLRTGNNFTFSYTFEDVPFHSSYAHSQSLDRLMNPLIDQYLYYLSKTNAPSGTTTMSRLQFSQAGASDIRDQSRNWLPGPCYRQQRVSKTAADNNNSDYSWTGATKYHLNGRDSLVNPGPAMASHKDDEEKYFPQSGVLIFGKQDSGKTNVDIEKVMITDEEEIRTTNPVATEQYGSVSTNLQSGNTQAATTDVNTQGVLPGMVWQDRDVYLQGPIWAKIPHTDGHFHPSPLMGGFGLKHPPPQILIKNTPVPANPSTTFSAAKFASFITQYSTGQVSVEIEWELQKENSKRWNPEIQYTSNYNKSVNVDFTVDTNGVYSEPRPIGTRYLTRNL

SEQ ID NO: 2420 - protein, 735 aa, synthetic construct
  REGION 1..735: note = source = /note="Description of Artificial Sequence: Synthetic polypeptide"
MAADGYLPDWLEDTLSEGIRQWWKLKPGPPPPKPAERHQDDSRGLVLPGYKYLGPFNGLDKGEPVNEADAAALEHDKAYDRQLDSGDNPYLKYNHADAEFQERLKEDTSFGGNLGRAVFQAKKRVLEPLGLVEEPVKTAPGKKRPVEHSPAEPDSSSGTGKAGQQPARKRLNFGQTGDADSVPDPQPLGQPPAAPSGLGTNTMATGSGAPMADNNEGADGVGNSSGNWHCDSTWMGDRVITTSTRTWALPTYNNHLYKQISSQSGASNDNHYFGYSTPWGYFDFNRFHCHFSPRDWQRLINNNWGFRPKRLNFKLFNIQVKEVTQNDGMTTIANNLTSTVQVFTDSEYQLPYVLGSAHQGCLPPFPADVFMVPQYGYLTLNNGSQAVGRSSFYCLEYFPSQMLRTGNNFTFSYTFEDVPFHSSYAHSQSLDRLMNPLIDQYLYYLSKTNAPSGTTTMSRLQFSQAGASDIRDQSRNWLPGPCYRQQRVSKTAADNNNSDYSWTGATKYHLNGRDSLVNPGPAMASHKDDEEKYFPQSGVLIFGKQDSGKTNVDIEKVMITDEEEIRTTNPVATEQYGSVSTNLQSGNTQAATTDVNTQGVLPGMVWQDRDVYLQGPIWAKIPHTDGHFHPSPLMGGFGLKHPPPQILIKNTPVPANPSTTFSAAKFASFITQYSTGQVSVEIEWELQKENSKRWNPEIQYTSNYNKSVNVDFTVDTNGVYSEPRPIGTRYLTRNL

SEQ ID NO: 2421 - protein, 735 aa, synthetic construct
  REGION 1..735: note = source = /note="Description of Artificial Sequence: Synthetic polypeptide"
MAADGYLPDWLEDTLSEGIRQWWKLKPGPPPLKPAERHQDDSRGLVLPGYKYLGPFNGLDKGEPVNEADAAALEHDKAYDRQLDSGDNPYLKYNHADAEFQERLKEDTSFGGNLGRAVFQAKKRVLEPLGLVEEPVKTAPGKKRPVEHSPAEPDSSSGTGKAGQQPARKRLNFGQTGDADSVPDPQPLGQPPAAPSGLGTNTMATGSGAPMADNNEGADGVGNSSGNWHCDSTWMGDRVITTSTRTWALPTYNNHLYKQISSQSGASNDNHYFGYSTPWGYFDFNRFHCHFSPRDWQRLINNNWGFRPKRLNFKLFNIQVKEVTQNDGTTTIANNLTSTVQVFTDSEYQLPYVLGSAHQGCLPPFPADVFMVPQYGYLTLNNGSQAVGRSSFYCLEYFPSQMLRTGNNFTFSYTFEDVPFHSSYAHSQSLDRLMNPLIDQYLYYLSKTNAPSGTTTMSRLQFSQAGASDIRDQSRNWLPGPCYRQQRVSKTAADNNNSDYSWTGATKYHLNGRDSLVNPGPAMASHKDDEEKYFPQSGVLIFGKQDSGKTNVDIEKVMITDEEEIRTTNPVATEQYGSVSTNLQSGNTQAATTDVNTQGVPPGMVWQDRDVYLQGPIWAKIPHTDGHFHPSPLMGGFGLKHPPPQILIKNTPVPANPSTTFSAAKFASFITQYSTGQVSVEIEWELQKENSKRWNPEIQYTSNYNKSVNVDFTVDTNGVYSEPRPIGTRYLTRNL

SEQ ID NO: 2422 - protein, 735 aa, synthetic construct
  REGION 1..735: note = source = /note="Description of Artificial Sequence: Synthetic polypeptide"
MAADGYLPDWLEDTLSEGIRQWWKLKPGPPPPKPAERHQDDSRGLVLPGYKYLGPFNGLDKGEPVNEADAAALEHDKAYDRQLDSGDNPYLKYNHADAEFQERLKEDTSFGGNLGRAVFQAKKRVLEPLGLVEEPVKTAPGKKRPVEHSPAEPDSSSGTGKAGQQPARKRLNFGQTGDADSVPDPQPLGQPPAAPSGLGTNTMATGSGAPMADNNEGADGVGNSSGNWHCDSTWMGDRVITTSTRTWALPTYNNHLYKQISSQSGASNDNHYFGYSTPWGYFDFNRFHCHFSPRDWQRLINNNWGFRPKRLNFKLFNIQVKEVTQNDGTTTIANNLTSTVQVFTDSEYQLPYVLGSAHQGCLPPFPADVFMVPQYGYLTLNNGSQAVGRSSFYCLEYFPSQMLRTGNNFTFSYTFEDVPFHSSYAHSQSLDRLMNPLIDQYLYYLSKTNAPSGTTTMSRLQFSQAGASDIRDQSRNWLPGPCYRQQRVSKTAADNNNSDYSWTGATKYHLNGRDSLVNPGPAMASHKDDEEKYFPQSGVLIFGKQDSGKTNVDIEKVMITDEEEIRTTNPVATEQYGSVSTNLQSGNTQAATTDVNTQGVLPGMAWQDRDVYLQGPIWAKIPHTDGHFHPSPLMGGFGLKHPPPQILIKNTPVPANPSTTLSAAKFASFITQYSTGQVSVEIEWELQKENSKRWNPEIQYTSNYNKSVNVDFTVDTNGVYSEPRPIGTRYLTRNL

SEQ ID NO: 2423 - protein, 735 aa, synthetic construct
  REGION 1..735: note = source = /note="Description of Artificial Sequence: Synthetic polypeptide"
MAADGYLPDWLEDTLSEGIRQWWKLKPGPPPPKPAERHQDDSRGLVLPGYKYLGPFNGLDKGEPVNEADAAALEHDKAHDRQLDSGDNPYLKYNHADAEFQERLKEDTSFGGNLGRAVFQAKKRVLEPLGLVEEPVKTAPGKKRPVEHSPAEPDSSSGTGKAGQQPARKRLNFGQTGDADSVPDPQPLGQPPAAPSGLGTNTMATGSGAPMADNNEGADGVGNSSGNWHCDSTWMGDRVITTSTRTWALPTYNNHLYKQISSQSGASNDNHYFGYSTPWGYFDFNRFHCHFSPRDWQRLINNNWGFRPKRLNFKLFNIQVKEVTQNDGTTTIANNLTSTVQVFTDSEYQLPYVLGSAHQGCLPPFPADVFMVPQYGYLTLNNGSQAVGRSSFYCLEYFPSQMLRTGNNFTFSYTFEDVPFHSSYAHSQSLDRLMNPLIDQYLYYLSKTNAPSGTTTMSRLQFSQAGASDIRDQSRNWLPGPCYRQQRVSKTAADNNNSDYSWTGATKYHLNGRDSLVSPGPAMASHKDDEEKYFPQSGVLIFGKQDSGKTNVDIEKVMITDEEEIRTTNPVATEQYGSVSTNLQSGNTQAATTDVNTQGVLPGMVWQDRDVYLQGPIWAKIPHTDGHFHPSPLMGGFGLKHPPPQILIKNTPVPANPSTTFSAAKFASFITQYSTGQVSVEIEWELQKENSKRWNPEIQYTSNYNKSVNVDFTVDTNGVYSEPRPIGTRYLTRNL

SEQ ID NO: 2424 - protein, 735 aa, synthetic construct
  REGION 1..735: note = source = /note="Description of Artificial Sequence: Synthetic polypeptide"
MAADGYLPDWLEDTLSEGIRQWWKLKPGPPPLKPAERHQDDSRGLVLPGYKYLGPFNGLDKGEPVNEADAAALEHDKAYDRQLDSGDNPYLKYNHADAEFQERLKEDTSFGGNLGRAVFQAKKRVLEPLGLVEEPVKTAPGKKRPVEHSPAEPDSSSGTGKAGQQPARKRLNFGQTGDADSVPDPQPLGQPPAAPSGLGTNTMATGSGAPMADNNEGADGVGNSSGNWHCDSTWMGDRVITTSTRTWALPTYNNHLYKQISSQSGASNDNHYFGYSTPWGYFDFNRFHCHFSPRDWQRLINNNWGFRPKRLNFKLFNIQVKEVTQNDGTTTIANNLTSTVQVFTDSEYQLPYVLGSAHQGCLPPFPADVFMVPQYGYLTLNNGSQAVGRSSFYCLEYFPSQMLRTGNNFTFSYTFEDVPFHSSYAHSQSLDRLMNPLIDQYLYYLSKTNAPSGTTTMSRLQFSQAGASDIRDQSRNWLPGPCYRQQRVSKTAADNNNSDYSWTGATKYHLNGRDSLVNPGPAMASHKDDEEKYFPQSGVLIFGKQDSGKTNVDIEKVMITDEEEIRTTNPVATEQYGSVSTNLQSGNTQAATTDVNTQGVLPGMVWQDRDVYLQGPIWAKIPHTDGHFHPSPLMGGFGLKHPPPQILIKNTPVPANPSTTFSAAKFASFITQYSTGQVSVGIEWELQKENSKRWNPEIQYTSNYNKSVNVDFTVDTNGVYSEPRPIGTRYLTRNL

SEQ ID NO: 2425 - protein, 735 aa, synthetic construct
  REGION 1..735: note = source = /note="Description of Artificial Sequence: Synthetic polypeptide"
MAADGYLPDWLEDTLSEGIRQWWKLKPGPPPPKPAERHQDDSRGLVLPGYKYLGPFNGLDKGEPVNEADAAALEHDKAYDRQLDSGDNPYLKYNHADAEFQERLKEDTSFGGNLGRAVFQAKKRVLEPLGLVEEPVKTAPGKKRPVEHSPAEPDSSSGTGKAGQQPARKRLNFGQTGDADSVPDPQPLGQPPAAPSGLGTNTMATGSGAPMADNNEGADGVGNSSGNWHCDSTWMGDRVITTSTRTWALPTYNNHLYKQISSQSGASNDNHYFGYSTPWGYFDFNRFHCHFSPRDWQRLINNNWGFRPKRLNFKLFNIQVKEVTQNDGTTTIANNLTSTVQVFTDSEYQLPYVLGSAHQGCLPPFPADVFMVPQYGYLTLNNGSQAVGRSSFYCLEYFPSQMLRTGNNFTFSYTFEDVPFHSSYAHSQSLDRLMNPLIDQYLYYLSKTNAPSGTTTMSRLQFSQAGASDIRDQSRNWLPGPCYRQQRVSKTAADNNNSDYSWTGATKYHLNGRDSLVNPGPAMASHKDDEEKYFPQSGVLIFGKQDSGKTNVDIEKVMITDEEEIRTTNPVATEQYGSVSTNLQSGNTQAATTDVNTQGVLPGMVWQDRDVCLQGPIWAKIPHTDGHFHPSPLMGGFGLKHPPPQILIKNTPVPANPSTTFSAAKFASFITQYSTGQVSVEIEWELQKENSKRWNPEIQYTSNYNKSVNVDFTVDTNGVYSEPRPIGTRYLTRNL

SEQ ID NO: 2426 - protein, 735 aa, synthetic construct
  REGION 1..735: note = source = /note="Description of Artificial Sequence: Synthetic polypeptide"
MAADGYLPDWLEDTLSEGIRQWWKLKPGPPPPKPAERHQDDSRGLVLPGYKYLGPFNGLDKGEPVNEADAAALEHDKAYDRQLDSGDNPYLKYNHADAEFQERLKEDTSFGGNLGRAVFQAKKRVLEPLGLVEEPVKTAPGKKRPVEHSPAEPDSSSGTGKAGQQPARKRLNFGQTGDADSVPDPQPLGQPPAAPSGLGTNTMATGSGAPMADNNEGADGVGNSSGNWHCDSTWMGDRVITTSTRTWALPTYNNHLYKQISSQSGASNDNHYFGYSTPWGYFDFNRFHCHFSPRDWQRLINNNWGFRPKRLNFKLFNIQVKEVAQNDGTTTIANNLTSTVQVFTDSEYQLPYVLGSAHQGCLPPFPADVFMVPQYGYLTLNNGSQAVGRSSFYCLEYFPSQMLRTGNNFTFSYTFEDVPFHSSYAHSQSLDRLMNPLIDQYLYYLSKTNAPSGTTTMSRLQFSQAGASDIRDQSRNWLPGPCYRQQRVSKTAADNNNSDYSWTGATKYHLNGRDSLVNPGPAMASHKDDEEKYFPQSGVLIFGKQDSGKTNVDIEKVMITDEEEIRTTNPVATEQYGSVSTNLQSGNTQAATTDVNTQGVLPGMVWQDRDVYLQGPIWAKIPHTDGHFHPSPLMGGFGLKHPPPQILIKNTPVPANPSTTFSAAKFASFITQYSTGQVSVEIEWELQKENSKRWNPEIQYTSNYNKSVNVDFTVDTNGVYSEPRPIGTRYLTRNL

SEQ ID NO: 2427 - protein, 735 aa, synthetic construct
  REGION 1..735: note = source = /note="Description of Artificial Sequence: Synthetic polypeptide"
MAADGYLPDWLEDTLSEGIRQWWKLKPGPPPPKPAERHKDDSRGLVLPGYKYLGPFNGLDKGEPVNEADAAALEHDKAYDRQLDSGDNPYLKYNHADAEFQERLKEDTSFGGNLARAVFQAKKRVLEPLGLVEEPVKTAPGKKRPVEHSPAEPDSSSGTGKSGQQPARKRLNFGQTGDADSVPDPQPLGQPPAAPSGLGTNTMASGSGAPMADNNEGADGVGNSSGNWHCDSTWMGDRVITTSTRTWALPTYNNHLYKQISSQSGASNDNHYFGYSTPWGYFDFNRFHCHFSPRDWQRLINNNWGFRPKRLNFKLFNIQVKEVTQNDGTTTIANNLTSTVQVFTDSEYQLPYVLGSAHQGCLPPFPADVFMVPQYGYLTLNNGSQAVGRSSFYCPEYLPSQMLRTGNNFTFSYTFEDVPFHSSYAHSQSLDRLMNPLIDQYLYYLSRTNTPSGTTTQSRLQFSQAGASDIRDQSRNWLPGPCYRQQRVSKTAADNNNSDYSWTGATKYHLNGRDSLVNPGTAMASHKDDEEKYFPQSGVLIFGKQDSGKTNVDIEKVMITDEEETRTTNPVATEQYGSVSTNLQSGNTQAATSDVNTQGVLPGMVWQDRDVYLQGPIWAKIPHTDGHFHPSPLMGGFGLKHPPPQILIKNTPVPANPSTAFSAAKFASFITQYSTGQVSVEIEWELQKENSERWNPEIQYTSNYNKSVNVDFTVDTNGVYSEPRPIGTRYLTRNL

SEQ ID NO: 2428 - protein, 735 aa, synthetic construct
  REGION 1..735: note = source = /note="Description of Artificial Sequence: Synthetic polypeptide"
MAADGYLPDWLEDTLSEGIRQWWKLKPGPPPPKPAERHKDDSRGLVLPGYKYLGPFNGLDKGEPVNEADAAALEHDKAYDRQLDSGDNPYLKYNHADAEFQERLKEDTSFGGNLARAVFQAKKRVLEPLGLVEEPVKTAPGKKRPVEHSPAEPDSSSGTGKSGQQPARKRLNFGQTGDADSVPDPQPLGQPPAAPSGLGTNTMASGSGAPMADNNEGADGVGNSSGNWHCDSTWMGDRVITTSTRTWALPTYNNHLYKQISSQSGASNDNHYFGYSTPWGYFDFNRFHCHFSPRDWQRLINNNWGFRPKRLNFKLFNIQVKEVTQNDGTTTIANNLTSTVQVFTDSEYQLPYVLGSAHQGCLPPFPADVLMVPQYGYLTLNNGSQAVGRSSFYCPEYLPSQMLRTGNNFTFSYTFEDVPFHSSYAHSQSLDRLMNPLIDQYLYYLSRTNTPSGTTTQSRLQFSQAGASDIRDQSRNWLPGPCYRQQRVSKTAADNNNSDYSWTGATKYHLNGRDSLVNPGTAMASHKDDEEKYFPQSGVLIFGKQDSGKTNVDIEKVMITDEEEIRTTNPVATEQYGSVSTNLQSGNTQAATSDVNTQGVLPGMVWQDRDVYLQGPIWAKIPHTDGHFHPSPLMGGFGLKHPPPQILIKNTPVPANPSTAFSAAKFASFITQYSTGQVSVEIEWELQKENSERWNPEIQYTSNYNKSVNVDFTADTNGVYSEPRPIGTRYLTRNL

SEQ ID NO: 2429 - protein, 735 aa, synthetic construct
  REGION 1..735: note = source = /note="Description of Artificial Sequence: Synthetic polypeptide"
MAADGYLPDWLEDTLSEGIRQWWKLKPGPPPPKPAERHKDDSRGLVLPGYKYLGPFNGLDKGEPVNEADAAALEHDKAYDRQLDSGDNPYLKYNHADAEFQERLKEDTSFGGNLARAVFQAKKRVLEPLGLVEEPVKTAPGKKRPVEHSPAEPDSSSGTGKSGQQPARKRLNFGQTGDADSVPDPQPLGQPPAAPSGLGTNTMASGSGAPMADNNEGADGVGNSSGNWHCDSTWMGDRVITTSTRAWALPTYNNHLYKQISSQSGASNDNHYFGYSTPWGYFDFNRFHCHFSPRDWQRLINNNWGFRPKRLNFKLFNIQVKEVTQNDGTTTIANNLTSTVQVFTDSEYQLPYVLGSAHQGCLPPFPADVLMVPQYGYLTLNNGSQAVGRSSFYCPEYLPSQMLRTGNNFTFSYTFEDVPFHSSYAHSQSLDRLMNPLIDQYLYYLSRTNTPSGTTTQSRLQFSQAGASDIRDQSRNWLPGPCYRQQRVSKTAADNNNSDYSWTGATKYHLNGRDSLVNPGTAMASHKDDEEKYFPQSGVLIFGKQDSGKTNVDIEKVMITDEEEIRTTNPVATEQYGSVSTNLQSGNTQAATSDVNTQGVLPGMVWQDRDVYLQGPIWAKIPHTDGHFHPSPLMGGFGLKHPPPQILIKNTPVPANPSTAFSAAKFASFITQYSTGQVSVEIEWELQKENSERWNPEIQYTSNYNKSVNVDFTVDTNGVYSEPRPIGTRYLTRNL

SEQ ID NO: 2430 - protein, 735 aa, synthetic construct
  REGION 1..735: note = source = /note="Description of Artificial Sequence: Synthetic polypeptide"
MAADGYLPDWLEDTLSEGIRQWWKLKPGPPPPKPAERHKDDSRGLVLPGYKYLGPFNGLDKGEPVNEADAAALEHDKAYDRQLDSGDNPYLKYNHADAEFQERLKEDTSFGGNLARAVFQAKKRVLEPLGLVEEPVKTAPGKKRPVEHSPAEPDSSSGTGKSGQQPARKRLNFGQTGDADSVPDPQPLGQPPAAPSGLGTNTMASGSGAPMADNNEGADGVGNSSGNWHCDSTWMGDRVITTSTRTWALPTYNNHLYKQISSQSGASNDNHYFGYSTPWGYFDFNRFHCHFSPRDWQRLINNNWGFRPKRLNFKLFNIQVKEVTQNDGTTTIANNLTSTVQVFTDSEYQLPYVLGSAHQGCLPPFPADVFMVPQYGYLTLNNGSQAVGRSSFYCPEYLPSQMLRTGNNFTFSYTFEDVPFHSSYAHSQSLDRLMNPLIDQYLYYLSRTNTPSGTTTQSRLQFSQAGASDIRDQSRNWLPGPCYRQQRVSKTAADNNNSDYSWTGATKYHLNGRDSLVNPGTATASHKDDEEKYFPQSGVLIFGKQDSGKTNVDIEKVMITDEEEIRTTNPVATEQYGSVSTNLQSGNTQAATSDVNTQGVLPGMVWQDRDVYLQGPIWAKIPHTDGHFHPSPLMGGFGLKHPPPQILIKNTPVPANPSTAFSAAKFASFITQYSTGQVSVEIEWELQKENSERWNPEIQYTSNYNKSVNVDFTVDTNGVYSEPRPIGTRYLTRNL

SEQ ID NO: 2431 - protein, 734 aa, synthetic construct
  REGION 1..734: note = source = /note="Description of Artificial Sequence: Synthetic polypeptide"
MAADGYLPDWLEDTLSEGIRQWWKLKPGPPPPKPAERHKDDSRGLVLPGYKYLGPFNGLDKGEPVNEADAAALEHDKAYDRQLDSGDNPYLKYNHADAEFQERLKEDTSFGGNLARAVFQAKKRVLEPLGLVEEPVKTAPGKKRPVEHSPAEPDSSSGTGKSGQQPARKRLNFGQTGDADSVPDPQPLGQPPAAPSGLGTNTMASGSGAPMADNNEGADGVGNSSGNWHCDSTWMGDRVITTSTRTWALPTYNNHLYKQISSQSGASNDNHYFGYSTPWGYFDFNRFHCHFSPRDWQRLINNNWGFRPKRLNFKLFNIQVKEVTQNDGTTTIANNLTSTVQVFTDSEYQLPYVLGSAHQGCLPPFPADVFMVPQYGYLTLNNGSQAVGRSSFYCPEYLPSQMLRTGNNFTFSYTFEDVPFHSSYAHSQSLDRLMNPLIDQYLYYLSRTNTPSGTTTQSRLQFSQAGASDIRDQSRNWLPGPCYRQQRVSKTAADNNSDYSWTGATKYHLNGRDSLVNPGTAMASHKDDEEKYFPQSGVLIFGKQDSGKTNVDIEKVMITDEEEIRTTNPVATEQYGSVSTNLQSGNTQAATSDVNTQGVLPGMVWQDRDVYLQGPIWAKIPHTDGHFHPSPLMGGFGLKHPPPQILIKNTPVPANPSTAFSAAKFASFITQYSTGQVSVEIEWELQKENSERWNPEIQYTSNYNKSVNVDFTVDTNGVYSEPRPIGTRYLTRNL

SEQ ID NO: 2432 - protein, 735 aa, synthetic construct
  REGION 1..735: note = source = /note="Description of Artificial Sequence: Synthetic polypeptide"
MAADGYLPDWLEDTLSEGIRQWWKLKPGPPPPKPAERHKDDSRGLVLPGYKYLGPFNGLDKGEPVNEADAAALEHDKAYDRQLDSGDNPYLKYNHADAEFQERLKEDTSFGGNLARAVFQAKKRVLDPLGLVEEPVKTAPGKKRPVEHSPAEPDSSSGTGKSGQQPARKRLNFGQTGDADSVPDPQPLGQPPAAPSGLGTNTMASGSGAPMADNNEGADGVGNSSGNWHCDSTWMGDRVITTSTRTWALPTYNNHLYKQISSQSGASNDNHYFGYSTPWGYFDFNRFHCHFSPRDWQRLINNNWGFRPKRLNFKLFNIQVKEVTQNDGTTTIANNLTSTVQVFTDSEYQLPYVLGSAHQGCLPPFPADVFMVPQYGYLTLNNGSQAVGRSSFYCPEYLPSQMLRTGNNFTFSYTFEDVPFHSSYAHSQSLDRLMNPLIDQYLYYLSRTNTPSGTTTQSRLQFSQAGASDIRDQSRNWLPGPCYRQQRVSKTAADNNNSDYSWTGATKYHLNGRDSLVNPGTAMASHKDDEEKYFPQSGVLIFGKQDSGKTNVDIEKVMITDEEEIRTTNPVATEQYGSVSTNLQSGNTQAATSDVNTQGVLPGMVWQDRDVYLQGPIWAKIPHTDGHFHPSPLMGGFGLKHPPPQILIKNTPVPANPSTAFSAAKFASFITQYSTGQVSVEIEWELQKENSERWNPEIQYTSNYNKSVNVDFTVDTNGVYSEPRPIGTRYLTRNL

SEQ ID NO: 2433 - protein, 735 aa, synthetic construct
  REGION 1..735: note = source = /note="Description of Artificial Sequence: Synthetic polypeptide"
MAADGYLPDWLEDTLSEGIRQWWKLKPGPPPPKPAERHKDDSRGLVLPGYKYLGPFNGLDKGEPVNEADAAALEHDKAYDRQLDSGDNPYLKYNHADAEFQERLKEDTSFGGNLARAVFQAKKRVLEPLGLVEEPVKTAPGKKRPVEHSPAEPDSSSGTGKSGQQPARKRLNFGQTGDADSVPDPQPLGQPPAAPSGLGTNTMASGSGAPMADNNEGADGVGNSSGNWHCDSTWMGDRVITTSTRTWALPTYNNHLYKQISSQSGASNDNHYFGYSTPWGYFDFNRFHCHFSPRDWQRLINNNWGFRPKRLNFKLFNIQVKEVTQNDGTTTIANNLTSTVQVFTDSEYQLPYVLGSAHQGCLPPFPADVFMVPQYGYLTLNNGSQAVGRSSFYCPEYLPSQMLRTGNNFTFSYTFEDVPFHSSYAHSQSLDRLMNPLIDQYLYYLSRTNTPSGTTTQSRLQFSQAGASDIRDQSRNWLPGPCYRQQRVSKTAADNNNSDYSWTGATKYHLNGRDSLVNPGTAMASHKDDEEKYFPQSGVLIFRKQDSGKTNVDIEKVMITDEEEIRTTNPVATEQYGSVSTNLQSGNTQAATSDVNTQGVLPGMVWQDRDVYLQGPIWAKIPHTDGHFHPSPLMGGFGLKHPPPQILIKNTPVPANPSTAFSAAKFASFITQYSTGQVSVEIEWELQKENSERWNPEIQYTSNYNKSVNVDFTVDTNGVYSEPRPIGTRYLTRNL

SEQ ID NO: 2434 - protein, 735 aa, synthetic construct
  REGION 1..735: note = source = /note="Description of Artificial Sequence: Synthetic polypeptide"
MAADGYLPDWLEDTLSEGIRQWWKLKPGPPPPKPAERHKDDSRGLVLPGYKYLGPFNGLDKGEPVNEADAAALEHDKAYDRQLDSGDNPYLKYNHADAEFQERLKEDTSFGGNLARAVFQAKKRVLEPLGLVEEPVKTAPGKKRPVEHSPAEPDSSSGTGKSGQQPARKRLNFGQTGDADSVPDPQPLGQPPAAPSGLGTNTMASGSGAPMADNNEGADGVGNSSGNWHCDSTWMGDRVITTSTRTWALPTYNNHLYKQISSQSGASNDNHYFGYSTPWGYFDFNRFHCHFSPRDWQRLINNNWGFRPKRLNFKLFNIQVKEVTQNDGTTTIANNLTSTVQVFTDSEYQLPYVLGSAHQGCLPPFPADVLMVPQYGYLTLNNGSQAVGRSSFYCPEYLPSQMLRTGNNFTFSYTFEDVPFHSSYAHSQSLDRLMNPLIDQYLYYLSRTNTPSGTTTQSRLQFSQAGASDIRDQSRNWLPGPCYRQQRVSKTAADNNNSDYSWTGATKYHLNGRDSLVNPGTAMASHKDDEEKYFPQSGVLIFRKQDSGKTNVDIEKVMITDEEEIRTTNPVATEQYGSVSTNLQSGNTQAATSDVNTQGVLPGMVWQDRDVYLQGPIWAKIPHTDGHFHPSPLMGGFGLKHPPPQILIKNTPVPANPSTAFSAAKFASFITQYSTGQVSVEIEWELQKENSERWNPEIQYTSNYNKSVNVDFTVDTNGVYSEPRPIGTRYLTRNL

SEQ ID NO: 2435 - protein, 735 aa, synthetic construct
  REGION 1..735: note = source = /note="Description of Artificial Sequence: Synthetic polypeptide"
MAADGYLPDWLEDTLSEGIRQWWKLKPGPPPPKPAERHKDDSRGLVLPGYKYLGPFNGLDKGEPVNEADAAALEHDKAYDRQLDSGDNPYLKYNHADAEFQERLKEDTSFGGNLARAVFQAKKRVLEPLGLVEEPVKTAPGKKRPVEHSPAEPDSSSGTGKSGQQPARKRLNFGQTGDADSVPDPQPLGQPPAAPSGLGTNTMASGSGAPMADNNEGADGVGNSSGNWHCDSTWMGDRVITTSTRTWALPTYNNHLYKQISSQSGASNDNHYFGYSTPWGYFDFNRFHCHFSPRDWQRLINNNWGFRPKRLNFKLFNIQVKEVTQNDGTTTIANNLTSTVQVFTDSEYQLPYVLGSAHQGCLPPFPADVLMVPQYGYLTLNNGSQAVGRSSFYCPEYLPSQMLRTGNNFTFSYTFEDVPFHSSYAHSQSLDRLMNPLIDQYLYYLSRTNTPSGTTTQSRLQFSQAGASDIRDQSRNWLPGPCYRQQRVSKTAADNNNSDYSWTGATKYHLNGRDSLVNPGTAMASHKDDEEKYFPQSGVLIFGKQDSGKTNVDIEKVMITDEEEIRTTNPVATEQYGSVSTNLQSGNTQAATSDVNTQGVLPGMVWQDRDVYLQGPIWAKIPHTDGHFHPSPLMGGFGLKHPPPQILIKNTPVPANPSTAFSAAKFASFITQYSTGQVSVEIEWELQKENSERWNPEIQYTSNYNKSVNVDFTVDTNGVYSEPRPIGTRYLTRNL

SEQ ID NO: 2436 - protein, 735 aa, synthetic construct
  REGION 1..735: note = source = /note="Description of Artificial Sequence: Synthetic polypeptide"
MAADGYLPDWLEDTLSEGIRQWWKLKPGPPPPKPAERHKDDSRGLVLPGYKYLGPFNGLDKGEPVNEADAAALEHDKAYDRQLDSGDNPYLKYNHADAEFQERLKEDTSFGGNLARAVFQAKKRVLEPLGLVEEPVKTAPGKKRPVEHSPAEPDSSSGTGKSGQQPARKRLNFGQTGDADSVPDPQPLGQPPAAPSGLGTNTMASGSGAPMADNNEGADGVGNSSGNWHCDSTWMGDRVITTSTRTWALPTYNNHLYKQISSQSGASNDNHYFGYSTPWGYFDFNRFHCHFSPRDWQRLINNNWGFRPKRLNFKLFNIQVKEVTQNDGTTTIANNLTSTVQVFTDSEYQLPYVLGSAHQGCLPPFPADVFMVPQYGYLTLNNGSQAVGRSSFYCPEYLPSQMLRTGNNFTFSYTFEDVPFHSSYAHSQSLDRLMNPLIDQYLYYLSRTNTPSGTTTQSRLQFSQAGASDIRDQSRNWLPGPCYRQQRVSKTAADNNNSDYSWTGATKYHLNGRDSLVNPGTAMASHKDDEEKYFPQSGVLIFGKQDSGKTNVDIEKVMITDEEEIRTTNPVATEQYGSVSTNLQSGNTQAATSDVNTQGVLPGMVWQDRDVYLQGPIWAKIPHTDGHFHPSPLMGGFGLKHPPPQILIKNTPVPANPSTAFSAAKFASFITQYSTGQVSVEIEWELQKENSERWNPEIQYTSNYNKSVNVDFTVDTNGVYSEPRPIGTRYLTRNL

SEQ ID NO: 2437 - protein, 735 aa, synthetic construct
  REGION 1..735: note = source = /note="Description of Artificial Sequence: Synthetic polypeptide"
MAADGYLPDWLEDTLSEGIRQWWKLKPGPPPPKPAERHKDDSRGLVLPGYKYLGPFNGLDKGEPVNEADAAALEHDKAYDRQLDSGDNPYLKYNHADAEFQERLKEDTSFGGNLARAVFQAKKRVLEPLGLVEEPVKTAPGKKRPVEHSPAEPDSSSGTGKSGQQPARKRLNFGQTGDADSVPDPQPLGQPPAAPSGLGTNTMASGSGAPMADNNEGADGVGNSSGNWHCDSTWMGDRVITTSTRTWALPTYNNHLYKQISSQSGASNDNHYFGYSTPWGYFDFNRFHCHFSPRDWQRLINNNWGFRPKRLNFKLFNIQVKEVTQNDGTTTIANNLTSTVQVFTDSEYQLPYVLGSAHQGCLPPFPADVLMVPQYGYLTLNNGSQAVGRSSFYCPEYLPSQMLRTGNNFTFSYTFEDVPFHSSYAHSQSLDRLMNPLIDQYLYYLSRTNTPSGTTTQSRLQFSQAGASDIRDQSRNWLPGPCYRQQRVSKTAADNNNSDYSWTGATKYHLNGRDSLVNPGTATASHKDDEEKYFPQSGVLIFGKQDSGKTNVDIEKVMITDEEEIRTTNPVATEQYGSVSTNLQSGNTQAATSDVNTQGVLPGMVWQDRDVYLQGPIWAKIPHTDGHFHPSPLMGGFGLKHPPPQILIKNTPVPANPSTAFSAAKFASFITQYSTGQVSVEIEWELQKENSERWNPEIQYTSNYNKSVNVDFTVDTNGVYSEPRPIGTRYLTRNL

SEQ ID NO: 2438 - protein, 735 aa, synthetic construct
  REGION 1..735: note = source = /note="Description of Artificial Sequence: Synthetic polypeptide"
MAADGYLPDWLEDTLSEGIRQWWKLKPGPPPPKPAERHKDDSRGLVLPGYKYLGPFNGLDKGEPVNEADAAALEHDKAYDRQLDSGDNPYLKYNHADAEFQERLKEDTSFGGNLARAVFQAKKRVLEPLGLVEEPVKTAPGKKRPVEHSPAEPDSSSGTGKSGQQPARKRLNFGQTGDADSVPDPQPLGQPPAAPSGLGTNTMASGSGAPMADNNEGADGVGNSSGNWHCDSTWMGDRVITTSTRTWALPTYNNHLYKQISSQSGASNDNHYFGYSTPWGYFDFNRFHCHFSPRDWQRLINNNWGFRPKRLNFKLFNIQVKEVTQNDGTTTIANNLTSTVQVFTDSEYQLPYVLGSAHQGCLPPFPADVFMVPQYGYLTLNNGSQAVGRSSFYCPEYLPSQMLRTGNNFTFSYTFEDVPFHSSYAHSQSLDRLMNPLIDQYLYYLSRTNTPSGTTTQSRLQFSQAGASDIRDQSRNWLPGPCYRQQRVSKTAADNNNSDYSWTGATKYHLNGRDSLVNPGTAMASHKDDGEKYFPQSGVLIFGKQDSGKTNVDIEKVMITDEEEIRTTNPVATEQYGSVSTNLQSGNTQAATSDVNTQGVLPGMVWQDRDVYLQGPIWAKIPHTDGHFHPSPLMGGFGLKHPPPQILIKNTPVPANPSTAFSAAKFASFITQYSTGQVSVEIEWELQKENSERWNPEIQYTSNYNKSVNVDLTVDTNGVYSEPRPIGTRYLTRNL

SEQ ID NO: 2439 - protein, 735 aa, synthetic construct
  REGION 1..735: note = source = /note="Description of Artificial Sequence: Synthetic polypeptide"
MAADGYLPDWLEDTLSEGIRQWWKLKPGPPPPKPAERHKDDSRGLVLPGYKYLGPFNGLDKGEPVNEADAAALEHDKAYDRQLDSGDNPYLKYNHADAEFQERLKEDTSFGGNLARAVFQAKKRVLEPLGLVEEPVKTAPGKKGPVEHSPAEPDSSSGTGKSGQQPARKRLNFGQTGDADSVPDPQPLGQPPAAPSGLGTNTMASGSGAPMADNNEGADGVGNSSGNWHCDSTWMGDRVITTSTRTWALPTYNNHLYKQISSQSGASNDNHYFGYSTPWGYFDFNRFHCHFSPRDWQRLINNNWGFRPKRLNFKLFNIQVKEVTQNDGTTTIANNLTSTVQVFTDSEYQLPYVLGSAHQGCLPPFPADVFMVPQYGYLTLNNGSQAVGRSSFYCLEYFPSQMLRTGNNFTFSYTFEDVPFHSSYAHSQSLDRLMNPLIDQYLYYLSRTNTPSGTTTQSRLRFSQAGASDIRDQSRNWLPGPCYRQQRVSKTAADNNNSDYSWTGATKYHLNGRDSLVNPGTAMASHKDDEEKYFPQSGVLIFGKQDSGKTNVDIERVMITDEEEIRTTNPVATEQYGSVSTNLQSGNTQAATSDVNTQGVLPGMVWQDRDVYLQGPIWAKIPHTDGHFHPSPLMGGFGLKHPPPQILIKNTPVPANPSTTFSAAKFASFITQYSTGQVSVEIEWELQKENSKRWNPEIQYTSNYNKSVNVDFTVDTNGVYSEPRPIGTRYLTRNL

SEQ ID NO: 2440 - protein, 735 aa, synthetic construct
  REGION 1..735: note = source = /note="Description of Artificial Sequence: Synthetic polypeptide"
MAADGYLPDWLEDTLSEGIRQWWKLKPGPPPPKPAERHKDDSRGLVLPGYKYLGPFNGLDKGEPVNEADAAALEHDKAYDRQLDSGDNPYLKYNHADAEFQERLKEDTSFGGNLARAVFQAKKRVLEPLGLVEEPVKTAPGKKRPVEHSPAGPDSSSGTGKSGQQPARKRLNFGQTGDADSVPDPQPLGQPPAAPSGLGTNTMASGSGAPMADNNEGADGVGNSSGNWHCDSTWMGDRVITTSTRTWALPTYNNHLYKQISSQSGASNDNHYFGYSTPWGYFDFNRFHCHFSPRDWQRLINNNWGFRPKRLNFELFNIQVKEVTQNDGTTTIANNLTSTVQVFTDSEYQLPYVLGSAHQGCLPPFPADVFMVPQYGYLTLNNGSQAVGRSSFYCLEYFPSQMLRTGNNFTFSYTFEDVPFHSSYAHSQSLDRLMNPLIDQYLYYLSRTNTPSGTTTQSRLQFSQAGASDIRDQSRNWLPGPCYRQQRVSKTAADNNNSDYSWTGATKYHLNGRDSLVNPGTAMASHKDDEEKYFPQSGVLIFGKQDSGKTNVDIEKVMITDEEEIRTTNPVATEQYGSVSTNLQSGNTQAATSDVNTQGVLPGMVWQDRDVYLQGPIWAKIPHTDGHFHPSPLMGGFGLKHPPPQILIKSTPVPANPSTTFSAAKFASFITQYSTGQVSVEIEWELQKENSKRWNPEIQYTSNYNKSVNVDFTVDTNGVYSDPRPIGTRYLTRNL

SEQ ID NO: 2441 - protein, 735 aa, synthetic construct
  REGION 1..735: note = source = /note="Description of Artificial Sequence: Synthetic polypeptide"
MAADGYLPDWLEDTLSEGIRQWWKLKPGPPPPRPAERHQDDSRGLVLPGYKYLGPFNGLDKGEPVNEADAAALEHDKAYDRQLDSGDNPYLKYNHADAEFQERLKEDTSFGGNLGRAVFQAKKRVLEPLGLVEEPVKTAPGKKRPVEHSPAEPDSSSGTGKAGQQPARKRLNFGQTGDADSVPDPQPLGQPPAAPTSLGSTTMATGSGAPMADNNEGADGVGNSSGNWHCDSQWLGDRVITTSTRTWALPTYNNHLYKQISSQSGASNDNHYFGYSTPWGYFDFNRFHCHFSPRDWQRLINNNWGFRPKRLNFKLFNIQVKEVTQNDGTTTIANNLTSTVQVFTDSEYQLPYVLGSAHQGCLPPFPADVFMVPQYGYLTLNNGSQAVGRSSFYCLEYFPSQMLRTGNNFTFSYTFEDVPFHSSYAHSQSLDRLMNPLIDQYLYYLSRTNTPSGTTTQSRLRFSQAGASDIRDQSRNWLPGPCYRQQRVSKTAADNNNSDYSWTGATKYHLNGRDSLVNPGTAMASHKDDEEKYFPQSGVLIFGKQDSGKTNVDIERVMITDEEEIRTTNPVATEQYGSVSTNLQSGNTQAATSDVNTQGVLPGMVWQDRDVYLQGPIWAKIPHTDGHFHPSPLMGGFGLKHPPPQILIKNTPVPANPSTTFSAAKFASFITQYSTGQVSVEIEWELQKENSKRWNPEIQYTSNYNKSVNVDFTVDTNGVYSEPRPIGTRYLTRNL

SEQ ID NO: 2442 - protein, 735 aa, synthetic construct
  REGION 1..735: note = source = /note="Description of Artificial Sequence: Synthetic polypeptide"
MAADGYLPDWLEDTLSEGIRQWWKLKPGPPPPRPAERHQDDSRGLVLPGYKYLGPFNGLDKGEPVNEADAAALEHDKAYDRQLDSGDNPYLKYNHADAEFQERLKEDTSFGGNLGRAVFQAKKRVLEPLGLVEEPVKTAPGKKRPVEHSPAEPDSSSGTGKAGQQPARKRLNFGQTGDADSVPDPQPLGQPPAAPSGLGTNTMASGSGAPMADNNEGADGVGNSSGNWHCDSTWMGDRVITTSTRTWALPTYNNHLYKQISSQSGASNDNHYFGYSTPWGYFDFNRFHCHFSPRDWQRLINNNWGFRPKRLNFKLFNIQVKEVTQNDGTTTIANNLTSTVQVFTDSEYQLPYVLGSAHQGCLPPFPADVFMVPQYGYLTLNNGSQAVGRSSFYCLEYFPSQMLRTGNNFTFSYTFEDVPFHSSYAHSQSLDRLMNPLIDQYLYYLSRTNTPSGTTTQSRLRFSQAGASDIRDQSRNWLPGPCYRQQRVSKTAADNNNSDYSWTGATKYHLNGRDSLVNPGTAMASHKDDEEKYFPQSGVLIFGKQDSGKTNVDIERVMITDEEEIRTTNPVATEQYGSVSTNLQSGNTQAATSDVNTQGVLPGMVWQDRDVYLQGPIWAKIPHTDGHFHPSPLMGGFGLKHPPPQILIKNTPVPANPSTTFSAAKFASFITQYSTGQVSVEIEWELQKENSKRWNPEIQYTSNYNKSVNVDFTVDTNGVYSEPRPIGTRYLTRNL

SEQ ID NO: 2443 - protein, 735 aa, synthetic construct
  REGION 1..735: note = source = /note="Description of Artificial Sequence: Synthetic polypeptide"
MAADGYLPDWLEDTLSEGIRQWWKLKPGPPPPKPAERHKDDSRGLVLPGYKYLGPFNGLDKGEPVNEADAAALEHDKAYDRQLDSGDNPYLKYNHADAEFQERLKEDTSFGGNLARAVFQAKKRVLEPLGLVEEPVKTAPGKKRPVEHSPAGPDSSSGTGKSGQQPARKRLNFGQTGDADSVPDPQPLGQPPAAPSGLGTNTMASGSGAPMADNNEGADGVGNSSGNWHCDSTWMGDRVITTSTRTWALPTYNNHLYKQISSQSGASNDNHYFGYSTPWGYFDFNRFHCHFSPRDWQRLINNNWGFRPKRLNFELFNIQVKEVTQNDGTTTIANNLTSTVQVFTDSEYQLPYVLGSAHQGCLPPFPADVFMVPQYGYLTLNNGSQAVGRSSFYCLEYFPSQMLRTGNNFTFSYTFEDVPFHSSYAHSQSLDRLMNPLIDQYLYYLSRTNTPSGTTTQSRLQFPQAGASDIRDQSRNWLPGPCYRQQRVSKTAADNNNSDYSWTGATKYHLNGRDSLVNPGTAMASHKDDEEKYFPQSGVLIFGKQDSGKTNVDIEKVMITDEEEIRTTNPVATEQYGSVSTNLQSGNTQAATSDVNTQGVLPGMVWQDRDVYLQGPIWAKIPHTDGHFHPSPLMGGFGLKHPPPQILIKSTPVPANPSTTFSAAKFASFITQYSTGQVSVEIEWELQKENSKRWNPEIQYTSNYNKSVNVDFTVDTNGVYSEPRPIGTRYLTRNL

SEQ ID NO: 2444 - protein, 735 aa, synthetic construct
  REGION 1..735: note = source = /note="Description of Artificial Sequence: Synthetic polypeptide"
MAADGYLPDWLEDTLSEGIRQWWKLKPGPPPPRPAERHQDDSRGLVLPGYKYLGPFNGLDKGEPVNEADAAALEHDKAYDRQLDSGDNPYLKYNHADAEFQERLKEDTSFGGNLGRAVFQAKKRVLEPLGLVEEPVKTAPGKKRPVEHSPAEPDSSSGTGKSGQQPARKRLNFGQTGDADSVPDPQPLGQPPAAPSGLGTNTMASGSGAPMADNNEGADGVGNSSGNWHCDSTWMGDRVITTSTRTWALPTYNNHLYKQISSQSGASNDNHYFGYSTPWGYFDFNRFHCHFSPRDWQRLINNNWGFRPKRLNFKLFNIQVKEVTQNDGTTTIANNLTSTVQVFTDSEYQLPYVLGSAHQGCLPPFPADVFMVPQYGYLTLNNGSQAVGRSSFYCLEYFPSQMLRTGNNFTFSYTFEDVPFHSSYAHSQSLDRLMNPLIDQYLYYLSRTNTPSGTTTQSRLRFSQAGASDIRDQSRNWLPGPCYRQQRVSKTAADNNNSDYSWTGATKYHLNGRDSLVNPGTAMASHKDDEEKYFPQSGVLIFGKQDSGKTNVDIERVMITDEEEIRTTNPVATEQYGSVSTNLQSGNTQAATSDVNTQGVLPGMVWQDRDVYLQGPIWAKIPHTDGHFHPSPLMGGFGLKHPPPQILIKNTPVPANPSTTFSAAKFASFITQYSTGQVSVEIEWELQKENSKRWNPEIQYTSNYNKSVNVDFTVDTNGVYSEPRPIGTRYLTRNL

SEQ ID NO: 2445 - protein, 735 aa, synthetic construct
  REGION 1..735: note = source = /note="Description of Artificial Sequence: Synthetic polypeptide"
MAADGYLPDWLEDTLSEGIRQWWKLKPGPPPPKPAERHKDDSRGLVLPGYKYLGPFNGLDKGEPVNEADAAALEHDKAYDRQLDSGDNPYLKYNHADAEFQERLKEDTSFGGNLARAVFQAKKRVLEPLGLVEEPVKTAPGKKRPVEHSPAEPDSSSGTGKSGQQPARKRLNFGQTGDADSVPDPQPLGQPPAAPSGLGTNTMASGSGAPMADNNEGADGVGNSSGNWHCDSTWMGDRVITTSTRTWALPTYNNHLYKQISSQSGASNDNHYFGYSTPWGYFDFNRFHCHFSPRDWQRLINNNWGFRPKRLNFKLFNIQVKEVTQNDGTTTIANNLTSTVQVFTDSEYQLPYVLGSAHQGCLPPFPADVFMVPQYGYLTLNNGSQAVGRSSFYCLEYFPSQMLRTGNNFTFSYTFEDVPFHSSYAHSQSLDRLMNPLIDQYLYYLSRTNTPSGTTTQSRLRFSQAGASDIRDQSRNWLPGPCYRQQRVSKTAADNNNSDYSWTGATKYHLNGRDSLVNPGTAMASHKDDEEKYFPQSGVLIFGKQDSGKTNVDIERVMITDEEEIRTTNPVATEQYGSVSTNLQSGNTQAATSDVNTQGVLPGMVWQDRDVYLQGPIWAKIPHTDGHFHPSPLMGGFGLKHPPPQILIKNTPVPANPSTTFSAAKFASFITQYSTGQVSVEIEWELQKENSKRWNPEIQYTSNYNKSVNVDFTVDTNGVYSEPRPIGTRYLTRNL

SEQ ID NO: 2446 - protein, 735 aa, synthetic construct
  REGION 1..735: note = source = /note="Description of Artificial Sequence: Synthetic polypeptide"
MAADGYLPDWLEDTLSEGIRQWWKLKPGPPPPKPAERHKDDSRGLVLPGYKYLGPFNGLDKGEPVNEADAAALEHDKAYDRQLDSGDNPYLKYNHADAEFQERLKEDTSFGGNLARAVFQAKKRVLEPLGLVEEPVKTAPGKKRPVEHSPAEPDSSSGTGKSGQQPARKRLNFGQTGDADSVPDPQPLGQPPAAPSGLGTNTMASGSGAPMADNNEGADGVGNSSGNWHCDSTWMGDRVITTSTRTWALPTYNNHLYKQISSQSGASNDNHYFGYSTPWGYFDFNRFHCHFSPRDWQRLINNNWGFRPKRLNFKLFNIQVKEVTQNDGTTTIANNLTSTVQVFTDSEYQLPYVLGSAHQGCLPPFPADVFMVPQYGYLTLNNGSQTVGRSSFYCLEYFPSQMLRTGNNFTFSYTFEDVPFHSSYAHSQSLDRLMNPLIDQYLYYLSRTNTPSGTTTQSRLRFSQAGASDIRDQSRNWLPGPCYRQQRVSKTAADNNNSDYSWTGATKYHLNGRDSLVNPGTAMASHKDDEEKYFPQSGVLIFGKQDSGKTNVDIERVMITDEEEIRTTNPVATEQYGSVSTNLQSGNTQAATSDVNTQGVLPGMVWQDRDVYLQGPIWAKIPHTDGHFHPSPLMGGFGLKHPPPQILIKNTPVPANPSTTFSAAKFASFITQYSTGQVSVEIEWELQKENSKRWNPEIQYTSNYNKSVNVDFTVDTNGVYSEPRPIGTRYLTRNL

SEQ ID NO: 2447 - protein, 735 aa, synthetic construct
  REGION 1..735: note = source = /note="Description of Artificial Sequence: Synthetic polypeptide"
MAADGYLPDWLEDTLSEGIRQWWKLKPGPPPPKPAERHKDDSRGLVLPGYKYLGPFNGLDKGEPVNEADAAALEHDKAYDRQLDSGDNPYLKYNHADAEFQERLKEDTSFGGNLARAVFQAKKRVLEPLGLVEEPVKTAPGKKRPVEHSPAEPDSSSGTGKSGQQPARKRLNFGQTGDADSVPDPQPLGQPPAAPSGLGTNTMASGSGAPMADNNEGADGVGNSSGNWHCDSTWMGDRVIPTSTRTWALPTYNNHLYKQISSQSGASNDNHYFGYSTPWGYFDFNRFHCHFSPRDWQRLINNNWGFRPKRLNFKLFNIQVKEVTQNDGTTTIANNLTSTVQVFTDSGYQLPYVLGSAHQGCLPPFPADVFMVPQYGYLTLNNGSQAVGRSSFYCLEYFPSQMLRTGNNFTFSYTFEDVPFHSSYAHSQSLDRLMNPLIDQYLYYLSRTNTPSGTTTQSRLRFSQAGASDIRDQSRNWLPGPCYRQQRVSKTAADNNNSDYSWTGATKYHLNGRDSLVNPGTAMASHKDDEEKYFPQSGVLIFGKQDSGKTNVDIERVMITDEEEIRTTNPVATEQYGSVSTNLQSGNTQAATSDVNTQGVLPGMVWQDRDVYLQGPIWAKIPHTDGHFHPSPLMGGFGLKHPPPQILIKNTPVPANPSTTFSAAKFASFITQYSTGQVSVEIEWELQKENSKRWNPEIQYTSNYNKSVNVDFTVDTNGVYSEPRPIGTRYLTRNL

SEQ ID NO: 2448 - protein, 735 aa, synthetic construct
  REGION 1..735: note = source = /note="Description of Artificial Sequence: Synthetic polypeptide"
MAADGYLPDWLEDTLSEGIRQWWKLKPGPPPPKPAERHKDDSRGLVLPGYKYLGPFNGLDKGEPVNEADAAALEHDKAYDRQLDSGDNPYLKYNHADAEFQERLKEDTSFGGNLARAVFQAKKRVLEPLGLVEEPVKTAPGKKRPVEHSPAEPDSSSGTGKSGQQPARKRLNFGQTGDADSVPDPQPLGQPPAAPSGLGTNTMASGSGAPMADNNEGADGVGNSSGNWHCDSTWMGDRVITTSTRTWALPTYNNHLYKQISSQSGASNDNHYFGYSTPWGYFDFNRFHCHFSPRDWQRLINNNWGFRPKRLNFKLFNIQVKEVTQNDGTTTIANNLTSTVQVFTDSEYQLPYVLGSAHQGCLPPFPADVFMVPQYGYLTLNNGSQAVGRSSFYCLEYFPSQMLRTGNNFTFSYTFEDVPFHSSYAHSQSLDRLMNPLIDQYLYYLSRTNTPSGTTTQSRLRFSQAGASDIRDQSRNWLPGPCYRQQRVSKTAADNNNSDYSWTGATKYHLNGRDSLVNPGTAMASHKDDEEKYFPQSGVLIFGKQDSGKTNVDIERVMITDEEEIRTTNPVATEQYGSVSTNLQSGDTQAATSDVNTQGVLPGMVWQDRDVYLQGPIWAKIPHTDGHFHPSPLMGGFGLKHPPPQILIKNTPVPANPSTTFSAAKFASFITQYSTGQVSVEIEWELQKENSKRWNPEIQYTSNYNKSVNVDFTVDTNGVYSEPRPIGTRYLTRNL

SEQ ID NO: 2449 - protein, 734 aa, synthetic construct
  REGION 1..734: note = source = /note="Description of Artificial Sequence: Synthetic polypeptide"
MAADGYLPDWLEDTLSEGIRQWWKLKPGPPPPKPAERHKDDSRGLVLPGYKYLGPFNGLDKGEPVNEADAAALEHDKAYDRQLDSGDNPYLKYNHADAEFQERLKEDTSFGGNLARAVFQAKKRVLEPLGLVEEPVKTAPGKKRPVEHSPAEPDSSSGTGKSGQQPARKRLNFGQTGDADSVPDPQPLGQPPAAPSGLGTNTMASGSGAPMADNNEGADGVGNSSGNWHCDSTWMGDRVITTSTRTWALPTYNNHLYKQISSQSGASNDNHYFGYSTPWGYFDFNRFHCHFSPRDWQRLINNNWGFRPKRLNFKLFNIQVKEVTQNDGTTTIANNLTSTVQVFTDSEYQLPYVLGSAHQGCLPPFPADVFMVPQYGYLTLNNGSQAVGRSSFYCLEYFPSQMLRTGNNFTFSYTFEDVPFHSSYAHSQSLDRLMNPLIDQYLYYLSRTNTPSGTTTQSRLRFSQAGASDIRDQSRNWLPGPCYRQQRVSKTAADNNSDYSWTGATKYHLNGRDSLVNPGTAMASHKDDEEKYFPQSGVLIFGKQDSGKTNVDIERVMITDEEEIRTTNPVATEQYGSVSTNLQSGNTQAATSDVNTQGVLPGMVWQDRDVYLQGPIWAKIPHTDGHFHPSPLMGGFGLKHPPPQILIKNTPVPANPSTTFSAAKFASFITQYSTGQVSVEIEWELQKENSKRWNPEIQYTSNYNKSVNVDFTVDTNGVYSEPRPIGTRYLTRNL

SEQ ID NO: 2450 - protein, 735 aa, synthetic construct
  REGION 1..735: note = source = /note="Description of Artificial Sequence: Synthetic polypeptide"
MAADGYLPDWLEDTLSEGIRQWWKLKPGPPPPKPAERHKDDSRGLVLPGYKYLGPFNGLDKGEPVNEADAAALEHDKAYDRQLDSGDNPYLKYNHADAEFQERLKEDTSFGGNLARAVFQAKKRVLEPLGLVEEPVKTAPGKKRPVEHSPAEPDSSSGTGKSGQQPARKRLNFGQTGDADSVPDPQPLGQPPAAPSGLGTNTMASGSGAPMADNNEGADGVGNSSGNWHCDSTWMGDRVITTSTRTWALPTYNNHLYKQISSQSGASNDNHYFGYSTPWGYFDFNRFHCHFSPRDWQRLINNNWGFRPKRLNFKLFNIQVKEVTQNDGTTTIANNLTSTVQVFTDSEYQLPYVLGSAHQGCLPPFPADVFMVPQYGYLTLNNGSQAVGRSSFYCLEYFPSQMLRTGNNFTFSYTFEDVPFHSSYAHSQSSDRLMNPLIDQYLYYLSRTNTPSGTTTQSRLRFSQAGASDIRDQSRNWLPGPCYRQQRVSKTAADNNNSDYSWTGATKYHLNGRDSLVNPGTAMASHKDDEEKYFPQSGVLIFGKQDSGKTNVDIERVMITDEEEIRTTNPVATEQYGSVSTNLQSGNTQAATSDVNTQGVLPGMVWQDRDVYLQGPIWAKIPHTDGHFRPSPLMGGFGLKHPPPQILIKNTPVPANPSTTFSAAKFASFITQYSTGQVSVEIEWELQKENSKRWNPEIQYTSNYNKSVNVDFTVDTNGVYSEPRPIGTRYLTRNL

SEQ ID NO: 2451 - protein, 735 aa, synthetic construct
  REGION 1..735: note = source = /note="Description of Artificial Sequence: Synthetic polypeptide"
MAADGYLPDWLEDTLSEGIRQWWKLKPGPPPPKPAERHKDDSRGLVLPGYKYLGPFNGLDKGEPVNEADAAALEHDKAYDRQLDSGDNPYLKYNHADAEFQERLKEDTSFGGNLARAVFQAKKRVLEPLGLVEEPVKTAPGKKRPVEHSPAGPDSSSGTGKSGQQPARKRLNFGQTGDADSVPDPQPLGQPPAAPSGLGTNTMASGSGAPMADNNEGADGVGNSSGNWHCDSTWMGDRVITTSTRTWALPTYNNHLYKQISSQSGASNDNHYFGYSTPWGYFDFNRFHCHFSPRDWQRLINNNWGFRPKRLNFELFNIQVKEVTQNDGTTTIANNLTSTVQVFTDSEYQLPYVLGSAHQGCLPPFPADVFMVPQYGYLTLNNGSQAVGRSSFYCLEYFPSQMLRTGNNFTFSYTFEDVPFHSSYAHSQSLDRLMNPLIDQYLYYLSRTNTPSGTTTQSRLQFSQAGASDIRDQSRNWLPGPCYRQQRVSKTAADNNNSDYSWTGATKYHLNGRDSLVNPGTAMASHKDDEEKYFPQSGVLIFGKQDSGKTNVDIEKVMITDEEEIRTTNPVATEQYGSVSTNLQSGNTQAATSDVNTQGVLPGMVWQDRGVYLQGPIWAKIPHTDGHFHPSPLMGGFGLKHPPPQILIKSTPVPANPSTTFSAAKFASFITQYSTGQVSVEIEWELQKENSKRWNPEIQYTSNYNKSVNVDFTVDTNGVYSDPRPIGTRYLTRNL

SEQ ID NO: 2452 - protein, 735 aa, synthetic construct
  REGION 1..735: note = source = /note="Description of Artificial Sequence: Synthetic polypeptide"
MAADGYLPDWLEDTLSEGIRQWWKLKPGPPPPKPAERHKDDSRGLVLPGYKYLGPFNGLDKGEPVNEADAAALEHDKAYDRQLDSGDNPYLKYNHADAEFQERLKEDTSFGGNLARAVFQAKKRVLEPLGLVEEPVKTAPGKKRPVEHSPAEPDSSSGTGKSGQQPARKRLNFGQTGDADSVPDPQPLGQPPAAPSGLGTNTMASGSGAPMADNNEGADGVGNSSGNWHCDSTWMGDRVITTSTRTWALPTYNNHLYKQISSQSGASNDNHYFGYSTPWGYFDFNRFHCHFSPRGWQRLINNNWGFRPKRLNFKLFNIQVKEVTQNDGTTTIANNLTSTVQVFTDSEYQLPYVLGSAHQGCLPPFPADVFMVPQYGYLTLNNGSQAVGRSSFYCLEYFPSQMLRTGSNFTFSYTFEDVPFHSSYAHSQSLDRLMNPLIDQYLYYLSRTNTPSGTTTQSRLRFSQAGASDIRDQSRNWLPGPCYRQQRVSKTAADNNNSDYSWTGATKYHLNGRDSLVNPGTAMASHKDDEEKYFPQSGVLIFGKQDSGKTNVDIERVMITDEEEIRTTNPVATEQYGSVSTNLQSGNTQAATSDVNTQGVLPGMVWQDRDVYLQGPIWAKIPHTDGHFHPSPLMGGFGLKHPPPQILIKNTPVPANPSTTFSAAKFASFITQYSTGQVSVEIEWELQKENSKRWNPEIQYTSNYNKSVNVDFTVDTNGVYSEPRPIGTRYLTRNL

SEQ ID NO: 2453 - protein, 735 aa, synthetic construct
  REGION 1..735: note = source = /note="Description of Artificial Sequence: Synthetic polypeptide"
MAADGYLPDWLEDTLSEGIRQWWKLKPGPPPPRPAERHQDDSRGLVLPGYKYLGPFNGLDKGEPVNEADAAALEHDKAYDRQLDSGDNPYLKYNHADAEFQERLKEDTSFGGNLARAVFQAKKRVLEPLGLVEEPVKTAPGKKRPVEHSPAEPDSSSGTGKSGQQPARKRLNFGQTGDADSVPDPQPLGQPPAAPSGLGTNTMASGSGAPMADNNEGADGVGNSSGNWHCDSTWMGDRVITTSTRTWALPTYNNHLYKQISSQSGASNDNHYFGYSTPWGYFDFNRFHCHFSPRDWQRLINNNWGFRPKRLNFKLFNIQVKEVTQNDGTTTIANNLTSTVQVFTDSEYQLPYVLGSAHQGCLPPFPADVFMVPQYGYLTLNNGSQAVGRSSFYCLEYFPSQMLRTGNNFTFSYTFEDVPFHSSYAHSQSLDRLMNPLIDQYLYYLSRTNTPSGTTTQSRLRFSQAGASDIRDQSRNWLPGPCYRQQRVSKTAADNNNSDYSWTGATKYHLNGRDSLVNPGTAMASHKDDEEKYFPQSGVLIFGKQDSGKTNVDIERVMITDEEEIRTTNPVATEQYGSVSTNLQSGNTQAATSDVNTQGVLPGMVWQDRDVYLQGPIWAKIPHTDGHFHPSPLMGGFGLKHPPPQILIKNTPVPANPSTTFSAAKFASFITQYSTGQVSVEIEWELQKENSKRWNPEIQYTSNYNKSVNVDFTVDTNGVYSEPRPIGTRYLTRNL

SEQ ID NO: 2454 - protein, 735 aa, synthetic construct
  REGION 1..735: note = source = /note="Description of Artificial Sequence: Synthetic polypeptide"
MAADGYLPDWLEDTLSEGIRQWWKLKPGPPPPKPAERHKDDSRGLVLPGYKYLGPFNGLDKGEPVNEADAAALEHDKAYDRQLDSGDNPYLKYNHADAEFQERLKEDTSFGGNLARAVFQAKKRVLEPLGLVEEPVKTAPGKKRPVEHSPAEPDSSSGTGKSGQQPARKRLNFGQTGDADSVPDPQPLGQPPAAPSGLGTNTMASGSGAPMADNNEGADGVGNSSGNWHCDSTWMGDRVITTSTRTWALPTYNNHLYKQISSQSGASNDNHYFGYSTPWGYFDFNRFHCHFSPRDWQRLINNNWGFRPKRLNFKLFNIQVKEVTQNDGTTTIANNLTSTVQVFTDSEYQLPYVPGSAHQGCLPPFPADVFMVPQYGYLTLNNGSQAVGRSSFYCLEYFPSQMLRTGNNFTFSYTFEDVPFHSSYAHSQSLDRLMNPLIDQYLYYLSRTNTPSGTTTQSRLRFSQAGASDIRDQSRNWLPGPCYRQQRVSKTAADNNNSDYSWTGATKYHLNGRDSLVNPGTAMASHKDDEEKYFPQSGVLIFGKQDSGKTNVDIERVMITDEEEIRTTNPVATEQYGSVSTNLQSGNTQAATSDVNTQGVLPGMVWQDRDVYLQGPIWAKIPHTDGHFHPSPLMGGFGLKHPPPQILIKNTPVPANPSTTFSAAKFASFITQYSTGQVSVEIEWELQKENSKRWNPEIQYTSNYNKSVNVDFTVDTNGVYSEPRPIGTRYLTRNL

SEQ ID NO: 2455 - protein, 735 aa, synthetic construct
  REGION 1..735: note = source = /note="Description of Artificial Sequence: Synthetic polypeptide"
MAADGYLPDWLEDTLSEGIRQWWKLKPGPPPPKPAERHKDDSRGLVLPGYKYLGPFNGLDKGEPVNEADAAALEHDKAYDRQLDSGDNPYLKYNHADAEFQERLKEDTSFGGNLARAVFQAKKRVLEPLGLVEEPVKTAPGKKRPVEHSPAEPDSSSGTGKSGQQPARKRLNFGQTGDADSVPDPQPLGQPPAAPSGLGTNTMASGSGAPMADNNEGADGVGNSSGNWHCDSTWMGDRVITTSTRTWALPTYDNHLYKQISSQSGASNDNHYFGYSTPWGYFDFNRFHCHFSPRDWQRLINNNWGFRPKRLNFKLFNIQVKEVTQNDGTTTIANNLTSTVQVFTDSEYQLPYVLGSAHQGCLPPFPADVFMVPQYGYLTLNNGSQAVGRSSFYCLEYFPSQMLRTGNNFTFSYTFEDVPFHSSYAHSQSLDRLMNPLIDQYLYYLSRTNTSSGTTTQSRLRFSQAGASDIRDQSRNWLPGPCYRQQRVSKTAADNNNSDYSWTGATKYHLNGRDSLVNPGTAMASHKDDEEKYFPQSGVLIFGKQDSGKTNVDIERVMITDEEEIRTTNPVATEQYGSVSTNLQSGNTQAATSDVNTQGVLPGMVWQDRDVYLQGPIWAKIPHTDGHFHPSPLMGGFGLKHPPPQILIKNTPVPANPSTTFSAAKFASFITQYSTGQVSVEIEWELQKENSKRWNPEIQYTSNYNKSVNVDFTVDTNGVYSEPRPIGTRYLTRNL

SEQ ID NO: 2456 - protein, 735 aa, synthetic construct
  REGION 1..735: note = source = /note="Description of Artificial Sequence: Synthetic polypeptide"
MAADGYLPDWLEDTLSEGIRQWWKLKPGPPPPRPAERHQDDSRGLVLPGYKYLGPFNGLDKGEPVNEADAAALEHDKAYDRQLDSGDNPYLKYNHADAEFQERLKEDTSFGGNLGRAVFQAKKRVLEPLGLVEEPVKTAPGKKRPVEHSPAEPDSSSGTGKAGQQPARKRLNFGQTGDADSVPDPQPLGQPPAAPTSLGSTTMATGSGAPMADNNEGADGVGNSSGNWHCDSQWLGDRVITTSTRTWALPTYNNHLYKQISSQSGASNDNHYFGYSTPWGYFDFNRFHCHFSPRDWQRLINNNWGFRPKRLNFKLFNIQVKEVTQNDGTTTIANNLTSTVQVFTDSEYQLPYVLGSAHQGCLPPFPADVFMVPQYGYLTLNNGSQAVGRSSFYCLEYFPSQMLRTGNNFTFSYTFEDVPFHSSYAHSQSLDRLMNPLIDQYLYYLSRTNTPSGTTTQSRLQFSQAGASDIRDQSRNWLPGPCYRQQRVSKTAADNNNSDYSWTGATKYHLNGRDSLVNPGTAMASHKDDEEKYFPQSGVLIFGKQDSGKTNVDIEKVMITDEEEIRTTNPVATEQYGSVSTNLQSGNTQAATSDVNTQGVLPGMVWQDRDVYLQGPIWAKIPHTDGHFHPSPLMGGFGLKHPPPQILIKSTPVPANPSTTFSAAKFASFITQYSTGQVSVEIEWELQKENSKRWNPEIQYTSNYNKSVNVDFTVDTNGVYSEPRPIGTRYLTRNL

SEQ ID NO: 2457 - protein, 735 aa, synthetic construct
  REGION 1..735: note = source = /note="Description of Artificial Sequence: Synthetic polypeptide"
MAADGYLPDWLEDTLSEGIRQWWKLKPGPPPPKPAERHKDDSRGLVLPGYKYLGPFNGLDKGEPVNEADAAALEHDKAYDRQLDSGDNPYLKYNHADAEFQERLKEDTSFGGNLARAVFQAKKRVLEPLGLVEEPVKTAPGKKRPVEHSPAEPDSSSGTGKSGQQPARKRLNFGQTGDADSVPDPQPLGQPPAAPSGLGTNTMASGSGAPMADNNEGADGVGNSSGNWHCDSTWMGDRVITTSTRTWALPTYNNHLYKQISSQSGASNDNHYFGYSTPWGYFDFNRFHCHFSPRDWQRLINNNWGFRPKRLNFKLFNIQVKEVTQNDGTTTIANNLTSTVQVFTDSEYQLPYVLGSAHQGCLPPFPADVFMVPQYGYLTLNNGSQAVGRSSFYCLEYFPSQMLRTGNNFTFSYTFEDVPFHSSYAHSQSSDRLMNPLIDQYLYYLSRTNTPSGTTTQSRLRFSQAGASDIRDQSRNWLPGPCYRQQRVSKTAADNNNSDYSWTGATKYHLNGRDSLVNPGTAMASHKDDEEKYFPQSGVLIFGKQDSGKTNVDIERVMITDEEEIRTTNPVATEQYGSVSTNLQSGNTQAATSDVNTQGVLPGMVWQDRDVYLQGPIWAKIPHTDGHFHPSPLMGGFGLKHPPPQILIKNTPVPANPSTTFSAAKLASFITQYSTGQVSVEIEWELQKENSKRWNPEIQYTSNYNKSVNVDFTVDTNGVYSEPRPIGTRYLTRNL

SEQ ID NO: 2458 - protein, 735 aa, synthetic construct
  REGION 1..735: note = source = /note="Description of Artificial Sequence: Synthetic polypeptide"
MAADGYLPDWLEDTLSEGIRQWWKLKPGPPPPKPAERHKDDSRGLVLPGYKYLGPFNGLDKGEPVNEADAAALEHDKAYDRQLDSGDNPYLKYNHADAEFQERLKEDTSFGGNLARAVFQAKKRVLEPLGLVEEPVKTAPGKKRPVEHSPAEPDSSSGTGKSGQQPARKRLNFGQTGDADSVPDPQPLGQPPAAPSGLGTNTMASGSGAPMADNNEGADGVGNSSGNWHCDSTWMGDRVITTSTRTWALPTYNNHLYKQISSQSGASNDNHYFGYSTPWGYFDFNRFHCHFSPRDWQRLINNNWGFRPKRLNFKLFNIQVKEVTQNDGTTTIANNLTSTVQVFTDSEYQLPYVLGSAHQGCLPPFPADVFMVPQYGYLTLNNGSQAVGRSSFYCLEYFPSQMLRTGNNFTFSYTFEDVPFHSSYAHSQSLDRLMNPLIDQYLYYLSRTNTPSGTTTQSRLRFSQAGASDIRDQSRNWLPGPCYRQQRVSKTAADNNNSDYSWTGATKYHLNGRDSLVNPGTAMASHKDDEEKYFPQSGVLIFGKQDSGKTNVDIERVMITDEEEIRTTNPVATEQYGSVSTNLQSGNTQAATSDVNTQGVLPGMVWQDRDVYLQGPIWAKIPHTDGHFHPSPLMGGFGLKHPPPQILIKNTPVPANPSTTFSAAKFASFITQYSTGQVSVEIEWELQKENSKRWNPEIQYTSNYNKSVNVDFTVDANGVYSEPRPIGTRYLTRNL

SEQ ID NO: 2459 - protein, 735 aa, synthetic construct
  REGION 1..735: note = source = /note="Description of Artificial Sequence: Synthetic polypeptide"
MAADGYLPDWLEDTLSEGIRQWWKLKPGPPPPKPAERHKDDSRGLVLPGYKYLGPFNGLDKGEPVNEADAAALEHDKAYDRQLDSGDNPYLKYNHADAEFQERLKEDTSFGGNLARAVFQAKKRVLEPLGLVEEPVKTAPGKKRPVEHSPAGPDSSSGTGKSGQQPARKRLNFGQTGDADSVPDPQPLGQPPAAPSGLGTNTMASGSGAPMADNNEGADGVGNSSGNWHCDSTWMGDRVITTSTRTWALPTYNNHLYKQISSQSGASNDNHYFGYSTPWGYFDFNRFHCHFSPRDWQRLINNNWGFRPKRLNFELFNIQVKEVTQNDGTTTIANNLTSTVQVFTDSEYQLPYVLGSAHQGCLPPFPADVFMVPQYGYLTLNNGSQAVGRSSFYCLEYFPSQMLRTGNNFTFSYTFEDVPFHSSYAHSQSLDRLMNPLIDQYLYYLSRTNTPSGTTTQSRLQFSQAGASDIRDQSRNWLPGPCYRQQRVSKTAADNNNSDYSWTGATKYHLNGRDSLVNPGTAMASHKDDEEKYFPQSGVLIFGKQDSGKTNVDIEKVMITDEEEIRTTNPVATEQYGSVSTNLQSGNTQAATSDVNTQGVLPGMVWQDRDVYLQGPIWAKIPHTDGHFHPSPLMGGFGLKHPPPQILIKSTPVPANPSTTFSAAKFASFITQYSTGQVSVEIEWELQKENSKRWNPEIQYTSNCNKSVNVDFTVDTNGVYSDPRPIGTRYLTRNL

SEQ ID NO: 2460 - protein, 735 aa, synthetic construct
  REGION 1..735: note = source = /note="Description of Artificial Sequence: Synthetic polypeptide"
MAADGYLPDWLEDTLSEGIRQWWKLKPGPPPPKPAERHKDDSRGLVLPGYKYLGPFNGLDKGEPVNEADAAALEHDKAYDRQLDSGDNPYLKYNHADAELQERLKEDTSFGGNLARAVFQAKKRVLEPLGLVEEPVKTAPGKKRPVEHSPAEPDSSSGTGKSGQQPARKRLNFGQTGDADSVPDPQPLGQPPAAPSGLGTNTMASGSGAPMADNNEGADGVGNSSGNWHCDSTWMGDRVITTSTRTWALPTYNNHLYKQISSQSGASNDNHYFGYSTPWGYFDFNRFHCHFSPRDWQRLINNNWGFRPKRLNFKLFNIQVKEVTQNDGTTTIANNLTSTVQVYTDSEYQLPYVLGSAHQGCLPPFPADVFMVPQYGYLTLNNGSQAVGRSSFYCLEYFPSQMLRTGNNFTFSYTFEDVPFHSSYAHSQSLDRLMNPLIDQYLYYLSRTNTPSGTTTQSRLRFSQAGASDIRDQSRNWLPGPCYRQQRVSKTAADNNNSDYSWTGATKYHLNGRDSLVNPGTAMASHKDDEEKYFPQSGVLIFGKQDSGKTNVDIERVMITDEEEIRTTNPVATEQYGSVSTNLQSGNTQAATSDVNTQGVLPGMVWQDRDVYLQGPIWAKIPHTDGHFHPSPLMGGFGLKHPPPQILIKNTPVPANPSTTFSAAKFASFITQYSTGQVSVEIEWELQKENSKRWNPEIQYTSNYNKSVNVDFTVDTNGVYSEPRPIGTRYLTRNL

SEQ ID NO: 2461 - protein, 735 aa, synthetic construct
  REGION 1..735: note = source = /note="Description of Artificial Sequence: Synthetic polypeptide"
MAADGYLPDWLEDTLSEGIRQWWKLKPGPPPPKPAERHKDDSRGLVLPGYKYLGPFNGLDKGEPVNEADAAALEHDKAYDRQLDSGDNPYLKYNHADAEFQERLKEDTSFGGNLARAVFQAKKRVLEPLGLVEEPVKTAPGKKRPVEHSPAEPDSSSGTGKSGQQPVRKRLNFGQTGDADSVPDPQPLGQPPAAPSGLGTNTMASGSGAPMADNNEGADGVGNSSGNWHCDSTWMGDRVITTSTRTWALPTYNNHLYKQISSQSGASNDNHYFGYSTPWGYFDFNRFHCHFSPRDWQRLINNNWGFRPKRLNFKLFNIQVKEVTQNDGTTTIANNLTSTVQVFTDSEYQLPYVLGSAHQGCLPPFPADVFMVPQYGYLTLNNGSQAVGRSSFYCLEYFPSQMLRTGSNFTFSYTFEDVPFHSSYAHSQSLDRLMNPLIDQYLYYLSRTNTPSGTTTQSRLRFSQAGASDIRDQSRNWLPGPCYRQQRVSKTAADNNNSDYSWTGATKYHLNGRDSLVNPGTAMASHKDDEEKYFPQSGVLIFGKQDSGKTNVDIERVMITDEEEIRTTNPVATEQYGSVSTNLQSGNTQAATSDVNTQGVLPGMVWQDRDVYLQGPIWAKIPHTDGHFHPSPLMGGFGLKHPPPQILIKNTPVPANPSTTFSAAKFASFITQYSTGQVSVEIEWELQKENSKRWNPEIQYTSNYNKSVNVDFTVDTNGVYSEPRPIGTRYLTRNL

SEQ ID NO: 2462 - protein, 735 aa, synthetic construct
  REGION 1..735: note = source = /note="Description of Artificial Sequence: Synthetic polypeptide"
MAADGYLPDWLEDTLSEGIRQWWKLKPGPPPPRPAERHQDDSRGLVLPGYKYLGPFNGLDKGEPVNEADAAALEHDKAYDRQLDSGDNPYLKYNHADAEFQERLKEDTSFGGNLGRAVFQAKKRVLEPLGLVEEPVKTAPGKKRPVEHSPAGPDSSSGTGKSGQQPARKRLNFGQTGDADSVPDPQPLGQPPAAPSGLGTNTMASGSGAPMADNNEGADGVGNSSGNWHCDSTWMGDRVITTSTRTWALPTYNNHLYKQISSQSGASNDNHYFGYSTPWGYFDFNRFHCHFSPRDWQRLINNNWGFRPKRLNFELFNIQVKEVTQNDGTTTIANNLTSTVQVFTDSEYQLPYVLGSAHQGCLPPFPADVFMVPQYGYLTLNNGSQAVGRSSFYCLEYFPSQMLRTGNNFTFSYTFEDVPFHSSYAHSQSLDRLMNPLIDQYLYYLSRTNTPSGTTTQSRLQFSQAGASDIRDQSRNWLPGPCYRQQRVSKTAADNNNSDYSWTGATKYHLNGRDSLVNPGTAMASHKDDEEKYFPQSGVLIFGKQDSGKTNVDIEKVMITDEEEIRTTNPVATEQYGSVSTNLQSGNTQAATSDVNTQGVLPGMVWQDRDVYLQGPIWAKIPHTDGHFHPSPLMGGFGLKHPPPQILIKSTPVPANPSTTFSAAKFASFITQYSTGQVSVEIEWELQKENSKRWNPEIQYTSNYNKSVNVDFTVDTNGVYSEPRPIGTRYLTRNL

SEQ ID NO: 2463 - protein, 735 aa, synthetic construct
  REGION 1..735: note = source = /note="Description of Artificial Sequence: Synthetic polypeptide"
MAADGYLPDWLEDTLSEGIRQWWKLKPGPPPPKPAERHKDDSRGLVLPGYKYLGPFNGLDKGEPVNEADAAALEHDKAYDRQLDSGDNPYLKYNHADAEFQERLKEDTSFGGNLARAVFQAKKRVLEPLGLVEEPVKTAPGKKRPVEHSPAEPDSSSGTGKSGQQPARKRLNFGQTGDADSVPDPQPLGQPPAAPSGLGTNTMASGSGAPMADNNEGADGVGNSSGNWHCDSTWMGDRVITTSTRTWALPTYNNHLYKQISSQSGASNDNHYFGYSTPWGYFDFNRFHGHFSPRDWQRLINNNWGFRPKRLNFKLFNIQVKEVTQNDGTTTIANNLTSTVQVFTDSEYQLPYVLGSAHQGCLPPFPADVFMVPQYGYLTLNNGSQAVGRSSFYCLEYFPSQMLRTGNNFTFSYTFEDVPFHSSYAHSQSLDRLMNPLIDQYLYYLSRTNTPSGTTTQSRLRFSQAGASDIRDQSRNWLPGPCYRQQRVSKTAADNNNSDYSWTGATKYHLNGRDSLVNPGTAMASHKDDEEKYFPQSGVLIFGKQDSGKTNVDIERVMITDEEEIRTTNPVATEQYGSVSTNLQSGNTQAATSDVNTQGVLPGMVWQDRDVYLQGPIWAKIPHTDGHFHPSPLMGGFGLKHPPPQILIKNTPVPANPSTTFSAAKFASFITQYSTGQVSVEIEWELQKENSKRWNPEIQYTSNYNKSVNVDFTVDTNGVYSEPRPIGTRYLTRNL

SEQ ID NO: 2464 - protein, 735 aa, synthetic construct
  REGION 1..735: note = source = /note="Description of Artificial Sequence: Synthetic polypeptide"
MAADGYLPDWLEDTLSEGIRQWWKLKPGPPPPKPAERHKDDSRGLVLPGYKYLGPFNGLDKGEPVNEADAAALEHDKAYDRQLDSGDNPYLKYNHADAEFQERLKEDTSFGGNLARAVFQAKKRVLEPLGLVEEPVKTAPGKKRPVEHSPAEPDSSSGTGKSGQQPARKRLNFGQTGDADSVPDPQPLGQPPAAPSGLGTNTMASGSGAPMADNNEGADGVGNSSGNWHCDSTWMGDRVITTSTRTWALPTYNNHLYKQISSQSGASNDNHYFGYSTPWGYFDFNRFHCHFSPRDWQRLINNNWGFRPKRLNFKLFNIQVKEVTQNDGTTTIANNLTSTVQVFTDSEYQLPYVLGSAHQGCLPPFPADVFMVPQYGYLTLNNGSQAVGRSSFYCLEYFPSQMLRTGNNFTFSYTFEDVPFHSSYAHSQSLDRLMNPLIDQYLYYLSRTNTPSGTTTQSRLRFSQAGASDIRDQSRNWLPGPCYRQQRVSKTAADNNNSDYSWTGATKYHLNGRDSLVNPGTAMASHKDDEEKYFPQSGVLIFGKQDSGKTNVDIERVMITDEEEIRTTNPVATEQYGSVSTNLQSGNTQAATSDVNTQGVLPGMVWQDRDVYLQGPIWAKIPHTDGHFRPSPLMGGFGLKHPPPQILIKNTPVPANPSTTFSAAKFASFITQYSTGQVSVEIEWELQKENSKRWNPEIQYTSNYNKSVNVDFTVDTNGVYSEPRPIGTRYLTRNL

SEQ ID NO: 2465 - protein, 735 aa, synthetic construct
  REGION 1..735: note = source = /note="Description of Artificial Sequence: Synthetic polypeptide"
MAADGYLPDWLEDTLSEGIRQWWKLKPGPPPPKPAERHKDDSRGLVLPGYKYLGPFNGLDKGEPVNEADAAALEHDKAYDRQLDSGDNPYLKYNHADAEFQERLKEDTSFGGNLGRAVFQAKKRALEPLGLVEEPVKTAPGKKRPVEHSPVEPDSSSGTGKAGQQPARKRLNFGQTGDADSVPDPQPLGQPPAAPSGLGTNTMATGSGAPMADNNEGADGVGNSSGNWHCDSTWMGDRVITTSTRTWALPTYNNHLYKQISSQSGASNDNHYFGYSTPWGYFDFNRFHCHFSPRDWQRLINNNWGFRPKRLNFKLFNIQVKEVTQNDGTTTIANNLTSTVQVFTDSEYQLPYVLGSAHQGCLPPFPADVFMVPQYGYLTLNNGSQAVGRSSFYCLEYFPSQMLRTGNNFTFSYTFEDVPFHSSYAHSQSLDRLMNPLIDQYLYYLSRTNTPSGTTTQSRLQFSQAGASDIRDQSRNWLPGPCYRQQRVSKTSADNNNSEYSWTGATKYHLNGRDSLVNPGPAMASHKDDEEKFFPQSGVLIFGKQGSEKTNVDIEKVMITDEEEIRTTNPVATEQYGSVSTNLQRGNRQAATADVNTQGVLPGMVWQDRDVYLQGPIWAKIPHTDGHFHPSPLMGGFGLKHPPPQILIKNTPVPANPSTTFSAAKFASFITQYSTGQVSVEIEWELQKENSKRWNPEIQYTSNYNKSVNVDFTVDTNGVYSEPRPIGTRYLTRNL

SEQ ID NO: 2466 - protein, 735 aa, synthetic construct
  REGION 1..735: note = source = /note="Description of Artificial Sequence: Synthetic polypeptide"
MAADGYLPDWLEDTLSEGIRQWWKLKPGPPPPKPAERHKDDSRGLVLPGYKYLGPFNGLDKGEPVNEADAAALEHDKAYDRQLDSGDNPYLKYNHADAEFQERLKEDTSFGGNLGRAVFQAKKRVLEPLGLVEEPVKTAPGKKRPVEHSPVEPDSSSGTGKAGQQPARKRLNFGQTGDADSVPDPQPLGQPPAAPSGLGTNTMATGSGAPMADNNEGADGVGNSSGNWHCDSTWMGDRVITTSTRTWALPTYNNHLYKQISSQSGASNDNHYFGYSTPWGYFDFNRFHCHFSPRDWQRLINNNWGFRPKRLNFKLFNIQVKEVTQNDGTTTIANNLTSTVQVFTDSEYQLPYVLGSAHQGCLPPFPADVFMVPQYGYLTLNNGSQAVGRSSFYCLEYFPSQMLRTGNNFTFSYTFEDVPFHSSYAHSQSLDRLMNPLIDQYLYYLSRTNTPSGTTTQSRLQFSQAGASDIRDQSRNWLPGPCYRQQRVSKTSADNNNSEYSWTGATKYHLNGRDSLVNPGPAMASHKDDEEKFFPQSGVLIFGKQGSEKTNVDIEKVMITDEEEIRTTNPVATEQYGSVSTNLQRGNRQAATADVNTQGVLPGTVWQDRDVYLQGPIWAKIPHTDGHFHPSPLMGGFGLKHPPPQILIKNTPVPANPSTTFSAAKFASFITQYSTGQVSVEIEWELQKENSKRWNPEIQYTSNYNKSVNVDFTVDTNGVYSEPRPIGTRYLTRNL

SEQ ID NO: 2467 - protein, 735 aa, synthetic construct
  REGION 1..735: note = source = /note="Description of Artificial Sequence: Synthetic polypeptide"
MAADGYLPDWLEDTLSEGIRQWWKLKPGPPPPKPAERHKDDSRGLVLPGYKYLGPFNGLDKGEPVNEADAAALEHDKAYNRQLDSGDNPYLKYNHADAEFQERLKEDTSFGGNLGRAVFQAKKRVLEPLGLVEEPVKTAPGKKRPVEHSPVEPDSSSGTGKAGQQPARKRLNFGQTGDADSVPDPQPLGQPPAAPSGLGTNTMATGSGAPMADNNEGADGVGNSSGNWHCDSTWMGDRVITTSTRTWALPTYNNHLYKQISSQSGASNDNHYFGYSTPWGYFDFNRFHCHFSPRDWQRLINNNWGFRPKRLNFKLFNIQVKEVTQNDGTTTIANNLTSTVQVFTDSEYQLPYVLGSAHQGCLPPFPADVFMVPQYGYLTLNNGSQAVGRSSFYCLEYFPSQMLRTGNNFTFSYTFEDVPFHSSYAHSQSLDRLMNPLIDQYLYYLSRTNTPSGTTTQSRLQFSQAGASDIRDQSRNWLPGPCYRQQRVSKTSADNNNSEYSWTGATKYHLNGRDSLVNPGPAMASHKDDEEKFFPQSGVLIFGKQGSEKTNVDIEKVMITDEEEIRTTNPVATEQYGSVSTNLQRGNRQAATADVNTQGVLPGMVWQDRDVYLQGPIWAKIPHTDGHFHPSPLMGGFGLKHPPPQILIKNTPVPANPSTTFSAAKFASFITQYSTGQVSVEIEWELQKENSKRGNPEIQYTSNYNKSVNVDFTVDTNGVYSEPRPIGTRYLTRNL

SEQ ID NO: 2468 - protein, 735 aa, synthetic construct
  REGION 1..735: note = source = /note="Description of Artificial Sequence: Synthetic polypeptide"
MAADGYLPDWLEDTLSEGIRQWWKLKPGPPPPKPAERHKDDSRGLVLPGYKYLGPFNGLDKGEPVNEADAAALEHDKAYDRQLDSGDNPYLKYNHADAEFQERLKEDTSFGGNLGRAVFQAKKRVLEPLGLVEEPVKTAPGKKRPVEHSPVEPDSSSGTGKAGQQPARKRLNFGQTGDADSVPDPQPLGQPPAAPSGLGTNTMATGSGAPMADNNEGADGVGNSSGNWHCDSTWMGDRVITTSTRTWALPTYNNHLYKQISSQSGASNDNHYFGYSTPWGYFDFNRFHCHFSPRDWQRLINNNWGFRPKRLNFKLFNIQVKEVTQNDGTTTIANNLTSTVQVFTDSEYQLPYVLGSAHQGCLPPFPADVFMVPQYGYLTLNNGSQAVGRSSFYCLEYFPSQMLRTGNNFTFSYTFEDVPFHSSYAHSQSLDRLMNPLIDQYLYYLSRTNTPSGTTTQSRLQFSQAGASDIRDQSRNWLPGPCYRQQRVSKTSADNNNSEYPWTGATKYHLNGRDSLVNPGPAMASHKDDEEKFFPQSGVLIFGKQGSEKTNVDIEKVMITDEEEIRTTNPVATEQYGSVSTNLQRGNRQAATADVNTQGVLPGTVWQDRDVYLQGPIWAKIPHTDGHFHPSPLMGGFGLKHPPPQILIKNTPVPANPSTTFSAAKFASFITQYSTGQVSVEIEWELQKENSKRWNPEIQYTSNYNKSVNVDFTVDTNGVYSEPRPIGTRYLTRNL

SEQ ID NO: 2469 - protein, 735 aa, synthetic construct
  REGION 1..735: note = source = /note="Description of Artificial Sequence: Synthetic polypeptide"
MAADGYLPDWLEDTLSEGIRQWWKLKPGPPPPKPAERHKDDSRGLVLPGYKYLGPFNGLDKGEPVNEADAAALEHDKAYDRQLDSGDNPYLKYNHADAEFQERLKEDTSFGGNLGRAVFQAKKRVLEPLGLVEEPVKTAPGKKRPVEHSPVEPDSSSGTGKAGQQPARKRLNFGQTGDADSVPDPQPLGQPPAAPSGLGTNTMATGSGAPMADNNEGADGVGNSSGNWHCDSTWMGDRVITTSTRTWALPTYNNHLYKQISSQSGASNDNHYFGYSTPWGYFDFNRFHCHFSPRDWQRLINNNWGFRPKRLNFKLFNIQVKEVTQNDGTTTIANNLTSTVQVFTDSEYQLPYVLGSAHQGCLPPFPADVFMVPQYGYLTLNNGSQAVGRSSFYCLEYFPSQMLRTGNNFTFSYTFEDVPFHSSYAHSQSLDRLMNPLIDQYLYYLSRTNTPSGTTTQSRLQFSQAGASDIRDQSRNWLPGPCYRQQRVSKTSADNNNSEYSWTGATKYHLNGRDSLVNPGPAMASHKDDEEKFFPQSGVLIFGKQGSEKTNVGIEKVMITDEEEIRTTNPVATEQYGSVSTNLQRGNRQAATADVNTQGVLPGTVWQDRDVYLQGPIWAKIPHTDGHFHPSPLMGGFGLKHPPPQILIKNTPVPANPSTTFSAAKFASFITQYSTGQVSVEIEWELQKENSKRWNPEIQYTSNYNKSVNVDFTVDTNGVYSEPRPIGTRYLTRNL

SEQ ID NO: 2470 - protein, 735 aa, synthetic construct
  REGION 1..735: note = source = /note="Description of Artificial Sequence: Synthetic polypeptide"
MAADGYLPDWLEDTLSEGIRQWWKLKPGPPPPKPAGRHKDDSRGLVLPGYKYLGPFNGLDKGEPVNEADAAALEHDKAYDRQLDSGDNPYLKYNHADAEFQERLKEDTSFGGNLGRAVFQAKKRALEPLGLVEEPVKTAPGKKRPVEHSPVEPDSSSGTGKAGQQPARKRLNFGQTGDADSVPDPQPLGQPPAAPSGLGTNTMATGSGAPMADNNEGADGVGNSSGNWHCDSTWMGDRVITTSTRTWALPTYNNHLYKQISSQSGASNDNHYFGYSTPWGYFDFNRFHCHFSPRDWQRLINNNWGFRPKRLNFKLFNIQVKEVTQNDGTTTIANNLTSTVQVFTDSEYQLPYVLGSAHQGCLPPFPADVFMVPQYGYLTLNNGSQAVGRSSFYCLEYFPSQMLRTGNNFTFSYTFEDVPFHSSYAHSQSLDRLMNPLIDQYLYYLSRTNTPSGTTTQSRLQFSQAGASDIRDQSRNWLPGPCYRQQRVSKTSADNNNSEYSWTGATKYHLNGRDSLVNPGPAMASHKDDEEKFFPQSGVLIFGKQGSEKTNVDIEKVMITDEEEIRTTNPVATEQYGSVSTNLQRGNRQAATADVNTQGVLPGMVWQDRDVYLQGPIWAKIPHTDGHFHPSPLMGGFGLKHPPPQILIKNTPVPANPSTTFSAAKFASFITQYSTGQVSVEIEWELQKENSKRWNPEIQYTSNYNKSVNVDFTVDTNGVYSEPRPIGTRYLTRNL

SEQ ID NO: 2471 - protein, 735 aa, synthetic construct
  REGION 1..735: note = source = /note="Description of Artificial Sequence: Synthetic polypeptide"
MAADGYLPDWLEDTLSEGIRQWWKLKPGPPPPKPAERHKDDSRGLVLPGYKYLGPFNGLDKGEPVNEADAAALEHDKAYDRQLDSGDNPYLKYNHADAEFQERLKEDTSFGGNLGRAVFQAKKRVLEPLGLVEEPVKTAPGKKRPVEHSPVEPDSSSGTGKAGQQPARKRLNFGQTGDADSVPDPQPLGQPPAAPSGLGTNTMATGSGAPMADNNEGADGVGNSSGNWHCDSTWMGDRVITTSTRTWALPTYNNHLYKQISSQSGASNDNHYFGYSTPWGYFDFNRFHCHFSPRDWQRLINNNWGFRPKRLNFKLFNIQVKEVTQNDGTTTIANNLTSTVQVFTDSEYQLPYVLGSAHQGCLPPFPADVFMVPQYGYLTLNNGSQAVGRSSFYCLEYFPSQMLRTGNNFTFSYTFEDVPFHSSYAHSQSLDRLMNPLIDQYLYYLSRTNTPSGTTTQSRPQFSQAGASDIRDQSRNWLPGPCYRQQRVSKTSADNNNSEYSWTGATKYHLNGRDSLVNPGPAMASHKDDEEKFFPQSGVLIFGKQGSEKTNVDIEKVMITDEEEIRTTNPVATEQYGSVSTNLQRGNRQAATADVNTQGVLPGTVWQDRDVYLQGPIWAKIPHTDGHFHPSPLMGGFGLKHPPPQILIKNTPVPANPSTTFSAAKFASFITQYSTGQVSVEIEWELQKENSKRWNPEIQYTSNYNKSVNVDFTVDTNGVYSEPRPIGTRYLTRNL

SEQ ID NO: 2472 - protein, 735 aa, synthetic construct [sequence omitted]

SEQ ID NO: 2473 - protein, 735 aa, synthetic construct
  REGION 1..735: note = source = /note="Description of Artificial Sequence: Synthetic polypeptide"
MAADGYLPDWLEDTLSEGIRQWWKLKPGPPPPKPAERHKDDSRGLVLPGYKYLGPFNGLDKGEPVNEADAAALEHDKAYNRQLDSGDNPYLKYNHADAEFQERLKEDTSFGGNLGRAVFQAKKRVLEPLGLVEEPVKTAPGKKRPVEHSPVEPDSSSGTGKAGQQPARKRLNFGQTGDADSVPDPQPLGQPPAAPSGLGTNTMATGSGAPMADNNEGADGVGNSSGNWHCDSTWMGDRVITTSTRTWALPTYNNHLYKQISSQSGASNDNHYFGYSTPWGYFDFNRFHCHFSPRDWQRLINNNWGFRPKRLNFKLFNIQVKEVTQNDGTTTIANNLTSTVQVFTDSEYQLPYVLGSAHQGCLPPFPADVFMVPQYGYLTLNNGSQAVGRSSFYCLEYFPSQMLRTGNNFTFSYTFEDVPFHSSYAHSQSLDRLMNPLIDQYLYYLSRTNTPSGTTTQSRLQFSQAGASDIRDQSRNWLPGPCYRQQRVSKTSADNNNSEYSWTGATKYHLNGRDSLVNPGPAMASHKDDEEKFFPQSGVLIFGKQGSEKTNVDIEKVMITDEEEIRTTNPVATEQYGSVSTNLQRGNRQAATADVNTQGVLPGMVWQDRDVYLQGPIWAKIPHTDGHFHPSPLMGGFGLKHPPPQILIKNTPVPANPSTTFSAAKFASFITQYSTGQVSVEIEWELQKENSKRWNPEIQYTSNYNKSVNVDFTVDTNGVYSEPRPIGTRYLTRNL

SEQ ID NO: 2474 - protein, 735 aa, synthetic construct
  REGION 1..735: note = source = /note="Description of Artificial Sequence: Synthetic polypeptide"
MAADGYLPDWLEDTLSEGIRQWWKLKPGPPPPKPAERHKDDSRGLVLPGYKYLGPFNGLDKGEPVNEADAAALEHDKAYDRQLDSGDNPYLKYNHADAEFQERLKEDTSFGGNLGRAVFQAKKRVLEPLGLVEEPVKTAPGKKRPVEHSPVEPDSSSGTGKAGQQPARKRLNFGQTGDADSVPDPQPLGQPPAAPSGLGTNTMATGSGAPMADNNEGADGVGNSSGNWHCDSTWMGDRVITTSTRTWALPTYNNHLYKQISSQSGASNDNHYFGYSTPWGYFDFNRFHCHFSPRDWQRLINNNWGFRPKRLNFKLFNIQVKEVTQNDGTTTIANNLTSTVRVFTDSEYQLPYVLGSAHQGCLPPFPADVFMVPQYGYLTLNNGSQAVGRSSFYCLEYFPSQMLRTGNNFTFSYTFEDVPFHSSYAHSQSLDRLMNPLIDQYLYYLSRTNTPSGTTTQSRLQFSQAGASDIRDQSRNWLPGPCYRQQRVSKTSADNNNSEYSWTGATKYHLNGRDSLVNPGPAMASHKDDEEKFFPQSGVLIFGKQGSEKTNVDIEKVMITDEEEIRTTNPVATEQYGSVSTNLQRGNRQAATADVNTQGVLPGTVWQDRDVYLQGPIWAKIPHTDGHFHPSPLMGGFGLKHPPPQILIKNTPVPANPSTTFSAAKFASFITQYSTGQVSVEIEWELQKENSKRWNPEIQYTSNYNKSVNVDFTVDTNGVYSEPRPIGTRYLTRNL

SEQ ID NO: 2475 - protein, 735 aa, synthetic construct
  REGION 1..735: note = source = /note="Description of Artificial Sequence: Synthetic polypeptide"
MAADGYLPDWLEDTLSEGIRQWWKLKPGPPPPKPAERHKDDSRGLVLPGYKYLGPFNGLDKGEPVNEADAAALEHDKAYDRQLDSGDNPYLKYNHADAEFQERLKEDTSFGGNLGRAVFQAKKRVLEPLGLVEEPVKTAPGKKRPVEHSPVEPDSSSGTGKAGQQPARKRLNFGQTGDADSVPDPQPLGQPPAAPSGLGTNTMATGSGAPMADNNEGADGVGNSSGNWHCDSTWMGDRVITTSTRTWALPTYNNHLYKQISSQSGASNDNHYFGYSTPWGYFDFNRFHCHFSPRDWQRLINNNWGFRPKRLNFKLFNIQVKEVTQNDGTTTIANNLTSTVQVFTDSEYQLPYVLGSAHQGCLPPFPADVFMVPQYGYLTLNNGSQAVGRSSFYCLEYFPSQMLRTGNNFTFSYTFEDAPFHSSYAHSQSLDRLMNPLIDQYLYYLSRTNTPSGTTTQSRLQFSQAGASDIRDQSRNWLPGPCYRQQRVSKTSADNNNSEYSWTGATKYHLNGRDSLVNPGPAMASHKDDEEKFFPQSGVLIFGKQGSEKTNVDIEKVMITDEEEIRTTNPVATEQYGSVSTNLQRGNRQAATADVNTQGVLPGTVWQDRDVYLQGPIWAKIPHTDGHFHPSPLMGGFGLKHPPPQILIKNTPVPANPSTTFSAAKFASFITQYSTGQVSVEIEWELQKENSKRWNPEIQYTSNYNKSVNVDFTVDTNGVYSEPRPIGTRYLTRNL

SEQ ID NO: 2476 - protein, 734 aa, synthetic construct
  REGION 1..734: note = source = /note="Description of Artificial Sequence: Synthetic polypeptide"
MAADGYLPDWLEDTLSEGIRQWWKLKPGPPPKPAERHKDDSRGLVLPGYKYLGPFNGLDKGEPVNEADAAALEHDKAYDRQLDSGDNPYLKYNHADAEFQERLKEDTSFGGNLGRAVFQAKKRVLEPLGLVEEPVKTAPGKKRPVEHSPVEPDSSSGTGKAGQQPARKRLNFGQTGDADSVPDPQPLGQPPAAPSGLGTNTMATGSGAPMADNNEGADGVGNSSGNWHCDSTWMGDRVITTSTRTWALPTYNNHLYKQISSQSGASNDNHYFGYSTPWGYFDFNRFHCHFSPRDWQRLINNNWGFRPKRLNFKLFNIQVKEVTQNDGTTTIANNLTSTVQVFTDSEYQLPYVLGSAHQGCLPPFPADVFMVPQYGYLTLNNGSQAVGRSSFYCLEYFPSQMLRTGNNFTFSYTFEDVPFHSSYAHSQSLDRLMNPLIDQYLYYLSRTNTPSGTTTQSRLQFSQAGASDIRDQSRNWLPGPCYRQQRVSKTSADNNNSEYSWTGATKYHLNGRDSLVNPGPAMASHKDDEEKFFPQSGVLIFGKQGSEKTNVDIEKVMITDEEEIRTTNPVATEQYGSVSTNLQRGNRQAATADVNTQGVLPGTVWQDRDVYLQGPIWAKIPHTDGHFHPSPLMGGFGLKHPPPQILIKNTPVPANPSTTFSAAKFASFITQYSTGQVSVEIEWELQKENSKRWNPEIQYTSNYNKSVNVDFTVDTNGVYSEPRPIGTRYLTRNL

SEQ ID NO: 2477 - protein, 735 aa, synthetic construct
  REGION 1..735: note = source = /note="Description of Artificial Sequence: Synthetic polypeptide"
MAADGYLPDWLEDTLSEGIRQWWKLKPGPPPPKPAERHKDDSRGLVLPGYKYLGPFNGLDKGEPVNEADAAALEHDKAYDRQLDSGDNPYLKYNHADAEFQERLKEDTSFGGNLGRAVFQAKKRALEPLGLVEEPVKTAPGKKRPVEHSPVEPDSSSGTGKAGQQPARKRLNFGQTGDADSVPDPQPLGQPPAAPSGLGTNTMATGSGAPMADNNEGADGVGNSSGNWHCDSTWMGDRVITTSTRTWALPTYNNHLYKQISSQSGASNDNHYFGYSTPWGYFDFNRFHCHFSPRDWQRLINNNWGFRPKRLNFKLFNIQVKEVTQNDGTTTIANNLTSTVQVFTDSEYQLPYVLGSAHQGCLPPFPADVFMVPQYGYLTLNNGSQAVGRSSFYCLEYFPSQMLRTGNNFTFSYTFEDVPFHSSYAHSQSLDRLMNPLIDQYLYYLSRTNTPSGTTTQSRLRFSQAGASDIRDQSRNWLPGPCYRQQRVSKTSADNNNSEYSWTGATKYHLNGRDSLVNPGPAMASHKDDEEKFFPQSGVLIFGKQGSEKTNVDIEKVMITDEEEIRTTNPVATEQYGSVSTNLQRGNRQAATADVNTQGVLPGMVWQDRDVYLQGPIWAKIPHTDGHFHPSPLMGGFGLKHPPPQILIKNTPVPANPSTTFSAAKFASFITQYSTGQVSVEIEWELQKENSKRWNPEIQYTSNYNKSVNVDFTVDTNGVYSEPRPIGTRYLTRNL

SEQ ID NO: 2478 - protein, 735 aa, synthetic construct
  REGION 1..735: note = source = /note="Description of Artificial Sequence: Synthetic polypeptide"
MAADGYLPDWLEDTLSEGIRQWWKLKPGPPPPKPAERHKDDSRGLVLPGYKYLGPFNGLDKGEPVNEADAAALEHDKAYDRQLDSGDNPYLKYNHADAEFQERLKEDTSFGGNLGRAVFQAKKRVLEPLGLVEEPVKTAPGKKRPVEHSPVEPDSSSGTGKAGQRPARKRLNFGQTGDADSVPDPQPLGQPPAAPSGLGTNTMATGSGAPMADNNEGADGVGNSSGNWHCDSTWMGDRVITTSTRTWALPTYNNHLYKQISSQSGASNDNHYFGYSTPWGYFDFNRFHCHFSPRDWQRLINNNWGFRPKRLNFKLFNIQVKEVTQNDGTTTIANNLTSTVQVFTDSEYQLPYVLGSAHQGCLPPFPADVFMVPQYGYLTLNNGSQAVGRSSFYCLEYFPSQMLRTGNNFTFSYTFEDVPFHSSYAHSQSLDRLMNPLIDQYLYYLSRTNTPSGTTTQSRLQFSQAGASDIRDQSRNWLPGPCYRQQRVSKTSADNNNSEYSWTGATKYHLNGRDSLVNPGPAMASHKDDEEKFFPQSGVLIFGKQGSEKTNVDIEKVMITDEEEIRTTNPVATEQYGSVSTNLQRGNRQAATADVNTQGVLPGTVWQDRDVYLQGPIWAKIPHTDGHFHPSPLMGGFGLKHPPPQILIKNTPVPANPSTTFSAAKFASFITQYSTGQVSVEIEWELQKENSKRWNPEIQYTSNYNKSVNVDFTVDTNGVYSEPRPIGTRYLTRNL

SEQ ID NO: 2479 - protein, 735 aa, synthetic construct
  REGION 1..735: note = source = /note="Description of Artificial Sequence: Synthetic polypeptide"
MAADGYLPDWLEDTLSEGIRQWWKLKPGPPPPKPAERHKDDSRGLVLPGYKYLGPFNGLDKGEPVNEADAAALEHDKAYDRQLDSGDNPYLKYNHADAEFQERLKEDTSFGGNLGRAVFQAKKRVLEPLGLVEEPVKTAPGKKRPVEHSPVEPDSSSGTGKAGQQPARKRLNFGQTGDADSVPDPQPLGQPPAAPSGLGTNTMATGSGAPMADNNEGADGVGNSSGNWHCDSTWMGDRVITTSTRTWALPTYNNHLYKQISSQSGASNDNHYFGYSTPWGYFDFNRFHCHFSPRDWQRLINNNWGFRPKRLNFKLFNIQVKEVTQNDGTTTIANNLTSTVQVFTDSEYQLPYVLGSAHQGCLPPFPADVFMVPQYGYLTLNNGSQAVGRSSFYCLEYFPSQMLRTGNNFTFSYTFEDVPFHSSYAHSQSLDRLMNPLIDQYLYYLSRTNTPSGTTTQSRLQFSQAGASDIRDQSRNWLPGPCYRQQRVSKTSADNNNSEYSWTGATKYHLNGRDSLVNPGPAMASHKDDEEKFFPQSGVLIFGKQGSEKTNVDIEKVMITDEEEIRTTNPVATEQYGSVSTNLQRGNRQAATADVNTQGVLPGMVWQDRDVYLQGPIWAKIPHTDGHFHPSPLMGGFGLKHPPPQILIKNTPVPANPSTTFSAAKFASFITQYSTGQVSVEIEWELQKENSNRWNPEIQYTSNYNKSVNVDFTVDTNGVYSEPRPIGTRYLTRNL

SEQ ID NO: 2480 - protein, 735 aa, synthetic construct
  REGION 1..735: note = source = /note="Description of Artificial Sequence: Synthetic polypeptide"
MAADGYLPDWLEDTLSEGIRQWWKLKPGPPPPKPAERHKDDSRGLVLPGYKYLGPFNGLDKGEPVNEADAAALEHDKAYDRQLDSGDNPYLKYNHADAEFQERLKEDTSFGGNLGRAVFQAKKRVLEPLGLVEEPVKTAPGKKRPVEHSPVEPDSSSGTGKAGQQPARKRLNFGQTGDADSVPDPQPLGQPPAAPSGLGTNTMATGSGAPMADNNEGADGVGNSSGNWHCDSTWMGDRVITTSTRTWALPTYNNHLYKQISSQSGASNDNHYFGYSTPWGYFDFNRFHCHFSPRDWQRLINNNWGFRPKRLNFKLFNIQVKEVTQNDGTTTIANNLTSTVQVFTDSEYQLPYVLGSAHQGCLPPFPADVFMVPQYGYLTLNNGSQAVGRSSFYCLEYFPSQMLRTGNNFTFSYTFEDVPFHSSYAHSQSLDRLMNPLIDQYLYYLSRTNTPSGTTTQSRLQFSQAGASDIRDQSRNWLPGPCYRQQRVSKTSADNNNSEYSWTGATKYHLNGRDSLVNPGPAMASHKDDEEKFFPQSGVLIFGKQGSEKTNVDIEKVMITDEEEIRTTNPVATEQYGSVSTNLQRGNRQAATADVNTQGVLPGTVWQDRDVYLQGPIWAKIPHTDGHFHPSPLMGGFGLKHPPPQILIKNTPVPANPSTTFSAAKFASFITQYSTGQVGVEIEWELQKENSKRWNPEIQYTSNYNKSVNVDFTVDTNGVYSEPRPIGTRYLTRNL

SEQ ID NO: 2481 - protein, 735 aa, synthetic construct
  REGION 1..735: note = source = /note="Description of Artificial Sequence: Synthetic polypeptide"
MAADGYLPDWLEDTLSEGIRQWWKLKPGPPPPKPAERHKDDSRGLVLPGYKYLGPFNGLDKGEPVNEADAAALEHDKAYDRQLDSGDNPYLKYNHADAEFQERLKEDTSFGGNLGRAVFQAKKRVLEPLGLVEEPVKTAPGKKRPVEHSPVEPDSSSGTGKAGQQPARKRLNFGQTGDADSVPDPQPLGQPPAAPSGLGTNTMATGSGAPMADNNEGADGVGNSSGNWHCDSTWMGDRVITTSTRTWALPTYNNHLYKQISSQSGASNDNHYFGYSTPWGYFDFNRFHCHFSPRDWQRLINNNWGFRPKRLNFKLFNIQVKEVTQNDGTTTIANNLTSTVQVFTDSEYQLPYVLGSAHQGCLPPFPADVFMVPQYGYLTLNNGSQAVGRSSFYCLEYFPSQMLRTGNNFTFSYTFEDVPFHSSYAHSQSLDRLMNPLIDQYLYYLSRTNTPSGTTTQSRLQFSQAGASDIRDQSRNWLPGPCYRQQRVSKTSADNNNSEYSWTGATKYHLNGRDSLVNPGPAMASHKDDEEKFFPQSGVLIFGKQGSEKTNVDIEKVMITDEEEIRATNPVATEQCGSVSTNLQRGNRQAATADVNTQGVLPGTVWQDRDVYLQGPIWAKIPHTDGHFHPSPLMGGFGLKHPPPQILIKNTPVPANPSTTFSAAKFASFITQYSTGQVSVEIEWELQKENSKRWNPEIQYTSNYNKSVNVDFTVDTNGVYSEPRPIGTRYLTRNL

SEQ ID NO: 2482 - protein, 735 aa, synthetic construct
  REGION 1..735: note = source = /note="Description of Artificial Sequence: Synthetic polypeptide"
MAADGYLPDWLEDTLSEGIRQWWKLKPGPPPPKPAERHKDDSRGLVLPGYKYLGPFNGLDKGEPVNEADAAALEHDKAYDRQLDSGDNPYLKYNHADAEFQERLKEDTSFGGNLGRAVFQAKKRALEPLGLVEEPVKTAPGKKRPVEHSPVEPDSSSGTGKAGQQPARKRLNFGQTGDADSVPDPQPLGQPPAAPSGLGTNTMATGSGAPMADNNEGADGVGNSSGNWHCDSTWMGDRVITTSTRTWALPTYNNHLYKQISSQSGASNDNHYFGYSTPWGYFDFNRFHCHFSPRDWQRLINNNWGFRPKRLNFKLFNIQVKEVTQNDGTTTIANNLTSTVQVFTDSEYQLPYVLGSAHQGCLPPFPADVFVVPQYGYLTLNNGSQAVGRSSFYCLEYFPSQMLRTGNNFTFSYTFEDVPFHSSYAHSQSLDRLMNPLIDQYLYYLSRTNTPSGTTTQSRLQFSQAGASDIRDQSRNWLPGPCYRQQRVSKTSADNNNSEYSWTGATKYHLNGRDSLVNPGPAMASHKDDEEKFFPQSGVLIFGKQGSEKTNVDIEKVMITDEEEIRTTNPVATEQYGSVSTNLQRGNRQAATADVNTQGVLPGMVWQDRDVYLQGPIWAKIPHTDGHFHPSPLMGGFGLKHPPPQILIKNTPVPANPSTTFSAAKFASFITQYSTGQVSVEIEWELQKENSKRWNPEIQYTSNYNKSVNVDFTVDTNGVYSEPRPIGTRYLTRNL

SEQ ID NO: 2483 - protein, 735 aa, synthetic construct
  REGION 1..735: note = source = /note="Description of Artificial Sequence: Synthetic polypeptide"
MAADGYLPDWLEDTLSEGIRQWWKLKPGPPPPKPAERHKDDSRGLVLPGYKYLGPFNGLDKGEPVNEADAAALEHDKAYDRQLDSGDNPYLKYNHADAEFQERLKEDTSFGGNLGRAVFQAKKRVLEPLGLVEEPVKTAPGKKRPVEHSPVEPDSSSGTGKAGQQPARKRLNFGQTGDADSVPDPQPLGQPPAAPSGLGTNTMATGSGAPMADNNEGADGVGNSSGNWHCDSTWMGDRVITTSTRTWALPTYNNHLYKQISSQSGASNDNHYFGYSTPWGYFDFNRFHCHFSPRDWQRLINNNWGFRPKRLNFKLFNIQVKEVTQNDGTTTIANNLTSTVQVFTDSEYQLPYVLGSAHQGCLPPFPADVFMVPQYGYLTLNNGSQAVGRSSFYCLEYFPSQMLRTGNNFTFSYTFEDVPFHSSYAHSQSLDRLMNPLIDQYLYYLSRTNTPSGTTTQSRLQFSQAGASDIRDQSRNWLPGPCYRQQRVSKTSADNNNSEYSWTGATKYHLNGRDSLVNPGPAMASHKDDEEKFFPQSGVLIFGKQGSEKTNVDIEKVMITDEEEIRTTNPVATEQYGSVSTNLQRGNRQAATADVNTQGVLPGTVWQDRDVYLQGPIWAKIPHTDGHFHPSPLVGGFGLKHPPPQILIKNTPVPANPSTTFSAAKFASFITQYSTGQVSVEIEWELQKENSKRWNPEIQYTSNYNKSVNVDFTVDTNGVYSEPRPIGTRYLTRNL

SEQ ID NO: 2484 - protein, 735 aa, synthetic construct
  REGION 1..735: note = source = /note="Description of Artificial Sequence: Synthetic polypeptide"
MAADGYLPDWLEDTLSEGIRQWWKLKPGPPPPKPAERHKDDSRGLVLPGYKYLGPFNGLDKGEPVNEADAAALEHDKAYDRQLDSGDNPYLKYNHADAEFQERLKEDTSFGGNLGRAVFQAKKRVLEPLGLVEEPVKTAPGKKRPVEHSPVEPDSSSGTGKAGQQPARKRLNFGQTGDADSVPDPQPLGQPPAAPSGLGTNTMATGSGAPMADNNEGADGVGNSSGNWHCDSTWMGDRVITTSTRTWALPTYNNHLYKQISSQSGASNDNHYFGYSTPWGYFDFNRFHCHFSPRDWQRLINNNWGFRPKRLNFKLFNIQVKEVTQNDGTTTIANNLTSTVQVFTDSEYQLPYVLGSAHQGCLPPFPADVFMVPQYGYLTLNNGSQAVGRSSFYCLEYFPSQMLRTGNNFTFSYTFEDVPFHSSYAHSQSLDRLMNPLIDQYLYYLSRTNTPSGTTTQSRLQFSQAGASDIRDQSRNWLPGPCYRQQRVSKTSADNNNSEYSWTGATKYHLNGRDSLVNPGPAMASHKDDEEKFFPQSGVLIFGKQGSEKTNVDIEKVMITDEEEIRTTNPVATEQYGSVSTNLQRGNRQAATADVNTQGVLPGTVWQDRDVYLQGPIWAKIPHTDGHFHPSPLMGGFGLKHPPPQILIKNTPVPANPSTTLSAAKFASFITQYSTGQVSVEIEWELQKENSKRWNPEIQYTSNYNKSVNVDFTVDTNGVYSEPRPIGTRYLTRNL

SEQ ID NO: 2485 - protein, 735 aa, synthetic construct
  REGION 1..735: note = source = /note="Description of Artificial Sequence: Synthetic polypeptide"
MAADGYLPDWLEDTLSEGIRQWWKLKPGPPPPKPAERHKDDSRGLVLPGYKYLGPFNGLDKGEPVNEADAAALEHDKAYDRQLDSGDNPYLKYNHADAEFQERLKEDTSFGGNLGRAVFQAKKRVLEPLGLVEEPVKTAPGKKRPVEHSPVEPDSSSGTGKAGQQPARKRLNFGQTGDADSVPDPQPLGQPPAAPSGLGTNTMATGSGAPMADNNEGADGVGNSSGNWHCDSTWMGDRVITTSTRTWALPTYNNHLYKQISSQSGASNDNHYFGYSTPWGYFDFNRFHCHFSPRDWQRLINNNWGFRPKRLNFKLFNIQVKEVTQNDGTTTIANNLTSTVQVFTDSEYQLPYVLGSAHQGCLPPFPADVFMVPQYGYLTLNNGSQAVGRSSFYCLEYFPSQMLRTGNNFTFSYTFEDVPFHSSYAHSQSLDRLMNPLIDQYLYYLSRTNTPSGTTTQSRLQFSQAGASDIRDQSRNWLPGPCYRQQRVSKTSADNNNSEYSWTGATKYHLNGRDSLVNPGPAMASHKDDEEKFFPQSGVLIFGKQGSEKTNVDIEKVMITDEGEIRTTNPVATEQYGSVSTNLQRGNRQAATADVNTQGVLPGTVWQDRDVYLQGPIWAKIPHTDGHFHPSPLMGGFGLKHPPPQILIKNTPVPANPSTTFSAAKFASFITQYSTGQVSVEIEWELQKENSKRWNPEIQYTSNYNKSVNVDFTVDTNGVYSEPRPIGTRYLTRNL

SEQ ID NO: 2486 - protein, 735 aa, synthetic construct
  REGION 1..735: note = source = /note="Description of Artificial Sequence: Synthetic polypeptide"
MAADGYLPDWLEDTLSEGIRQWWKLKPGPPPPKPAERHKDDSRGLVLPGYKYLGPFNGLDKGEPVNEADAAALEHDKAYDRQLDSGDNPYLKYNHADAEFQERLKEDTSFGGNLGRAVFQAKKRALEPLGLVEEPVKTAPGKKRPVEHSPVEPDSSSGTGKAGQQPARKRLNFGQTGDADSVPDPQPLGQPPAAPSGLGTNTMATGSGAPMADNNEGADGVGNSSGNWHCDSTWMGDRVITTSTRTWALPTYNNHLYKQISSQSGASNDNHYFGYSTPWGYFDFNRFHCHFSPRDWQRLINNNWGFRPKRLNFKLFNIQVKEVTQNDGTTTIANNLTSTVQVFTDSEYQLPYVLGSAHQGCLPPFPADVFMVPQYGYLTLNNGSQAVGRSSFYCLEYFPSQMLRTGNNFTFSYTFEDVPFHSSYAHSQSLDRLMNPLIDQYLYYLSRTNTPSGTTTQSRLQFSQAGASDIRDQSRNWLPGPCYRQQRVSKTSADNNNSEYSWTGATKYHLNGRDSLVNPGPAMASHKDDEEKFFPQSGVLIFGKQGSEKTNVDIEKVMITDEEEIRTTNPVATEQYGSVSTNLQRGNRQAATADVNTQGVLPGMVWQDRDVYLQGPIWAKIPHTDGHFHPSPLMGGFGLKHPPPQILIKNTPVPANPSTTFSAAKFASFITQYSAGQVSVEIEWELQKENSKRWNPEIQYTSNYNKSVNVDFTVDTNGVYSEPRPIGTRYLTRNL

SEQ ID NO: 2487 - protein, 735 aa, synthetic construct
  REGION 1..735: note = source = /note="Description of Artificial Sequence: Synthetic polypeptide"
MAADGYLPDWLEDTLSEGIRQWWKLKPGPPPPKPAERHKDDSRGLVLPGYKYLGPFNGLDKGEPVNEADAAALEHDKAYDRQLDSGDNPYLKYNHADAEFQERLKEDTSFGGNLGRAVFQAKKRVLEPLGLVEEPVKTAPGKKRPVEHSPVEPDSSSGTGKAGQQPARKRLNFGQTGDADSVPDPQPLGQPPAAPSGLGTNTMATGSGAPMADNNEGADGVGNSSGNWHCDSTWMGDRVITTSTRTWALPTYNNHLYKQISSQSGASNDNHYFGYSTPWGYFDFNRFHCHFSPRDWQRLINNNWGFRPKRLNFKLFNIQVKEVTQNDGTTTIANNLTSTVQVFTDSEYQLPYVLGSAHQGCLPPFPADVFMVPQYGYLTLNNGSQAVGRSSFYCLEYFPSQMLRTGNNFTFSYTFEDVPFHSSYAHSQSLDRLMNPLIDQYLYYLSRTNTPSGTTTQSRLQFSQAGASDIRDQSRNWLPGPCYRQQRVSKTSADNNNSEYSWTGATEYHLNGRDSLVNPGPAMASHKDDEEKFFPQSGVLIFGKQGSEKTNVDIEKVMITDEEEIRTTNPVATEQYGSVSTNLQRGNRQAATADVNTQGVLPGTVWQDRDVYLQGPIWAKIPHTDGHFHPSPLMGGFGLKHPPPQILIKNTPVPANPSTTFSAAKFASFITQYSTGQVSVEIEWELQKENSKRWNPEIQYTSNYNKSVNVDFTVDTNGVYSEPRPIGTRYLTRNL

SEQ ID NO: 2488 - protein, 735 aa, synthetic construct
  REGION 1..735: note = source = /note="Description of Artificial Sequence: Synthetic polypeptide"
MAADGYLPDWLEDTLSEGIRQWWKLKPGPPPPKPAERHKDDSRGLVLPGYKYLGPFNGLDKGEPVNEADAAALEHGKAYDRQLDSGDNPYLKYNHADAEFQERLKEDTSFGGNLGRAVFQAKKRVLEPLGLVEEPVKTAPGKKRPVEHSPVEPDSSSGTGKAGQQPARKRLNFGQTGDADSVPDPQPLGQPPAAPSGLGTNTMATGSGAPMADNNEGADGVGNSSGNWHCDSTWMGDRVITTSTRTWALPTYNNHLYKQISSQSGASNDNHYFGYSTPWGYFDFNRFHCHFSPRDWQRLINNNWGFRPKRLNFKLFNIQVKEVTQNDGTTTIANNLTSTVQVFTDSEYQLPYVLGSAHQGCLPPFPADVFMVPQYGYLTLNNGSQAVGRSSFYCLEYFPSQMLRTGNNFTFSYTFEDVPFHSSYAHSQSLDRLMNPLIDQYLYYLSRTNTPSGTTTQSRLQFSQAGASDIRDQSRNWLPGPCYRQQRVSKTSADNNNSEYSWTGATKYHLNGRDSLVNPGPAMASHKDDEEKFFPQSGVLIFGKQGSEKTNVDIEKVMITDEEEIRTTNPVATEQYGSVSTNLQRGNRQAATADVNTQGVLPGTVWQDRDVYLQGPIWAKIPHTDGHFHPSPLMGGFGLKHPPPQILIKNTPVPANPSTTFSAAKFASFITQYSTGQVSVEIEWELQKENSKRWNPEIQYTSNYNKSVNVDFTVDTNGVYSEPRPIGTRYLTRNL

SEQ ID NO: 2489 - protein, 735 aa, synthetic construct
  REGION 1..735: note = source = /note="Description of Artificial Sequence: Synthetic polypeptide"
MAADGYLPDWLEDTLSEGIRQWWKLKPGPPPPKPAERHKDDSRGLVLPGYKYLGPFNGLDKGEPVNEADAAALEHDKAYDRQLDSGDNPYLKYNHADAEFQERLKEDTSFGGNLGRAVFQAKKRALEPLGLVEEPVKTAPGKKRPVEHSPVEPDSSSGTGKAGQQPARKRLNFGQTGDADSVPDPQPLGQPPAAPSGLGTNTMATGSGAPMADNNEGADGVGNSSGNWHCDSTWMGDRVITTSTRTWALPTYNNHLYKQISSQSGASNDNHYFGYSTPWGYFDFNRFHCHFSPRDWQRLINNNWGFRPKRLNFKLFNIQVKEVTQNDGTTTIANNLTSTVQVFTDSEYQLPYVLGSAHQGCLPPFPADVFMVPQYGYLTLNNGSQAVGRSSFYCLEYFPSQMLRTGNNFTFSYTFEDVPFHSSYAHSQSLDRLMNPLVDQYLYYLSRTNTPSGTTTQSRLQFSQAGASDIRDQSRNWLPGPCYRQQRVSKTSADNNNSEYSWTGATKYHLNGRDSLVNPGPAMASHKDDEEKFFPQSGVLIFGKQGSEKTNVDIEKVMITDEEEIRTTNPVATEQYGSVSTNLQRGNRQAATADVNTQGVLPGMVWQDRDVYLQGPIWAKIPHTDGHFHPSPLMGGFGLKRPPPQILIKNTPVPANPSTTFSAAKFASFITQYSTGQVSVEIEWELQKENSKRWNPEIQYTSNYNKSVNVDFTVDTNGVYSEPRPIGTRYLTRNL

SEQ ID NO: 2490 - protein, 735 aa, synthetic construct
  REGION 1..735: note = source = /note="Description of Artificial Sequence: Synthetic polypeptide"
MAADGYLPDWLEDTLSEGIRQWWKLKPGPPPPKPAERHKDDSRGLVLPGYKYLGPFNGLDKGEPVNEADAAALEHDKAYDRQLDSGDNPYLKYNHADAEFQERLKEDTSFGGNLGRAVFQAKKRVLEPLGLVEEPVKTAPGKKRPVEHSPVEPDSSSGTGKAGQQPARKRLNFGQTGDADSVPDPQPLGQPPAAPSGLGTNTMATGSGAPMADNNEGADGVGNSSGNWHCDSTWMGDRVITTSTRTWALPTYNNHLYKQISSQSGASNDNHYFGYSTPWGYFDFNRFHCHFSPRDWQRLINNNWGFRPKRLNFKLFNIQVKEVTQNDGTTTIANNLTSTVQVFTDSEYQLPYVLGSAHQGCLPPFPADVFMVPQYGYLTLNNGSQAVGRSSFYCLEYFPSQMLRTGNNFTFSYTFEDVPFHSSYAHSQSLDRLMNPLIDQYLYYLSRTNTPSGTTTQSRLQFSQAGASDIRDQSRNWLPGPCYRQQRVSKTSADNNNSEYSWTGATKYHLNGRDSLVNPGPAMASHKDDEEKFFPQSGVLIFGKQGSEKTNVDIEKVMITDEEEIRTTNPVATEQYGSVSTNLQRGNRQAATADVNTQGVLPGTVWQDRDVYLQGPIWAKIPHTDGHFHPSPLMGGFGLKHPPPQILIKNTPVPANPSTTFSAAKFASFITQHSTGQVSVEIEWELQKENSKRWNPEIQYTSNYNKSVNVDFTVDTNGVYSEPRPIGTRYLTRNL

SEQ ID NO: 2491 - protein, 735 aa, synthetic construct
  REGION 1..735: note = source = /note="Description of Artificial Sequence: Synthetic polypeptide"
MAADGYLPDWLEDTLSEGIRQWWKLKPGPPPPKPAERHKDDSRGLVLPGYKYLGPFNGLDKGEPVNEADAAALEHDKAYDRQLDSGDDPYLKYNHADAEFQERLKEDTSFGGNLARAVFQAKKRVLEPLGLVEEPVKTAPGKKRPVEHSPAEPDSSSGTGKAGQQPARKRLNFGQTGDADSVPDPQPLGQPPAAPSGLGTNTMATGSGAPMADNNEGADGVGNSSGNWHCDSTWMGDRVITTSTRTWALPTYNNHLYKQISSQSGASNDNHYFGYSTPWGYFDFNRFHCHFSPRDWQRLINNNWGFRPKRLSFKLFNIQVKEVTQNDGTTTIANNLTSTVQVFTDSEYQLPYVLGSAHQGCLPPFPADVFMVPQYGYLTLNNGSQAVGRSSFYCLEYFPSQMLRTGNNFTFSYTFEDVPFHSSYAHSQSLDRLMNPLIDQYLYYLSKTNAPSGTTTMSRLQFSQAGASDIRDQSRNWLPGPCYRQQRVSKTAADNNNSDYSWTGATKYHLNGRDSLVNPGPAMASHKDDEEKYFPQSGVLIFGKQGSNKTNVDIEKVMITDEEEIRTTNPVATEQYGSVSTNLQSGNTQAATSDVNTQGVLPGMVWQDRDVYLQGPIWAKIPHTDGHFHPSPLMGGFGLKHPPPQILIKNTPVPANPSTTFSAAKFASFITQYSTGQVSVEIEWELQKENSKRWNPEIQYTSNYNKSVNVDFTVDTNGVYSEPRPIGTRYLTRNL

SEQ ID NO: 2492 - protein, 735 aa, synthetic construct
  REGION 1..735: note = source = /note="Description of Artificial Sequence: Synthetic polypeptide"
MAADGYLPDWLEDTLSEGIRQWWKLKPGPPPPKPAERHKDDSRGLVLPGYKYLGPFNGLDKGEPVNEADAAALEHDKAYDRQLDSGDNPYLKYNHADAEFQERLKEDTSFGGNLGRAVFQAKKRVLEPLGLVEEPVKTAPGKKRPVEHSPVEPDSSSGTGKAGQQPARKRLNFGQTGDADSVPDPQPLGQPPAAPSGLGTNTMATGSGAPMADNNEGADGVGNSSGNWHCDSTWMGDRVITTSTRTWALPTYNNHLYKQISSQSGASNDNHYFGYSTPWGYFDFNRFHCHFSPRDWQRLINNNWGFRPKRLNFKLFNIQVKEVTQNDGTTTIANNLTSTVQVFTDSEYQLPYVLGSAHQGCLPPFPADVFMVPQYGYLTLNNGSQAVGRSSFYCLEYFPSQMLRTGNNFTFSYTFEDVPFHSSYAHSQSLDRLMNPLIDQYLYYLSRTNTPSGTTTQPRLQFSQAGASDIRDQSRNWLPGPCYRQQRVSKTSADNNNSEYSWTGATKYHLNGRDSLVNPGPAMASHKDDEEKFFPQSGVLIFGKQGSEKTNVDIEKVMITDEEEIRTTNPVATEQYGSVSTNLQRGNRQAATADVNTQGVLPGTVWQDRDVYLQGPIWAKIPHTDGHFHPSPLMGGFGLKHPPPQILIKNTPVPANPSTTFSAAKFASFITQYSTGQVSVEIEWELQKENSKRWNPEIQYTSNYNKSVNVDFTVDTNGVYSEPRPIGTRYLTRNL

SEQ ID NO: 2493 - protein, 735 aa, synthetic construct
  REGION 1..735: note = source = /note="Description of Artificial Sequence: Synthetic polypeptide"
MAADGYLPDWLEDTLSEGIRQWWKLKPGPPPPKPAERHKDDSRGLVLPGYKYLGPFNGLDKGEPVNEADAAALEHDKAYDRQLDSGDNPYLKYNHADAEFQERLKEDTSFGGNLGRAVFQAKKRVLEPLGLVEEPVKTAPGKKRPVEHSPVEPDSSSGTGKAGQQPARKRLNFGQTGDADSVPDPQPLGQPPAAPSGLGTNTMATGSGAPMADNNEGADGVGNSSGNWHCDSTWMGDRVITTSTRTWALPTYNNHLYKQISSQSGASNDNHYFGYSTPWGYFDFNRFHCHFSPRDWQRLINNNWGFRPKRLNFKLFNIQVKEVTQNDGTTTIANNLTSTVQVFTDSEYQLPYVLGSAHQGCLPPFPADVFMVPQYGYLTLNNGSQAVGRSSFYCLEYFPSQMLRTGNNFTFSYTFEDVPFHSSYAHSQSLDRLMNPLIDQYLYYLSRTNTPSGTTTQSRLQFSQAGASDIRDQSRNWLPGPCYRQQRVSKTSADNNNSEYLWTGATKYHLNGRDSLVNPGPAMASHKDDEEKFFPQSGVLIFGKQGSEKTNVDIEKVMITDEEEIRTTNPVATEQYGSVSTNLQRGNRQAATADVNTQGVLPGTVWQDRDVYLQGPIWAKIPHTDGHFHPSPLMGGFGLKHPPPQILIKNTPVPANPSTTFSAAKFASFITQYSTGQVSVEIEWELQKENSKRWNPEIQYTSNYNKSVNVDFTVDTNGVYSEPRPIGTRYLTRNL

SEQ ID NO: 2494 - protein, 735 aa, synthetic construct
  REGION 1..735: note = source = /note="Description of Artificial Sequence: Synthetic polypeptide"
MAADGYLPDWLEDTLSEGIRQWWKLKPGPPPPKPAERHKDDSRGLVLPGYKYLGPFNGLDKGEPVNEADAAALEHDKAYDRQLDSGDNPYLKYNHADAEFQERLKEDTSFGGNLGRAVFQAKKRVLEPLGLVEEPVKTAPGKKRPVEHSPVEPDSSSGTGKAGQQPARKRLNFGQTGDADSVPDPQPLGQPPAAPSGLGTNTMATGSGAPMADNNEGADGVGNSSGNWHCDSTWMGDRVITTSTRTWALPTYNNHLYKQISSQSGASNDNHYFGYSTPWGYFDFNRFHCHFSPRDWQRLINNNWGFRPKRLNFKPFNIQVKEVTQNDGTTTIANNLTSTVQVFTDSEYQLPYVLGSAHQGCLPPFPADVFMVPQYGYLTLNNGSQAVGRSSFYCLEYFPSQMLRTGNNFTFSYTFEDVPFHSSYAHSQSLDRLMNPLIDQYLYYLSRTNTPSGTTTQSRLQFSQAGASDIRDQSRNWLPGPCYRQQRVSKTSADNNNSEYSWTGATKYHLNGRDSLVNPGPAMASHKDDEEKFFPQSGVLIFGKQGSEKTNVDIEKVMITDEEEIRTTNPVATEQYGSVSTNLQRGNRQAATADVNTQGVLPGTVWQDRDVYLQGPIWAKIPHTDGHFHPSPLMGGFGLKHPPPQILIKNTPVPANPSTTFSAAKFASFITQYSTGQVSVEIEWELQKENSKRWNPEIQYTSNYNKSVNVDFTVDTNGVYSEPRPIGTRYLTRNL

SEQ ID NO: 2495 - protein, 735 aa, synthetic construct
  REGION 1..735: note = source = /note="Description of Artificial Sequence: Synthetic polypeptide"
MAADGYLPDWLEDTLSEGIRQWWKLKPGPPPPKPAERHKDDSRGLVLPGYKYLGPFNGLDKGEPVNEADAAALEHDKAYDRQLDSGDNPYLKYNHADAEFQERLKEDTSFGGNLGRAVFQAKKRVLEPLGLVEEPVKTAPGKKRPVEHSPVEPDSSSGTGKAGQQPARKRLNFGQTGDADSVPDPQPLGQPPAAPSGLGTNTMATGSGAPMADNNEGADGVGNSSGNWHCDSTWMGDRVITTSTRTWALPTYNNHLYKQISSQSGASNDNHYFGYSTPWGYFDFNRFHCHFSPRDWQRLINNNWGFRPKRLNFKLFNIQVKEVTQNDGTTTIANNLTSTVQVFTDSEYQLPYVLGSAHQGCLPPFPADVFMVPQYGYLTLNNGSQAVGRSSFYCLEYFPSQMLRTGNNFTFSYTFEDVPFHSSYAHSQSLDRLMNPLIDQYPYYLSRTNTPSGTTTQSRLQFSQAGASDIRDQSRNWLPGPCYRQQRVSKTSADNNNSEYSWTGATKYHLNGRDSLVNPGPAMASHKDDEEKFFPQSGVLIFGKQGSEKTNVDIEKVMITDEEEIRTTNPVATEQYGSVSTNLQRGNRQAATADVNTQGVLPGTVWQDRDVYLQGPIWAKIPHTDGHFHPSPLMGGFGLKHPPPQILIKNTPVPANPSTTFSAAKFASFITQYSTGQVSVEIEWELQKENSKRWNPEIQYTSNYNKSVNVDFTVDTNGVYSEPRPIGTRYLTRNL

SEQ ID NO: 2496 - protein, 735 aa, synthetic construct
  REGION 1..735: note = source = /note="Description of Artificial Sequence: Synthetic polypeptide"
MAADGYLPDWLEDTLSEGIRQWWKLKPGPPPPKPAERHKDDSRGLVLPGYKYLGPFNGLDKGEPVNEADAAALEHDKAYDRQLDSGDNPYLKYNHADAEFQERLKEDTSFGGNLGRAVFQAKKRALEPLGLVEEPVKTAPGKKRPVEHSPVEPDSSSGTGKAGQQPARKRLNFGQTGDADSVPDPQPLGQPPAAPSGLGTNTMATGSGAPMADNNEGADGVGNSSGNWHCDSTWMGDRVITTSTRTWALPTYNNHLYKQISSQSGASNDNHYFGYSTPWGYFDFNRFHCHFSPRDWQRLINNNWGFRPKRLNFKLFNIQVKEVTQNDGTTTIANNLTSTVQVFTDSEYQLPYVLGSAHQGCLPPFPADVFMVPQYGYLTLNNGSQAVGRSSFYCLEYFPSQMLRTGNNFTFSYTFEDVPFHSSYAHSQSLDRLMNPLIDQYLYYLSRTNTPSGTTTQSRLQFSQAGASDIRDQSRNWLPGPCYRQQRVSKTSADNNNSEYSWTGATKYHLNGRDSLVNPGPAMASHKDDEEKFFPQSGVLIFGKQGSEKTNVDIEKVMITDEEEIRTTNPVATEQYGSVSTNLQRGNRQAATADVNTQGVLPGTVWQDRDVYLQGPIWAKIPHTDGHFHPSPLMGGFGLKHPPPQILIKNTPVPANPSTTFSAAKFASFITQYSTGQVSVEIEWELQKENSKRWNPEIQYTSNYNKSVNVDFTVDTNGVYSEPRPIGTRYLTRNL

SEQ ID NO: 2497 - protein, 735 aa, synthetic construct
  REGION 1..735: note = source = /note="Description of Artificial Sequence: Synthetic polypeptide"
MAADGYLPDWLEDTLSEGIRQWWKLKPGPPPPKPAERHKDDSRGLVLPGYKYLGPFNGLDKGEPVNEADAAALEHDKAYDRQLDSGDNPYLKYNHADAEFQERLKEDTSFGGNLGRAVFQAKKRVLEPLGLVGEPVKTAPGKKRPVEHSPVEPDSSSGTGKAGQQPARKRLNFGQTGDADSVPDPQPLGQPPAAPSGLGTNTMATGSGAPMADNNEGADGVGNSSGNWHCDSTWMGDRVITTSTRTWALPTYNNHLYKQISSQSGASNDNHYFGYSTPWGYFDFNRFHCHFSPRDWQRLINNNWGFRPKRLNFKLFNIQVKEVTQNDGTTTIANNLTSTVQVFTDSEYQLPYVLGSAHQGCLPPFPADVFMVPQYGYLTLNNGSQAVGRSSFYCLEYFPSQMLRTGNNFTFSYTFEDVPFHSSYAHSQSLDRLMNPLIDQYLYYLSRTNTPSGTTTQSRLQFSQAGASDIRDQSRNWLPGPCYRQQRVSKTSADNNNSEYSWTGATKYHLNGRDSLVNPGPAMASHKDDEEKFFPQSGVLIFGKQGSEKTNVDIEKVMITDEEEIRTTNPVATEQYGSVSTNLQRGNRQAATADVNTQGVLPGMVWQDRDVYLQGPIWAKIPHTDGHFHPSPLMGGFGLKHPPPQILIKNTPVPANPSTTFSAAKFASFITQYSTGQVSVEIEWELQKENSKRWNPEIQYTSNYNKSVNVDFTVDTNGVYSEPRPIGTRYLTRNL

SEQ ID NO: 2498 - protein, 735 aa, synthetic construct
  REGION 1..735: note = source = /note="Description of Artificial Sequence: Synthetic polypeptide"
MAADGYLPDWLEDTLSEGIRQWWKLKPGPPPPKPAERHKDDSRGLVLPGYKYLGPFNGLDKGEPVNEADAAALEHDKAYDRQPDSGDNPYLKYNHADAEFQERLKEDTSFGGNLGRAVFQAKKRVLEPLGLVEEPVKTAPGKKRPVEHSPVEPDSSSGTGKAGQQPARKRLNFGQTGDADSVPDPQPLGQPPAAPSGLGTNTMATGSGAPMADNNEGADGVGNSSGNWHCDSTWMGDRVITTSTRTWALPTYNNHLYKQISSQSGASNDNHYFGYSTPWGYFDFNRFHCHFSPRDWQRLINNNWGFRPKRLNFKLFNIQVKEVTQNDGTTTIANNLTSTVQVFTDSEYQLPYVLGSAHQGCLPPFPADVFMVPQYGYLTLNNGSQAVGRSSFYCLEYFPSQMLRTGNNFTFSYTFEDVPFHSSYAHSQSLDRLMNPLIDQYLYYLSRTNTPSGTTTQSRLQFSQAGASDIRDQSRNWLPGPCYRQQRVSKTSADNNNSEYSWTGATKYHLNGRDSLVNPGPAMASHKDDEEKFFPQSGVLIFGKQGSEKTNVDIEKVMITDEEEIRTTNPVATEQYGSVSTNLQRGNRQAATADVNTQGVLPGTVWQDRDVYLQGPIWAKIPHTDGHFHPSPLMGGFGLKHPPPQILIKNTPVPANPSTTFSAAKFASFITQYSTGQVSVEIEWELQKENSKRWNPEIQYTSNYNKSVNVDFTVDTNGVYSEPRPIGTRYLTRNL

SEQ ID NO: 2499 - protein, 735 aa, synthetic construct
  REGION 1..735: note = source = /note="Description of Artificial Sequence: Synthetic polypeptide"
MAADGYLPDWLEDTLSEGIRQWWKLKPGPPPPKPAERHKDDSRGLVLPGYKYLGPFNGLDKGEPVNEADAAALEHDKAYDRQLDSGDNPYLKYNHADAEFQERLKEDTSFGGNLGRAVFQAKKRVLEPLGLVEEPVKTAPGKKRPVEHSPVEPDSSSGTGKAGQQPARKRLNFGQTGDADSVPDPQPLGQPPAAPSGLGTNTMATGSGAPMADNNEGADGVGNSSGNWHCDSTWMGDRVITTSTRTWALPTYNNHLYKQISSQSGASNDNHYFGYSTPWGYFDFNRFHCHFSPRDWQRLINNNWGFRPKRLNFKLFNIQVKEVTQNDGTTTIANNLTSTVQVFTDSEYQLPYVLGSAHQGCLPPFPADVFMVPQYGYLTLNNGSQAVGRSSFYCLEYFPSQMLRTGNNFTFSYTFEDVPFHSSYAHSQSLDRLMNPLIDQYLYYLSRTNTPSGTTTQSRLQFSQAGASDIRDQSRNWLPGPCYRQQRVSKTSADNNNSEYSWTGATKYHLNGRDSLVNPGPAMASHKDDEEKFFPQSGVLIFGKQGSEKTNVDIEKVMITDEEEIRTTNPVATEQYGSVSTNLQRGNRQAATADVNTQGVLPGMVWQDRDVYLQGPIWAKIPHTDGHFHPSPLMGGFGLKHPPPQILIKNTPVPANPSTTFSAAKFASSITQYSTGQVSVEIEWELQKENSKRWNPEIQYTSNYNKSVNVDFTVDTNGVYSEPRPIGTRYLTRNL

SEQ ID NO: 2500 - protein, 735 aa, synthetic construct
  REGION 1..735: note = source = /note="Description of Artificial Sequence: Synthetic polypeptide"
MAADGYLPDWLEDTLSEGIRQWWKLKPGPPPPKPAERHKDDSRGLVLPGYKYLGPFNGLDKGEPVNEADAAALEHDKAYDRQLDSGDNPYLKYNHADAEFQERLKEDTSFGGNLGRAVFQAKKRVLEPLGLVEEPVKTAPGKKRPVEHSPVEPDSSSGTGKAGQQPARKRLNFGQTGDADSVPDPQPLGQPPAAPSGLGTNTMATGSGAPMADNNEGADGVGNSSGNWHCDSTWMGDRVITTSTRTWALPTYNNHLYKQISSQSGASNDNHYFGYSTPWGYFDLNRFHCHFSPRDWQRLINNNWGFRPKRLNFKLFNIQVKEVTQNDGTTTIANNLTSTVQVFTDSEYQLPYVLGSAHQGCLPPFPADVFMVPQYGYLTLNNGSQAVGRSSFYCLEYFPSQMLRTGNNFTFSYTFEDVPFHSSYAHSQSLDRLMNPLIDQYLYYLSRTNTPSGTTTQSRLQFSQAGASDIRDQSRNWLPGPCYRQQRVSKTSADNNNSEYSWTGATKYHLNGRDSLVNPGPAMASHKDDEEKFFPQSGVLIFGKQGSEKTNVDIEKVMITDEEEIRTTNPVATEQYGSVSTNLQRGNRQAATADVNTQGVLPGTVWQDRDVYLQGPIWAKIPHTDGHFHPSPLMGGFGLKHPPPQILIKNTPVPANPSTTFSAAKFASFITQYSTGQVSVEIEWELQKENSKRWNPEIQYTSNYNKSVNVDFTVDTNGVYSEPRPIGTRYLTRNL

SEQ ID NO: 2501 - protein, 735 aa, synthetic construct
  REGION 1..735: note = source = /note="Description of Artificial Sequence: Synthetic polypeptide"
MAADGYLPDWLEDTLSEGIRQWWKLKPGPPPPKPAERHKDDSRGLVLPGYKYLGPFNGLDKGEPVNEADAAALEHDKAYDRQLDSGDNPYLKYNHADAEFQERLKEDTSFGGNLGRAVFQAKKRVLEPLGLVEEPVKTAPGKKRPVEHSPVEPDSSSGTGKAGQQPARKRLNFGQTGDADSVPDPQPLGQPPAAPSGLGTNTMATGSGAPMADNNEGADGVGNSSGNWHCDSTWMGDRVITTSTRTWALPTYNNHLYKQISSQSGASNDNRYFGYSTPWGYFDFNRFHCHFSPRDWQRLINNNWGFRPKRLNFKLFNIQVKEVTQNDGTTTIANNLTSTVQVFTDSEYQLPYVLGSAHQGCLPPFPADVFMVPQYGYLTLNNGSQAVGRSSFYCLEYFPSQMLRTGNNFTFSYTFEDVPFHSSYAHSQSLDRLMNPLIDQYLYYLSRTNTPSGTTTQSRLQFSQAGASDIRDQSRNWLPGPCYRQQRVSKTSADNNNSEYSWTGATKYHLNGRDSLVNPGPAMASHKDDEEKFFPQSGVLIFGKQGSEKTNVDIEKVMITDEEEIRTTNPVATEQYGSVSTNLQRGNRQAATADVNTQGVLPGTVWQDRDVYLQGPIWAKIPHTDGHFHPSPLMGGFGLKHPPPQILIKNTPVPANPSTTFSAAKFASFITQYSTGQVSVEIEWELQKENSKRWNPEIQYTSNYNKSVNVDFTVDTNGVYSEPRPIGTRYLTRNL

SEQ ID NO: 2502 - protein, 735 aa, synthetic construct
  REGION 1..735: note = source = /note="Description of Artificial Sequence: Synthetic polypeptide"
MAADGYLPDWLEDTLSEGIRQWWKLKPGPPPPKPAERHKDDSRGLVLPGYKYLGPFNGLDKGEPVNEADAAALEHDKAYDRQLDSGDNPYLKYNHADAEFQERLKEDTSFGGNLGRAVFQAKKRVLEPLGLVEEPVKTAPGKKRPVEHSPVEPDSSSGTGKAGQQPARKRLNFGQTGDADSVPDPQPLGQPPAAPSGLGTNTMATGSGAPMADNNEGADGVGNSSGNWHCDSTWMGDRVITTSTRTWALPTYNNHLYKQISSQSGASNDNHYFGYSTPWGYFDFNRFHCHFSPRDWQRLINNNWGFRPKRLNFKLFNIQVKEVTQNDGTTTIANNLTSTVQVFTDSEYQLPYVLGSAHQGCLPPFPADVFMVPQYGYLTLNNGSQAVGRSSFYCLEYFPSQMLRTGNNFTFSYTFEDVPFHSSYAHSQSLDRLMNPLIDQYLYYLSRTNTPSGTTTQSRLQFSQAGASDIRDQSRNWLPGPCYRQQRVSKTSADNNNSEYSWTGATKYHLNGRDSLVNPGPAMASHKDDEEKFFPQSGVLIFGKQGSEKTNVDIEKVMITDEEEIRTTNPVATEQYGSVSTNLQRGNRQAATADVNTQGVLPGTVWQDRDVYLQGPIWAKIPHTDGHFHPSPLMGGFGLKHPPPQILIKNTPVPANPSTTFSAAKFASFITQYSTGQVSVEIEWELQKENSKRWNPEIQYTSNYNKSANVDFTVDTNGVYSEPRPIGTRYLTRNL

SEQ ID NO: 2503 - protein, 735 aa, synthetic construct
  REGION 1..735: note = source = /note="Description of Artificial Sequence: Synthetic polypeptide"
MAADGYLPDWLEDTLSEGIRQWWKLKPGPPPPKPAERHKDDSRGLVLPGYKYLGPFNGLDKGEPVNEADAAALEHDKAYDRQLDSGDNPYLKYNHADAEFQERLKEDTSFGGNLGRAVFQAKKRVLEPLGLVEEPVKTAPGKKRPVEHSPVEPDSSSGTGKAGQQPARKRLNFGQTGDADSVPDPQPLGQPPAAPSGLGTNTMATGSGAPMAGNNEGADGVGNSSGNWHCDSTWMGDRVITTSTRTWALPTYNNHLYKQISSQSGASNDNHYFGYSTPWGYFDFNRFHCHFSPRDWQRLINNNWGFRPKRLNFKLFNIQVKEVTQNDGTTTIANNLTSTVQVFTDSEYQLPYVLGSAHQGCLPPFPADVFMVPQYGYLTLNNGSQAVGRSSFYCLEYFPSQMLRTGNNFTFSYTFEDVPFHSSYAHSQSLDRLMNPLIDQYLYYLSRTNTPSGTTTQSRLQFSQAGASDIRDQSRNWLPGPCYRQQRVSKTSADNNNSEYSWTGATKYHLNGRDSLVNPGPAMASHKDDEEKFFPQSGVLIFGKQGSEKTNVDIEKVMITDEEEIRTTNPVATEQYGSVSTNLQRGNRQAATADVNTQGVLPGTVWQDRDVYLQGPIWAKIPHTDGHFHPSPLMGGFGLKHPPPQILIKNTPVPANPSTTFSAAKFASFITQYSTGQVSVEIEWELQKENSKRWNPEIQYTSNYNKSVNVDFTVDTNGVYSEPRPIGTRYLTRNL

SEQ ID NO: 2504 - protein, 735 aa, synthetic construct
  REGION 1..735: note = source = /note="Description of Artificial Sequence: Synthetic polypeptide"
MAADGYLPDWLEDTLSEGIRQWWKLKPGPPPPKPAERHKDDSRGLVLPGYKYLGPFNGLDKGEPVNEADAAALEHDKAYNRQLDSGDNPYLKYNHADAEFQERLKEDTSFGGNLGRAVFQAKKRVLEPLGLVEEPVKTAPGKKRPVEHSPVEPDSSSGTGKAGQQPARKRLNFGQTGDADSVPDPQPLGQPPAAPSGLGTNTMATGSGAPMADNNEGADGVGNSSGNWHCDSTWMGDRVITTSTRTWALPTYNNHLYKQISSQSGASNDNHYFGYSTPWGYFDFNRFHCHFSPRDWQRLINNNWGFRPKRLNFKLFNIQVKEVTQNDGTTTIANNLTSTVQVFTDSEYQLPYVLGSAHQGCLPPLPADVFMVPQYGYLTLNNGSQAVGRSSFYCLEYFPSQMLRTGNNFTFSYTFEDVPFHSSYAHSQSLDRLMNPLIDQYLYYLSRTNTPSGTTTQSRLQFSQAGASDIRDQSRNWLPGPCYRQQRVSKTSADNNNSEYSWTGATKYHLNGRDSLVNPGPAMASHKDDEEKFFPQSGVLIFGKQGSEKTNVDIEKVMITDEEEIRTTNPVATEQYGSVSTNLQRGNRQAATADVNTQGVLPGMVWQDRDVYLQGPIWAKIPHTDGHFHPSPLMGGFGLKHPPPQILIKNTPVPANPSTTFSAAKFASFITQYSTGQVSVEIEWELQKENSKRWNPEIQYTSNYNKSVNVDFTVDTNGVYSEPRPIGTRYLTRNL

SEQ ID NO: 2505 - protein, 735 aa, synthetic construct
  REGION 1..735: note = source = /note="Description of Artificial Sequence: Synthetic polypeptide"
MAADGYLPDWLEDTLSEGIRQWWKLKPGPPPPKPAERHKDDSRGLVLPGYKYLGPFNGLDKGEPVNEADAAALEHDKAYDRQLDSGDNPYLKYNHADAEFQERLKEDTSFGGNLARAVFQAKKRVLEPLGLVEEPVKTAPGKKRPVEHSPAEPDSSSGTGKAGQQPARKRLNFGQTGDADSVPDPQPLGQPPAAPSGLGTNTMATGSGAPMADNNEGADGVGNSSGNWHCDSTWMGDRVITTSTRTWALPTYNNHLYKQISSQSGASNDNHYFGYSTPWGYFDFNRFHCHFSPRDWQRLINNNWGFRPKRLSFKLFNIQVKEVTQNDGATTIANNLTSTVQVFTDSEYQLPYVLGSAHQGCLPPFPADVFMVPQYGYLTLNNGSQAVGRSSFYCLEYFPSQMLRTGNNFTFSYTFEDVPFHSSYAHSQSLDRLMNPLIDQYLYYLSKTNAPSGTTTMSRLQFSQAGASDIRDQSRNWLPGPCYRQQRVSKTAADNNNSDYSWTGATKYHLNGRDSLVNPGPAMASHKDDEEKYFPQSGVLIFGKQGSNKTNVDIEKVMITDEEEIRTTNPVATEQYGSVSTNLQSGNTQAATSDVNTQGVLPGMVWQDRDVYLQGPIWAKIPHTDGHFHPSPLMGGFGLKHPPPQILIKNTPVPANPSTTFSAAKFASFITQYSTGQVSVEIEWELQKENSKRWNPEIQYTSNYNKSVNVDFTVDTNGVYSEPRPIGTRYLTRNL

SEQ ID NO: 2506 - protein, 734 aa, synthetic construct
  REGION 1..734: note = source = /note="Description of Artificial Sequence: Synthetic polypeptide"
MAADGYLPDWLEDTLSEGIRQWWKLKPGPPPKPAERHKDDSRGLVLPGYKYLGPFNGLDKGEPVNEADAAALEHDKAYDRQLDSGDNPYLKYNHADAEFQERLKEDTSFGGNLGRAVFQAKKRALEPLGLVEEPVKTAPGKKRPVEHSPVEPDSSSGTGKAGQQPARKRLNFGQTGDADSVPDPQPLGQPPAAPSGLGTNTMATGSGAPMADNNEGADGVGNSSGNWHCDSTWMGDRVITTSTRTWALPTYNNHLYKQISSQSGASNDNHYFGYSTPWGYFDFNRFHCHFSPRDWQRLINNNWGFRPKRLNFKLFNIQVKEVTQNDGTTTIANNLTSTVQVFTDSEYQLPYVLGSAHQGCLPPFPADVFMVPQYGYLTLNNGSQAVGRSSFYCLEYFPSQMLRTGNNFTFSYTFEDVPFHSSYAHSQSLDRLMNPLIDQYLYYLSRTNTPSGTTTQSRLQFSQAGASDIRDQSRNWLPGPCYRQQRVSKTSADNNNSEYSWTGATKYHLNGRDSLVNPGPAMASHKDDEEKFFPQSGVLIFGKQGSEKTNVDIEKVMITDEEEIRTTNPVATEQYGSVSTNLQRGNRQAATADVNTQGVLPGMVWQDRDVYLQGPIWAKIPHTDGHFHPSPLMGGFGLKHPPPQILIKNTPVPANPSTTFSAAKFASFITQYSTGQVSVEIEWELQKENSKRWNPEIQYTSNYNKSVNVDFTVDTNGVYSEPRPIGTRYLTRNL

SEQ ID NO: 2507 - protein, 735 aa, synthetic construct
  REGION 1..735: note = source = /note="Description of Artificial Sequence: Synthetic polypeptide"
MAADGYLPDWLEDTLSEGIRQWWKLKPGPPPPKPAERHKDDSRGLVLPGYKYLGPFNGLDKGEPVNEADAAALEHDKAYDRQLDSGDNPYLKYNHADAEFQERLKEDTSFGGNLARAVFQAKKRVLEPLGLVEEPVKTAPGKKRPVEHSPAEPDSSSGTGKAGQQPARKRLNFGQTGDADSVPDPQPLGQPPAAPSGLGTNTMATGSGAPMADNNEGADGVGNSSGNWHCDSTWMGDRVITTSTRTWALPTYNNHLYKQISSQSGASNDNHYFGYSTPWGYFDFNRFHCHFSPRDWQRLINNNWGFRPKRLSFKLFNIQVKEVTQNDGTTTIANNLTSTVQVFTDSEYQLPYVLGSAHQGCLPPFPADVFMVPQYGYLTLNNGSQAVGRSSFYCLEYFPSQMLRTGNNFTFSYTFEDVPFHSSYAHSQSLDRLMNPLIDQYLYYLSKTNAPSGTTTMSRLQFSQAGASDIRDQSRNWLPGPCYRQQRVSKTAADNNNSDYSWTGATKYHLNGRDSLVNPGPAMASHKDDEEKYFPQSGVLIFGKQGSNKTNVDIEKVMITDEEEIRTTNPVATEQYGSVSTNLQSGNTQAATSDVNTQGVLPGMVWQDRDVYLQGPIWAKIPHTDGHFHPSPLMGGFGLKHPPPQILIKNTPVPANPSTTFSAAKFASFITQYSTGQVSVEIEWELQKENGKRWNPEIQYTSNYNKSVNVDFTVDTNGVYSEPRPIGTRYLTRNL

SEQ ID NO: 2508 - protein, 735 aa, synthetic construct
  REGION 1..735: note = source = /note="Description of Artificial Sequence: Synthetic polypeptide"
MAADGYLPDWLEDTLSEGIRQWWKLKPGPPPPKPAERHKDDSRGLVLPGYKYLGPFNGLDKGEPVNEADAAALEHDKAYDRQLDSGDNPYLKYNHADAEFQERLKEDTSFGGNLGRAVFQAKKRVLEPLGLVEEPVKTAPGKKRPVEHSPVEPDSSSGTGKAGQQPARKRLNFGQTGDADSVPDPQPLGQPPAAPSGLGTNTMATGSGAPMADNNEGADGVGNSSGNWHCDSTWMGDRVITTSTRTWALPTYNNHLYKQISSQSGASNDNHYFGYSTPWGYFDFNRFHCHFSPRDWQRLINNNWGFRPKRLNFKLFNIQVKEVTQNDGTTTIANNLTSTVQVFTDSEYQLPYVLGSAHQGCLPPFPADVFMVPQYGYLTLNNGSQAVGRSSFYCLEYFPSQMLRTGNNFTFSYTFEDVPFHSSYAHSQSLDRLMNPLIDQYLYYLSRTNTPSGTTTQSRLQFSQAGASDIRDQSRNWLPRPCYRQQRVSKTSADNNNSEYSWTGATKYHLNGRDSLVNPGPAMASHKDDEEKFFPQSGVLIFGKQGSEKTNVDIEKVMITDEEEIRTTNPVATEQYGSVSTNLQRGNRQAATADVNTQGVLPGTVWQDRDVYLQGPIWAKIPHTDGHFHPSPLMGGFGLKHPPPQILIKNTPVPANPSTTFSAAKFASFITQYSTGQVSVEIEWELQKENSKRWNPEIQYTSNYNKSVNVDFTVDTNGVYSEPRPIGTRYLTRNL

SEQ ID NO: 2509 - protein, 735 aa, synthetic construct
  REGION 1..735: note = source = /note="Description of Artificial Sequence: Synthetic polypeptide"
MAADGYLPDWLEDTLSEGIRQWWKLKPGPPPPKPAERHKDDSRGLVLPGYKYLGPFNGLDKGEPVNEADAAALEHDKAYDRQLDSGDNPYLKYNHADAEFQERLKEDTSFGGNLGRAVFQAKKRALEPLGLVEEPVKTAPGKKRPVEHSPVEPDSSSGTGKAGQQPARKRLNFGQTGDADSVPDPQPLGQPPAAPSGLGTNTMATGSGAPMADNNEGADGVGNSSGNWHCDSTWMGDRVITTSTRTWALPTYNNHLYKQISSQSGASNDNHYFGYSTPWGYFDFNRFHCHFSPRDWQRLINNNWGFRPKRLNFKLFNIQVKEVTQNDGTTTIANNLTSTVQVFTDSEYQLPYVLGSAHQGCLPPFPADVFMVPQYGYLTLNNGSQAVGRSSFYCLEYFPSQMLRTGNNFTFSYTFEDVPFHSSYAHSQSLDRLMNPLIDQYLYYLSRTNTPSGTTTQSRLQFSQAGASDIRDQSRNWLPGPCYRQQRVSKTSADNNNSEYSWTGATKYHLNGRDSLVNPGPAMASHKDDEEKFFPQSGVLIFGKQGSEETNVDIEKVMITDEEEIRTTNPVATEQYGSVSTNLQRGNRQAATADVNTQGVLPGMVWQDRDVYLQGPIWAKIPHTDGHFHPSPLMGGFGLKHPPPQILIKNTPVPANPSTTFSAAKFASFITQYSTGQVSVEIEWELQKENSKRWNPEIQYTSNYNKSVNVDFTVDTNGVYSEPRPIGTRYLTRNL

SEQ ID NO: 2510 - protein, 735 aa, synthetic construct
  REGION 1..735: note = source = /note="Description of Artificial Sequence: Synthetic polypeptide"
MAADGYLPDWLEDTLSEGIRQWWKLKPGPPPPKPAERHKDDSRGLVLPGYKYLGPFNGLDKGEPANEADAAALEHDKAYDRQLDSGDNPYLKYNHADAEFQERLKEDTSFGGNLGRAVFQAKKRVLEPLGLVEEPVKTAPGKKRPVEHSPVEPDSSSGTGKAGQQPARKRLNFGQTGDADSVPDPQPLGQPPAAPSGLGTNTMATGSGAPMADNNEGADGVGNSSGNWHCDSTWMGDRVITTSTRTWALPTYNNHLYKQISSQSGASNDNHYFGYSTPWGYFDFNRFHCHFSPRDWQRLINNNWGFRPKRLNFKLFNIQVKEVTQNDGTTTIANNLTSTVQVFTDSEYQLPYVLGSAHQGCLPPFPADVFMVPQYGYLTLNNGSQAVGRSSFYCLEYFPSQMLRTGNNFTFSYTFEDVPFHSSYAHSQSLDRLMNPLIDQYLYYLSRTNTPSGTTTQSRLQFSQAGASDIRDQSRNWLPGPCYRQQRVSKTSADNNNSEYSWTGATKYHLNGRDSLVNPGPAMASHKDDEEKFFPQSGVLIFGKQGSEKTNVDIEKVMITDEEEIRTTNPVATEQYGSVSTNLQRGNRQAATADVNTQGVLPGTVWQDRDVYLQGPIWAKIPHTDGHFHPSPLMGGFGLKHPPPQILIKNTPVPANPSTTFSAAKFASFITQYSTGQVSVEIEWELQKENSKRWNPEIQYTSNYNKSVNVDFTVDTNGVYSEPRPIGTRYLTRNL

SEQ ID NO: 2511 - protein, 735 aa, synthetic construct
  REGION 1..735: note = source = /note="Description of Artificial Sequence: Synthetic polypeptide"
MAADGYLPDWLEDTLSEGIRQWWKLKPGPPPPKPAERHKDDSRGLVLPGYKYLGPFNGLDKGEPVNEADAAALEHDKAYDRQLDSGDNPYLKYNHADAEFQERLKEDTSFGGNLGRAVFQAKKRVLEPLGLVEEPVKTAPGKKRPVEHSPVEPDSSSGTGKAGQQPARKRLNFGQTGDADSVPDPQPLGQPPAAPSGLGTNTMATGSGAPMADNNEGADGVGNSSGNWHCDSTWMGDRVITTSTRTWALPTYNNHLYKQISSQSGASNDNHYFGYSTPWGYFDFNRFHCHFSPRDWQRLINNNWGFRPKRLNFKLFNIQVKEVTQNDGTTTIANNLTSTVQVFTDSEYQLPYVLGSAHQGCLPPFPADVFMVPQYGYLTLNNGSQAVGRSSFYCLEYFPSQMLRTGNNFTFSYTFEDVPFHSSYAHSQSLDRLMNPLIDQYLYYLSRTNTPSGTTTQSRLQFSQAGASDIRDQSRNWLPGPCYRQQRVSKTSADNNNSEYSWTGATKYHLNGRDSLVNPGPAMASHKDDEEKFFPQSGVLIFGKQGSEKTNVDIEKVMVTDEEEIRTTNPVATEQYGSVSTNLQRGNRQAATADVNTQGVLPGTVWQDRDVYLQGPIWAKIPHTDGHFHPSPLMGGFGLKHPPPQILIKNTPVPANPSTTFSAAKFASFITQYSTGQVSVEIEWELQKENSKRWNPEIQYTSNYNKSVNVDFTVDTNGVYSEPRPIGTRYLTRNL

SEQ ID NO: 2512 - protein, 735 aa, synthetic construct
  REGION 1..735: note = source = /note="Description of Artificial Sequence: Synthetic polypeptide"
MAADGYLPDWLEDTLSEGIRQWWKLKPGPPPPKPAERHKDDSRGLVLPGYKYLGPFNGLDKGEPVNEADAAALEHDKAYDRQLDSGDNPYLKYNHADAEFQERLKEDTSFGGNLGRAVFQAKKRVLEPLGLVEEPVKTAPGKKRPVEHSPVEPDSSSGTGKAGQQPARKRLNFGQTGDADSVPDPQPLGQPPAAPSGLGTNTMATGSGAPMADNNEGADGVGNSSGNWHCDSTWMGDRVITTSTRTWALPTYNNHLYKQISSQSGASNDNHYFGYSTPWGYFDFNRFHCHFSPRDWQRLINNNWGFRPKRLNFKLFNIQVKEVTQNDGTTTIANNLTSTVQVFTDSEYQLPYVLGSAHQGCLPPFPADVFMAPQYGYLTLNNGSQAVGRSSFYCLEYFPSQMLRTGNNFTFSYTFEDVPFHSSYAHSQSLDRLMNPLIDQYLYYLSRTNTPSGTTTQSRLQFSQAGASDIRDQSRNWLPGPCYRQQRVSKTSADNNNSEYSWTGATKYHLNGRDSLVNPGPAMASHKDDEEKFFPQSGVLIFGKQGSEKTNVDIEKVMITDEEEIRTTNPVATEQYGSVSTNLQRGNRQAATADVNTQGVLPGTVWQDRDVYLQGPIWAKIPHTDGHFHPSPLMGGFGLKHPPPQILIKNTPVPANPSTTFSAAKFASFITQYSTGQVSVEIEWELQKENSKRWNPEIQYTSNYNKSVNVDFTVDTNGVYSEPRPIGTRYLTRNL

SEQ ID NO: 2513 - protein, 735 aa, synthetic construct
  REGION 1..735: note = source = /note="Description of Artificial Sequence: Synthetic polypeptide"
MAADGYLPDWLEDTLSEGIRQWWKLKPGPPPPKPAERHKDDSRGLVLPGYKYLGPFNGLDKGEPVNEADAAALEHDKAYDRQLDSGDNPYLKYNHADAEFQERLKEDTSFGGNLGRAVFQAKKRVLEPLGLVEEPVKTAPGKKRPVEHSPVEPDSSSGTGKTGQQPARKRLNFGQTGDADSVPDPQPLGQPPAAPSGLGTNTMATGSGAPMADNNEGADGVGNSSGNWHCDSTWMGDRVITTSTRTWALPTYNNHLYKQISSQSGASNDNHYFGYSTPWGYFDFNRFHCHFSPRDWQRLINNNWGFRPKRLNFKLFNIQVKEVTQNDGTTTIANNLTSTVQVFTDSEYQLPYVLGSAHQGCLPPFPADVFMVPQYGYLTLNNGSQAVGRSSFYCLEYFPSQMLRTGNNFTFSYTFEDVPFHSSYAHSQSLDRLMNPLIDQYLYYLSRTNTPSGTTTQSRLQFSQAGASDIRDQSRNWLPGPCYRQQRVSKTSADNNNSEYSWTGATKYHLNGRDSLVNPGPAMASHKDDEEKFFPQSGVLIFGKQGSEKTNVDIEKVMITDEEEIRTTNPVATEQYGSVSTNLQRGNRQAATADVNTQGVLPGMVWQDRDVYLQGPIWAKIPHTDGHFHPSPLMGGFGLKHPPPQILIKNTPVSANPSTTFSAAKFASFITQYSTGQVSVEIEWELQKENSKRWDPEIQYTSNYNKSVNVDFTVDTNGVYSEPRPIGTRYLTRNL

SEQ ID NO: 2514 - protein, 734 aa, synthetic construct
  REGION 1..734: note = source = /note="Description of Artificial Sequence: Synthetic polypeptide"
MAADGYLPDWLEDTLSEGIRQWWKLKPGPPPPKPAERHKDDSRGLVLPGYKYLGPFNGLDKGEPVNEADAAALEHDKAYDRQLDSGDNPYLKYNHADAEFQERLKEDTSFGGNLGRAVFQAKKRVLEPLGLVEEPVKTAPGKKRPVEHSPVEPDSSSGTGKAGQQPARKRLNFGQTGDADSVPDPQPLGQPPAAPSGLGTNTMATGSGAPMADNNEGADGVGNSSGNWHCDSTWMGDRVITTSTRTWALPTYNNHLYKQISSQSGASNDNHYFGYSTPWGYFDFNRFHCHFSPRDWQRLINNWGFRPKRLNFKLFNIQVKEVTQNDGTTTIANNLTSTVQVFTDSEYQLPYVLGSAHQGCLPPFPADVFMVPQYGYLTLNNGSQAVGRSSFYCLEYFPSQMLRTGNNFTFSYTFEDVPFHSSYAHSQSLDRLMNPLIDQYLYYLSRTNTPSGTTTQSRLQFSQAGASDIRDQSRNWLPGPCYRQQRVSKTSADNNNSEYSWTGATKYHLNGRDSLVNPGPAMASHKDDEEKFFPQSGVLIFGKQGSEKTNVDIEKVMITDEEEIRTTNPVATEQYGSVSTNLQRGNRQAATADVNTQGVLPGTVWQDRDVYLQGPIWAKIPHTDGHFHPSPLMGGFGLKHPPPQILIKNTPVPANPSTTFSAAKFASFITQYSTGQVSVEIEWELQKENSKRWNPEIQYTSNYNKSVNVDFTVDTNGVYSEPRPIGTRYLTRNL

SEQ ID NO: 2515 - protein, 735 aa, synthetic construct
  REGION 1..735: note = source = /note="Description of Artificial Sequence: Synthetic polypeptide"
MAADGYLPDWLEDTLSEGIRQWWKLKPGPPPPKPAERHKDDSRGLVLPGYKYLGPFNGLDKGEPVNEADAAALEHDKAYDRQLDSGDNPYLKYNHADAEFQERLKEDTSFGGNLGRAVFQAKKRVLEPLGLVEEPVKTAPGKKRPVEHSPVEPDSSSGTGKAGQQPARKRLNFGQTGDADSVPDPQPLGQPPAAPSGLGTNTMATGSGAPMADNNEGADGVGNSSGNWHCDSTWMGDRVITTSTRTWALPTYNNHLYKQISSQSGASNDNHYFGYSTPWGYFDFNRFHCHFSPRDWQRLINNNWGFRPKRLNFKLFNIQVKEVTQNDGTTTIANNLTSTVQVFTDSEYQLPYVLGSAHQGCLPPFPADVFMVPQYGYLTLNNGSQAVGRSSFYCLEYFPSQMLRTGNNFTFSYTFEDVPFHSSYAHSQSLDRLMNPLIDQYLYYLSRTNTPSGTTTQSRLQFSQAGASDIRDQSRNWLPGPCYRQQRVSKTSADNNNSEYSWTGATKYHLNGRDSLVNPGPAMASHKDDEEKFFPQSGVLIFGKQGSEKTNVDIEKVMITDEEEIRTTNPVATEQYGSVSTNLQRGNRQAATADVNTQGVLPGTVWQDRDVYLQGPIWAKIPHTDGHFHPSPLMGGFGLKHPPPQILIKNTPVPANPSTTFSAAKFASFITQYSTGQVSVEIEWELQKENGKRWNPEIQYTSNYNKSVNVDFTVDTNGVYSEPRPIGTRYLTRNL

SEQ ID NO: 2516 - protein, 735 aa, synthetic construct
  REGION 1..735: note = source = /note="Description of Artificial Sequence: Synthetic polypeptide"
MAADGYLPDWLEDTLSEGIRQWWKLKPGPPPPKPAERHKDDSRGLVLPGYKYLGPFNGLDKGEPVNEADAAALEHDKAYDRQLDSGDNPYLKYNHADAEFQERPKEDTSFGGNLGRAVFQAKKRVLEPLGLVEEPVKTAPGKKRPVEHSPVEPDSSSGTGKAGQQPARKRLNFGQTGDADSVPDPQPLGQPPAAPSGLGTNTMATGSGAPMADNNEGADGVGNSSGNWHCDSTWMGDRVITTSTRTWALPTYNNHLYKQISSQSGASNDNHYFGYSTPWGYFDFNRFHCHFSPRDWQRLINNNWGFRPKRLNFKLFNIQVKEVTQNDGTTTIANNLTSTVQVFTDSEYQLPYVLGSAHQGCLPPFPADVFMVPQYGYLTLNNGSQAVGRSSFYCLEYFPSQMLRTGNNFTFSYTFEDVPFHSSYAHSQSLDRLMNPLIDQYLYYLSRTNTPSGTTTQSRLQFSQAGASDIRDQSRNWLPGPCYRQQRVSKTSADNNNSEYLWTGATKYHLNGRDSLVNPGPAMASHKDDEEKFFPQSGVLIFGKQGSEKTNVDIEKVMITDEEEIRTTNPVATEQYGSVSTNLQRGNRQAATADVNTQGVLPGTVWQDRDVYLQGPIWAKIPHTDGHFHPSPLMGGFGLKHPPPQILIKNTPVPANPSTTFSAAKFASFITQYSTGQVSVEIEWELQKENSKRWNPEIQYTSNYNKSVNVDFTVDTNGVYSEPRPIGTRYLTRNL

SEQ ID NO: 2517 - protein, 735 aa, synthetic construct
  REGION 1..735: note = source = /note="Description of Artificial Sequence: Synthetic polypeptide"
MAADGYLPDWLEDTLSEGIRQWWKLKPGPPPPKPAERHKDDSRGLVLPGYKYLGPFNGLDKGEPVNEADAAALEHDKAYDRQLDSGDNPYLKYNHADAEFQERLKEDTSFGGNLGRAVFQAKKRALEPLGLVEEPVKTAPGKKRPVEHSPVEPDSSSGTGKAGQQPARKRLDFGQTGDADSVPDPQPLGQPPAAPSGLGTNTMATGSGAPMADNNEGADGVGNSSGNWHCDSTWMGDRVITTSTRTWALPTYNNHLYKQISSQSGASNDNHYFGYSTPWGYFDFNRFHCHFSPRDWQRLINNNWGFRPKRLNFKLFNIQVKEVTQNDGTTTIANNLTSTVQVFTDSEYQLPYVLGSAHQGCLPPFPADVFMVPQYGYLTLNNGSQAVGRSSFYCLEYFPSQMLRTGNNFTFSYTFEDVPFHSSYAHSQSLDRLMNPLIDQYLYYLSRTNTPSGTTTQSRLQFSQAGASDIRDQSRNWLPGPCYRQQRVSKTSADNNNSEYSWTGATKYHLNGRDSLVNPGPAMASHKDDEEKFFPQSGVLIFGKQGSEKTNVDIEKVMITDEEEIRTTNPVATEQYGSVSTNLQRGNRQAATADVNTQGVLPGMVWQDRDVYLQGPIWAKIPHTDGHFHPSPLMGGFGLKHPPPQILIKNTPVPANPSTTFSAAKFASFITQYSTGQVSVEIEWELQKENSKRWNPEIQYTSNYNKSVNVDFTVDTNGVYSEPRPIGTRYLTRNL

SEQ ID NO: 2518 - protein, 735 aa, synthetic construct
  REGION 1..735: note = source = /note="Description of Artificial Sequence: Synthetic polypeptide"
MAADGYLPDWLEDTLSEGIRQWWKLKPGPPPPKPAERHKDDSRGLVLPGYKYLGPFNGLDKGEPVNEADAAALEHDKAYDRQLDSGDNPYLKYNHADAEFQERLKEDTSFGGNLARAVFQAKKRVLEPLGLVEEPVKTAPGKKRPVEHSPAEPDSSSGTGKAGQQPARKRLNFGQTGDADSVPDPQPLGQPPAAPSGLGTNTMATGSGAPMADNNEGADGVGNSSGNWHCDSTWMGDRVITTSTRTWALPTYNNHLYKQISSQSGASNDNHYFGYSTPWGYFDFNRFHCHFSPRDWQRLINNNWGFRPKRLSFKLFNIQVKEVTQNDGTTTIANNLTSTVQVFTDSEYQLPYVLGSAHQGCLPPFPADVFMVPQYGYLTLNNGSQAVGRSSFYCLEYFPSQMLRTGNNFTFSYTFEDVPFHSSYAHSQSLDRLMNPLIDQYLYYLSKTNAPSGTTTMSRLQFSQAGASDIRDQSRNWLPGPCYRQQRVSKTAADNNNSDYSWTGATKYHLNGRDSLVNPGPAMASHKDDEEKYFPQSGVLIFGKQGSNKTNVDIEKVMITDEEEIRTTNPVATEQYGSVSTNLQSGNTQAATSDVNTQGVLPGMVWQDRDVYLQGPIWAKIPHTDGHFHPSPLMGGFGLKHPPPQILIKNTPVPANPSTTFSAAKFASFITQYSTGQVSVEIEWELQKENSKRWNPEIQYTSNYNKSVNVDFTVDTNGVYSEPRPIGTRYLTRNL

SEQ ID NO: 2519 - protein, 735 aa, synthetic construct
  REGION 1..735: note = source = /note="Description of Artificial Sequence: Synthetic polypeptide"
MAADGYLPDWLEDTLSEGIRQWWKLKPGPPPPKPAERHKDDSRGLVLPGYKYLGPFNGLDKGEPVNEADAAALEHDKAYDRQLDSGDNPYLKYNHADAEFQERLKEDTSFGGNLGRAVFQAKKRVLEPLGLVEEPVKTAPGKKRPVEHSPVEPDSSSGTGKAGQQPARKRLNFGQTGDADSVPDPQPLGQPPAAPSGLGTNTMATGSGAPMADNNEGADGVGNSSGNWHCDSTWMGDRVITTSTRTWALPTYNNHLYKQISSQSGASNDNHYFGYSTPWGYFDFNRFHCHFSPRDWQRLINNNWGFRPKRLNFKLFNIQVKEVTQNDGTTTIANNLTSTVQVFTDSEYQLPYVLGSAHQGCLPPFPADVSMVPQYGYLTLNNGSQAVGRSSFYCLEYFPSQMLRTGNNFTFSYTFEDVPFHSSYAHSQSLDRLMNPLIDQYLYYLSRTNTPSGTTTQSRLQFSQAGASDIRDQSRNWLPGPCYRQQRVSKTSADNNNSEYSWTGATKYHLNGRDSLVNPGPAMASHKDDEEKFFPQSGVLIFGKQGSEKTNVDIEKVMITDEEEIRTTNPVATEQYGSVSTNLQRGNRQAATADVNTQGVLPGTVWQDRDVYLQGPIWAKIPHTDGHFHPSPLMGGFGLKHPPPQILIKNTPVPANPSTTFSAAKFASFITQYSTGQVSVEIEWELQKENSKRWNPEIQYTSNYNKSVNVDFTVDTNGVYSEPRPIGTRYLTRNL

SEQ ID NO: 2520 - protein, 735 aa, synthetic construct
  REGION 1..735: note = source = /note="Description of Artificial Sequence: Synthetic polypeptide"
MAADGYLPDWLEDTLSEGIRQWWKLKPGPPPPKPAERHKDDSRGLTLPGYKYLGPFNGLDKGEPVNEADAAALEHDKAYDRQLDSGDNPYLKYNHADAEFQERLKEDTSFGGNLARAVFQAKKRVLEPLGLVEEPVKTAPGKKRPVEHSPAELDSSSGTGKSGQQPARKRLNFGQTGDADSVPDPQPLGQPPAAPSGLGTNTMASGSGAPMADNNEGADGVGNSSGNWHCDSTWMGDRVITTSTRTWALPTYNNHLYKQISSQSGASNDNHYFGYSTPWGYFDFNRFHCHFSPRDWQRLINNNWGFRPKRLNFKLFNIQVKEVTQNDGTTTIANNLTSTVQVFTDSEYQLPYVLGSAHQGCLPPFPADVFMVPQYGYLTLNNGSQAVGRSSFYCLEYFPSQMLRTGNNFTFSYTFEDVPFHSSYAHSQSLDRLMNPLIDQYLYYLSRTNTPSGTTTQSRLQFSQAGASDIRDQSRNWLPGPCYRQQRVSKTAADNNNSDYSWTGATKYHLNGRDSLVNPGTAMASHKDDEEKYFPQSGVLIFGKQDSGKTNVDIEKVMITDEEEIRTTNPVATEQYGSVSTNLQSGNTQAATSDVNTQGVLPGMVWQDRDVYLQGPIWAKIPHTDGHFHPSPLMGGFGPKHPPPQILIKNTPVPANPSTTFSAAKFASFITQYSTGQVSVEIEWELQKENSKRWNPEIQYTSNYNKSVNVDFTVDTNGVYSEPRPIGTRYLTRNL

SEQ ID NO: 2521 - protein, 735 aa, synthetic construct
  REGION 1..735: note = source = /note="Description of Artificial Sequence: Synthetic polypeptide"
MAADGYLPDWLEDTLSEGIRQWWKLKPGPPPPKPAERHKDDSRGLVLPGYKYLGPFNGLDKGEPVNEADAAALEHDKAYDRQLDSGDNPYLKYNHADAEFQERLKEDTSFGGNLARAVFQAKKRVLEPLGLVEEPVKTAPGKKRPVEHSPAEPDSSSGTGESGQQPARKRLNFGQTGDADSVPDPQPLGQPPAAPSGLGTNTMASGSGAPMADNNEGADGVGNSSGNWHCDSTWMGDRVITTSTRTWALPTYNNHLYKQISSQSGASNDNHYFGYSTPWGYFDFNRFHCHFSPRDWQRLINNNWGFRPKRLNFKLFNIQVKEVTQNDGTTTIANNLTSTVQVFTDSEYQLPYVLGSAHQGCLPPFPADVFMVPQYGYLTLNNGSQAVGRSSFYCLEYFPSQMLRTGNNFTFSYTFEDVPFHSSYAHSQSLDRLMNPLIDQYLYYLSRTNTPSGTTTQSRLQFSQAGASDIRDQSRNWLPGPCYRQQRVSKTAADNNNSDYSWTGATKYHLNGRDSLVNPGTAMASHKDDEEKYFPQSGVLIFGKQDSGKTNVDIEKVMITDEEEIRTTNPVATEQYGSVSTNLQSGNTQAATSDVNTQGVLPGMVRQDRDVYLQGPIWAKIPHTDGHFHPSPLMGGFGLKHPPPQILIKNTPVPANPSTTFSAAKFASFITQYSTGQVSVEIEWEPQKENSKRWNPEIQYTSNYNKSVNVDFTVDTNGVYSEPRPIGTRYLTRNL

SEQ ID NO: 2522 - protein, 735 aa, synthetic construct
  REGION 1..735: note = source = /note="Description of Artificial Sequence: Synthetic polypeptide"
MAADGYLPDWLEDTLSEGIRQWWKLKPGPPPPKPAERHKDDSRGLALPGYKYLGPFNGLDKGEPVNEADAAALEHDKAYDRQLDSGDNPYLKYNHADAEFQERLKEDTSFGGNLARAVFQAKKRVLEPLGLVEEPVKTAPGKKRPVEHSPAELDSSSGTGKSGQQPARKRLNFGQTGDADSVPDPQPLGQPPAAPSGLGTNTMASGSGAPMADNNEGADGVGNSSGNWHCDSTWMGDRVITTSTRTWALPTYNNHLYKQISSQSGASNDNHYFGYSTPWGYFDFNRFHCHFSPRDWQRLINNNWGFRPKRLNFKLFNIQVKEVTQNDGTTTIANNLTSTVQVFTDSEYQLPYVLGSAHQGCLPPFPADVFMVPQYGYLTLNNGSQAVGRSSFYCLEYFPSQMLRTGNNFTFSYTFEDVPFHSSYAHSQSLDRLMNPLIDQYLYYLSRTNTPSGTTTQSGLQFSQAGASDIRDQSRNWLPGPCYRQQRVSKTAADNNNSDYSWTGATKYHLNGRDSLVNPGTAMASHKDDEEKYFPQSGVLIFGKQDSGKTNVDIEKVMITDEEEIRTTNPVATEQYGSVSTNLQSGNTQAATSDVNTQGVLPGMVWQDRDVYLQGPIWAKIPHTDGHFHPSPLMGGFGPKHPPPQILIKNTPVPANPSTTFSAAKFASFITQYSTGQVSVEIEWELQKENSKRWNPEIQYTSNYNKSVNVDFTVDTNGVYSEPRPIGTRYLTRNL

SEQ ID NO: 2523 - protein, 735 aa, synthetic construct
  REGION 1..735: note = source = /note="Description of Artificial Sequence: Synthetic polypeptide"
MAADGYLPDWLEDTLSEGIRQWWKLKPGPPPPKPAERHKDDSRGLVLPGYKYLGPFNGLDKGEPVNEADAAALEHDKAYDRQLDSGDNPYLKYNHADAEFQERLKEDTSFGGNLARAVFQAKKRVLEPLGLVEEPVKTAPGKKRPVEHSPAEPDSSSGTGKSGQQPARKRLNFGQTGDADSVPDPQPLGQPPAAPSGLGTNTMASGSGAPMADNNEGADGVGNSSGNWHCDSTWMGDRVITTSTRTWALPTYNNHLYKQISSQSGASNDNHYFGYSTPWGYFDFNRFHCHFSPRDWQRLINNNWGFRPKRLNFKLFNIQVKEVTQNDGTTTVANNLTSTVQVFTDSEYQLPYVLGSAHQGCLPPFPADVFMVPQYGYLTLNNGSQAVGRSSFYCLEYFPSQMLRTGNNFTFSYTFEDVPFHSSYAHSQSLDRLMNPLIDQYLYYLSRTNTPSGTTTQSRLQFSQAGASDIRDQSRNWLPGPCYRQQRVSKTAADNNNSDYSWTGATKYHLNGRDSLVNPGTAMASHKDDEEKYFPQSGVLIFGKQDSGKTNVDIEKVMITDEEEIRTTNPVATEQYGSVSTNLQSGNTQAATSDVNTQGVLPGMVRQDRDVYLQGPIWAKIPHTDGHFHPSPLMGGFGLKHPPPQILIKNTPVPANPSTTFSAAKFASFITQYSTGQVSVEIEWEPQKENSKRWNPEIQYTSNYNKSVNVDFTVDTNGVYSEPRPIGTRYLTRNL

SEQ ID NO: 2524 - protein, 735 aa, synthetic construct
  REGION 1..735: note = source = /note="Description of Artificial Sequence: Synthetic polypeptide"
MAADGYLPDWLEDTLSEGIRQWWKLKPGPPPPKPAERHKDDSRGLVLPGYKYLGPFNGLDKGEPVNEADAAALEHDKAYDRQLDSGDNPYLKYNHADAEFQERLKEDTSFGGNLARAVFQAKKRVLEPLGLVEEPVKTAPGKKRPVEHSPAEPDSSSGTGKSGQQPARKRLNFGQTGDADSVPDPQPLGQPPAAPSGLGTNTMASGSGAPMADNNEGADGVGNSSGNWHCDSTWMGDRVITTSTRTWALPTYNNHLYKQISSQSGASNDNHYFGYSTPWGYFDFNRFHCHFSPRDWQRLINNNWGFRPKRLNFKLFNIQVKEVTQNDGTTTIANNLTSTVQVFTDSEYQLPYVLGSAHQGCLPPFPADVFMVPQYGYLTLNNGSQAVGRSSFYCLEYFPSQMLRTGNNFTFSYTFEDVPFHSSYAHSQSLDRLMNPLIDQYLYYLSRTNTPSGTTTQSRLQFSQAGASDIRDQSRNWLPGPCYRQQRVSKTAADNNNSDYSWTGATKYHLNGRDSLVNPGTAMASHKDDEEKYFPQGGVLIFGKQDSGKTNVDIEKVMITDEEEIRTTNPVATEQYGSVSTNLQSGNTQAATSDVNTQGVLPGMVRQDRDVYLQGPIWAKIPHTDGHFHPSPLMGGFGLKHPPPQILIKNTPVPANPSTTFSAAKFASFITQYSTGQVSVEIEWEPQKENSKRWNPEIQYTSNYNKSVNVDFTVDTNGVYSEPRPIGTRYLTRNL

SEQ ID NO: 2525 - protein, 735 aa, synthetic construct
  REGION 1..735: note = source = /note="Description of Artificial Sequence: Synthetic polypeptide"
MAADGYLPDWLEDTLSEGIRQWWKLKPGPPPPKPAERHKDDSRGLALPGYKYLGPFNGLDKGEPVNEADAAALEHDKAYDRQLDSGDNPYLKYNHADAEFQERLKEDTSFGGNLARAVFQAKKRVLEPLGLVEEPVKTAPGKKRPVEHSPAELDSSSGTGKSGQQPARKRLNFGQTGDADSVPDPQPLGQPPAAPSGLGTNTMASGSGAPMADNNEGADGVGNSSGNWHCDSTWMGDRVITTSTRTWALPTYNNHLYKQISSQSGASNDNHYFGYSTPWGYFDFNRFHCHFSPRDWQRLINNNWGFRPKRLNFKLFNIQVKEVTQNDGTTTIANNLTSTVQVFTDSEYQLPYVLGSAHQGCLPPFPADVFMVPQYGYLTLNNGSQAVGRSSFYCLEYFPSQMLRTGNNFTFSYTFEDVPFHSSYAHSQSLDRLMNPLIDQYLYYLSRTNTPSGTTTQSRLQFSQAGASDIRDQSRNWLPGPCYRQQRVSKTAADNNNSDYSWTGATKYHLNGRDSLVNPGTAMAGHKDDEEKYFPQSGVLIFGKQDSGKTNVDIEKVMITDEEEIRTTNPVATEQYGSVSTNLQSGNTQAATSDVNTQGVLPGMVWQDRDVYLQGPIWAKIPHTDGHFHPSPLMGGFGPKHPPPQILIKNTPVPANPSTTFSAAKFASFITQYSTGQVSVEIEWELQKENSKRWNPEIQYTSNYNKSVNVDFTVDTNGVYSEPRPIGTRYLTRNL

SEQ ID NO: 2526 - protein, 735 aa, synthetic construct
  REGION 1..735: note = source = /note="Description of Artificial Sequence: Synthetic polypeptide"
MAADGYLPDWLEDTLSEGIRQWWKLKPGPPPPKPAERHKDDSRGLALPGYKYLGPFNGLDKGEPVNEADAAALEHDKAYDRQLDSGDNPYLKYNHADAEFQERLKEDTSFGGNLARAVFQAKKRVLEPLGLVEEPVKTAPGKKRPVEHSPAELDSSSGTGKSGQQPARKRLNFGQTGDADSVPDPQPLGQPPAAPSGLGTNTMASGSGAPMADNNEGADGVGNSSGNWHCDSTWMGDRVITTSTRTWALPTYNNHLYKQISSQSGASNDNHYFGYSTPWGYFDFNRFHCHFSPRDWQRLINNNWGFRPKRLNFKLFNIQVKEVTQNDGTTTIANNLTSTVQVFTDSEYQLPYVLGSAHQGCLPPFPADVFMVPQYGYLTLNNGSQAVGRSSFYCLEYFPSQMLRTGNNFTFSYTFEDVPFHSSYAHSQSLDRLMNPLIDQYLYYLSRTNTPSGTTTQSRLQFSQAGASDIRDQSRNWLPGPCYRQQRVSKTAADNNNSDYSWTGATKYHLNGRDSLVNPGTAMASHKDDEEKYFPQSGVLIFGKQDSGKTNVDIEKVMITDEEEIRTTNPVATEQYGSVSTNLQSGNTQAATSDVNTQGVLPGMVWQDRDVYLQGPIWAKIPHTDGHFHPSPLMGGFGPKHPPPQILIKNTPVPANPSTTFSAAKFASFITQYSTGQVSVEIEWELQKENSKRWNPEIQYTSNYNKSVNVDFTVDTNGVYSEPRPIGTRYLTRNL

SEQ ID NO: 2527 - protein, 735 aa, synthetic construct
  REGION 1..735: note = source = /note="Description of Artificial Sequence: Synthetic polypeptide"
MAADGYLPDWLEDTLSEGIRQWWKLKPGPPPPKPAERHKDDSRGLVLPGYKYLGPFNGLDKGEPVNEADAAALEHDKAYDRQLDSGDNPYLKYNHADAEFQERLKEDTSFGGNLARAVFQAKKRVLEPLGLVEEPVKTAPGKKRPVEHSPAEPDSSSGTGKSGQQPARKRLNFGQTGDADSVPGPQPLGQPPAAPSGLGTNTMASGSGAPMADNNEGADGVGNSSGNWHCDSTWMGDRVITTSTRTWALPTYNNHLYKQISSQSGASNDNHYFGYSTPWGYFDFNRFHCHFSPRDWQRLINNNWGFRPKRLNFKLFNIQVKEVTQNDGTTTVANNLTSTVQVFTDSEYQLPYVLGSAHQGCLPPFPADVFMVPQYGYLTLNNGSQAVGRSSFYCLEYFPSQMLRTGNNFTFSYTFEDVPFHSSYAHSQSLDRLMNPLIDQYLYYLSRTNTPSGTTTQSRLQFSQAGASDIRDQSRNWLPGPCYRQQRVSKTAADNNNSDYSWTGATKYHLNGRDSLVNPGTAMASHKDDEEKYFPQSGVLIFGKQDSGKTNVDIEKVMITDEEEIRTTNPVATEQYGSVSTNLQSGNTQAATSDVNTQGVLPGMVRQDRDVYLQGPIWAKIPHTDGHFHPSPLMGGFGLKHPPPQILIKNTPVPANPSTTFSAAKFASFITQYSTGQVSVEIEWEPQKENSKRWNPEIQYTSNYNKSVNVDFTVDTNGVYSEPRPIGTRYLTRNL

SEQ ID NO: 2528 - protein, 735 aa, synthetic construct
  REGION 1..735: note = source = /note="Description of Artificial Sequence: Synthetic polypeptide"
MAADGYLPDWLEDTLSEGIRQWWKLKPGPPPPKPAERHKDDSRGLVLPGYKYLGPFNGLDKGEPVNEADAAALEHDKAYDRQLDSGDNPYLKYNHADAEFQERLKEDTSFGGNLARAVFQAKKRVLEPLGLVEEPVKTAPGKKRPVEHSPAEPDSSSGTGKSGQQPARKRLNFGQTGDADSVPDPQPLGQPPAAPSGLGTNTMASGSGAPMADNNEGADGVGNSSGNWHCDSTWMGDRVITTSTRTWALPTYNNHLYKQISSQSGASNDNHYFGYSTPWGYFDFNRFHCHFSPRDWQRLINNNWGFRPKRLNFKLFNIQVKEVTQNDGTTTIANNLTSTVQVFTDSEYQLPYVLGSAHQGCLPPFPADVFMVPQYGYLTLNNGSQAVGRSSFYCLEYFPSQMLRTGNNFTFSYTFEDAPFHSSYAHSQSLDRLMNPLIDQYLYYLSRTNTPSGTTTQSRLQFSQAGASDIRDQSRNWLPGPCYRQQRVSKTAADNNNSDYSWTGATKYHLNGRDSLVNPGTAMASHKDDEEKYFPQSGVLIFGKQDSGKTNVDIEKVMITDEEEIRTTNPVATEQYGSVSTNLQSGNTQAATSDVNTQGVLPGMVRQDRDVYLQGPIWAKIPHTDGHFHPSPLMGGFGLKHPPPQILIKNTPVPANPSTTFSAAKFASFITQYSTGQVSVEIEWEPQKENSKRWNPEIQYTSNYNKSVNVDFTVDTNGVYSEPRPIGTRYLTRNL

SEQ ID NO: 2529 - protein, 735 aa, synthetic construct
  REGION 1..735: note = source = /note="Description of Artificial Sequence: Synthetic polypeptide"
MAADGYLPDWLEDTLSEGIRQWWKLKPGPPPPKPAERHKDDSRGLVLPGYKYLGPFNGLDKGEPVNEADAAALEHDKAYDRQLDSGDNPYLKYNHADAEFQERLKEDTSFGGNLARAVFQAKKRVLEPLGLVEEPVKTAPGKKRPVEHSPAEPDSSSGTGKSGQQPARKRLNFGQTGDADSVPDPQPLGQPPAAPSGLGTNTMASGSGAPMADNNEGADGVGNSSGNWHCDSTWMGDRVIPTSTRTWALPTYNNHLYKQISSQSGASNDNHYFGYSTPWGYFDFNRFHCHFSPRDWQRLINNNWGFRPKRLNFKLFNIQVKEVTQNDGTTTIANNLTSTVQVFTDSEYQLPYVLGSAHQGCLPPFPADVFMVPQYGYLTLNNGSQAVGRSSFYCLEYFPSQMLRTGNNFTFSYTFEDVPFHSSYAHSQSLDRLMNPLIDQYLYYLSRTNTPSGTTTQSRLQFSQAGASDIRDQSRNWLPGPCYRQQRVSKTAADNNNSDYSWTGATKYHLNGRDSLVNPGTAMASHKDDEEKYFPQSGVLIFGKQDSGKTNVDIEKVMITDEEEIRTTNPVATEQYGSVSTNLQSGNTQAATSDVNTQGVLPGMVRQDRDVYLQGPIWAKIPHTDGHFHPSPLMGGFGLKHPPPQILIKNTPVPANPSTTFSAAKFASFITQYSTGQVSVEIEWEPQKENSKRWNPEIQYTSNYNKSVNVDFTVDTNGVYSEPRPIGTRYLTRNL

SEQ ID NO: 2530 - protein, 735 aa, synthetic construct
  REGION 1..735: note = source = /note="Description of Artificial Sequence: Synthetic polypeptide"
MAADGYLPDWLEDTLSEGIRQWWKLKPGPPPPKPAERHKDDSRGLVLPGYKYLGPFNGLDKGEPVNEADAAALEHDKAYDRQLDSGDNPYLKYNHADAEFQERLKEDTSFGGNLARAVFQAKKRVLEPLGLVEEPVKTAPGKKRPAEHSPAEPDSSSGTGKSGQQPARKRLNFGQTGDADSVPDPQPLGQPPAAPSGLGTNTMASGSGAPMADNNEGADGVGNSSGNWHCDSTWMGDRVITTSTRTWALPTYNNHLYKQISSQSGASNDNHYFGYSTPWGYFDFNRFHCHFSPRDWQRLINNNWGFRPKRLNFKLFNIQVKEVTQNDGTTTIANNLTSTVQVFTDSEYQLPYVLGSAHQGCLPPFPADVFMVPQYGYLTLNNGSQAVGRSSFYCLEYFPSQMLRTGNNFTFSYTFEDVPFHSSYAHSQSLDRLMNPLIDQYLYYLSRTNTPSGTTTQSRLQFSQAGASDIRDQSRNWLPGPCYRQQRVSKTAADNNNSDYSWTGATKYHLNGRDSLVNPGTAMASHKDDEEKYFPQSGVLIFGKQDSGKTNVDIEKVMITDEEEIRTTNPVATEQYGSVSTNLQSGNTQAATSDVNTQGVLPGMVRQDRDVYLQGPIWAKIPHTDGHFHPSPLMGGFGLKHPPPQILIKNTPVPANPSTTFSAAKFASFITQYSTGQVSVEIEWEPQKENSKRWNPEIQYTSNYNKSVNVDFTVDTNGVYSEPRPIGTRYLTRNL

SEQ ID NO: 2531 - protein, 735 aa, synthetic construct
  REGION 1..735: note = source = /note="Description of Artificial Sequence: Synthetic polypeptide"
MAADGYLPDWLEDTLSEGIRQWWKLKPGPPPPKPAERHKDDSRGLVLPGYKYLGPFNGLDKGEPVNEADAAALEHDKAYDRQLDSGDNPYLKYNHADAEFQERLKEDTSFGGNLARAVFQAKKRVLEPLGLVEEPVKTAPGKKRPVEHSPAEPDSSSGTGKSGQQPARKRLNFGQTGDADSVPDPQPLGQPPAAPSGLGTNTMASGSGAPMADNNEGADGVGNSSGNWHCDSTWMGDRVITTSTRTWALPTYNNHLYKQISSQSGASNDNHYFGYSTPWGYFDFNRFHCHFSPRDWQRLINNNWGFRPKRLNFKLFNIQVKEVTQNDGTTTIANNLTSTVQVFTDSEYQLPYVLGSAHQGCLPPFPADVFMVPQYGYLTLNNGSQAVGRSSFYCLEYFPSQMLRTGNNFTFSYTFEDVPFHSSYAHSQSLDRLMNPLIDQYLYYLSRTNTPSGTTTQSRLQFSQAGASDIRDQSRNWLPGPCYRQQRVSRTAADNNNSDYSWTGATKYHLNGRDSLVNPGTAMASHKDDEEKYFPQSGVLIFGKQDSGKTNVDIEKVMITDEEEIRTTNPVATEQYGSVSTNLQSGNTQAATSDVNTQGVLPGMVRQDRDVYLQGPIWAKIPHTDGHFHPSPLMGGFGLKHPPPQILIKNTPVPANPSTTFSAAKFASFITQYSTGQVSVEIEWEPQKENSKRWNPEIQYTSNYNKSVNVDFTVDTNGVYSEPRPIGTRYLTRNL

SEQ ID NO: 2532 - protein, 735 aa, synthetic construct
  REGION 1..735: note = source = /note="Description of Artificial Sequence: Synthetic polypeptide"
MAADGYLPDWLEDTLSEGIRQWWKLKPGPPPPKPAERHKDDSRGLVLPGYKYLGPFNGLDKGEPVNEADAAALEHDKAYDRQLDSGDNPYLKYNHADAEFQERLKEDTSFGGNLARAVFQAKKRVLEPLGLVEEPVKTAPGKKRPVEHSPAGPDSSSGTGKSGQQPARKRLNFGQTGDADSVPDPQPLGQPPAAPSGLGTNTMASGSGAPMADNNEGADGVGNSSGNWHCDSTWMGDRVITTSTRTWALPTYNNHLYKQISSQSGASNDNHYFGYSTPWGYFDFNRFHCHFSPRDWQRLINNNWGFRAKRLNFELFNIQVKEVTQNDGTTTIANNLTSTVQVFTDSEYQLPYVLGSAHQGCLPPFPADVFMVPQYGYLTLNNGSQAVGRSSFYCLEYFPSQMLRTGNNFTFSYTFEDVPFHSSYAHSQSLDRLMNPLIDQYLYYLSRTNTPSGTTTQSRLQFSQAGASDIRDQSRNWLPGPCYRQQRVSKTAADNNNSDYSWTGATKYHLNGRDSLVNPGTAMASHKDDEEKYFPQSGVLIFGKQDSGKTNVDIEKVMITDEEEIRTTNPVATEQYGSVSTNLQSGNTQAATSDVNTQGVLPGMVWQDRDVYLQGPIWAKIPHTDGHFHPSPLMGGFGLKHPPPQILIKSTPVPANPSTTFSAAKFASFITQYSTGQVSVEIEWELQKENSKRWNPEIQYTSNYNKSVNVDFTVDTNGVYSEPRPIGTRYLTRNL

SEQ ID NO: 2533 - protein, 735 aa, synthetic construct
  REGION 1..735: note = source = /note="Description of Artificial Sequence: Synthetic polypeptide"
MAADGYLPDWLEDTLSEGIRQWWKLKPGPPPPKPAERHKDDSRGLVLPGYKYLGPFNGLDKGEPVNEADAAALEHDKAYDRQLDSGDNPYLKYNHADAEFQERLKEDTSFGGNLARAVFQAKKRVLEPLGLVEEPVKTAPGKKRPVEHSPAEPDSSSGTGKSGQQPARKRLNFGQTGDADSVPDPQPLGQPPAAPSGLGTNTMASGSGAPMADNNEGADGVGNSSGNWHCDSTWMGDRVITTSTRTWALPTYNNHLYKQISSQSGASNDNHYFGYSTPWGYFDFNRFHCHFSPRDWQRLINNNWGFRPKRLNFKLFNIQVKEVTQNDGTTTIANNLTSTVQVFTDSEYQLPYVLGSAHQGCLPPFPADVFMVPQYGYLTLNNGSQAVGRSSFYCLEYFPSQMLRTGNNFTFSYTFEDVPFHSSYAHSQSLDRLMNPLIDQYLYYLSRTNTPSGTTTQSRLRFSQAGASDIRDQSRNWLPGPCYRQQRVSKTAADNNNSDYSWTGATKYHLNGRDSLVNPGTAMASHKDDEEKYFPQSGVLIFRKQDSGKTNVDIERVMITDEEEIRTTNPVATEQYGSVSTNLQSGNTQAATSDVNTQGVLPGMVWQDRDVYLQGPIWAKIPHTDGHFHPSPLMGGFGLKHPPPQILIKNTPVPANPSTTFSAAKFASFITQYSTGQVSVEIEWELQKENSKRWNPEIQYTSNYNKSVNVDFTVDTNGVYSEPRPIGTRYLTRNL

SEQ ID NO: 2534 - protein, 735 aa, synthetic construct
  REGION 1..735: note = source = /note="Description of Artificial Sequence: Synthetic polypeptide"
MAADGYLPDWLEDTLSEGIRQWWKLKPGPPPPKPAERHKDDSRGLVLPGYKYLGPFNGLDKGEPVNEADAAALEHDKAYDRQLDSGDNPYLKYNHADAEFQERLKEDTSFGGNLARAVFQAKKRVLEPLGLVEEPVKTAPGKKRPVEHSPAEPDSSSGTGKSGQQPARKRLNFGQTGDADSVPDPQPLGQPPAAPSGLGTNTMASGSGAPMADNNEGADGVGNSSGNWHCDSTWMGDRVITTSTRTWALPTYNNHLYKQISSQSGASNDNHYFGYSTPWGYFDFNRFHCHFSPRDWQRLINNNWGFRAKRLNFKLFNIQVKEVTQNDGTTTIANNLTSTVQVFTDSEYQLPYVLGSAHQGCLPPFPADVFMVPQYGYLTLNNGSQAVGRSSFYCLEYFPSQMLRTGNNFTFSYTFEDVPFHSSYAHSQSLDRLMNPLIDQYLYYLSRTNTPSGTTTQSRLRFSQAGASDIRDQSRNWLPGPCYRQQRVSKTAADNNNSDYSWTGATKYHLNGRDSLVNPGTAMASHKDDEEKYFPQSGVLIFGKQDSGKTNVDIERVMITDEEEIRTTNPVATEQYGSVSTNLQSGNTQAATSDVNTQGVLPGMVWQDRDVYLQGPIWAKIPHTDGHFHPSPLMGGFGLKHPPPQILIKNTPVPANPSTTFSAAKFASFITQYSTGQVSVEIEWELQKENSKRWNPEIQYTSNYNKSVNVDFTVDTNGVYSEPRPIGTRYLTRNL

SEQ ID NO: 2535 - protein, 735 aa, synthetic construct
  REGION 1..735: note = source = /note="Description of Artificial Sequence: Synthetic polypeptide"
MAADGYLPDWLEDTLSEGIRQWWKLKPGPPPPRPAERHQDDSRGLVLPGYKYLGPFNGLDKGEPVNEADAAALEHDKAYDRQLDSGDNPYLKYNHADAEFQERLKEDTSFGGNLGRAVFQAKKRVLEPLGLVEEPVKTAPGKKRPVEHSPAEPDSSSGTGKAGQQPARKRLNFGQTGDADSVPDPQPLGQPPAAPTSLGSTTMATGSGAPMADNNEGADGVGNSSGNWHCDSQWLGDRVITTSTRTWALPTYNNHLYKQISSQSGASNDNHYFGYSTPWGYFDFNRFHCHFSPRDWQRLINNNWGFRPKRLNFELFNIQVKEVTQNDGTTTIANNLTSTVQVFTDSEYQLPYVLGSAHQGCLPPFPADVFMVPQYGYLTLNNGSQAVGRSSFYCLEYFPSQMLRTGNNFTFSYTFEDVPFHSSYAHSQSLDRLMNPLIDQYLYYLSRTNTPSGTTTQSRLQFSQAGASDIRDQSRNWLPGPCYRQQRVSKTAADNNNSDYSWTGATKYHLNGRDSLVNPGTAMASHKDDEEKYFPQSGVLIFGKQDSGKTNVDIEKVMITDEEEIRTTNPVATEQYGSVSTNLQSGNTQAATSDVNTQGVLPGMVWQDRDVYLQGPIWAKIPHTDGHFHPSPLMGGFGLKHPPPQILIKSTPVPANPSTTFSAAKFASFITQYSTGQVSVEIEWELQKENSKRWNPEIQYTSNYNKSVNVDFTVDTNGVYSEPRPIGTRYLTRNL

SEQ ID NO: 2536 - protein, 735 aa, synthetic construct
  REGION 1..735: note = source = /note="Description of Artificial Sequence: Synthetic polypeptide"
MAADGYLPDWLEDTLSEGIRQWWKLKPGPPPPKPAERHKDDSRGLVLPGYKYLGPFNGLDKGEPVNEADAAALEHDKAYDRQLDSGDNPYLKYNHADAEFQERLKEDTSFGGNLARAVFQAKKRVLEPLGLVEEPVKTAPGKKRPVEHSPAGPDSSSGTGKSGQQPARKRLNFGQTGDADSVPDPQPLGQPPAAPSGLGTNTMASGSGAPMADNNEGADGVGNSSGNWHCDSTWMGDRVITTSTRTWALPTYNNHLYKQISSQSGASNDNHYFGYSTPWGYFDFNRFHCHFSPRDWHRLINNNWGFRPKRLNFELFNIQVKEVTQNDGTTTIANNLTSTVQVFTDSEYQLPYVLGSAHQGCLPPFPADVFMVPQYGYLTLNNGSQAVGRSSFYCLEYFPSQMLRTGNNFTFSYTFEDVPFHSSYARSQSLDRLMNPLIDQYLYYLSRTNTPSGTTTQSRLQFSQAGASDIRDQSRNWLPGPCYRQQRVSKTAADNNNSDYSWTGATKYHLNGRDSLVNPGTAMASHKDDEEKYFPQSGVLIFGKQDSGKTNVDIEKVMITDEEEIRTTNPVATEQYGSVSTNLQSGNTQAATSDVNTQGVLPGMVWQDRDVYLQGPIWAKIPHTDGHFHPSPLMGGFGLKHPPPQILIKSTPVPANPSTTFSAAKFASFITQYSTGQVSVEIEWELQKENSKRWNPEIQYTSNYNKSVNVDFTVDTNGVYSEPRPIGTRYLTRNL

SEQ ID NO: 2537 - protein, 735 aa, synthetic construct
  REGION 1..735: note = source = /note="Description of Artificial Sequence: Synthetic polypeptide"
MAADGYLPDWLEDTLSEGIRQWWKLKPGPPPPKPAERHKDDSRGLVLPGYKYLGPFNGLDKGEPVNEADAAALEHDKAYDRQLDSGDNPYLKYNHADAEFQERLKEDTSFGGNLARAVFQAKKRVLEPLGLVEEPVKTAPGKKRPVEHSPAGPDSSSGTGKSGQQPARKRLNFGQTGDADSVPDPQPLGQPPAAPSGLGTNTMASGSGAPMADNNEGADGVGNSSGNWHCDSTWMGDRVITTSTRTWALPTYNNHLYKQISSQSGASNDNHYFGYSTPWGYFDFNRFHCHFSPRDWQRLINNNWGFRPKRLNFELFNIQVKEVTQNDGTTTIANNLTSTVQVFTDSEYQLPYVLGSAHQGCLPPFPADVFMVPQYGYLTLNNGSQAVGRSSFYCLEYFPSQMLRTGNNFTFSYTFEDVPFHSSYAHSQSLDRLMNPLIDQYLYYLSRTNTPSGTTTQSRLQFSQAGASDIRDQSRNWLPGPCYRQQRVSKTAADNNNSDYSWTGATKYHLNGRDSLVNPGTAMASHKDDEEKYFPQSGVLIFGKQDSGKTNVDIEKVMITDEEEIRTTNPVATEQYGSVSTNLQSGNTQAATSDVNTQGVLPGMVWQDRDVYLQGPIWAKIPHTDGHFHPSPLMGGFGLKHPPPQILIKSTPVPANPSTTFSAAKFASFITQYSTGQVSVEIEWELQKENSKRWNPEIQYTSNYNKSVNVDFTVDANGVYSEPRPIGTRYLTRNL

SEQ ID NO: 2538 - protein, 735 aa, synthetic construct
  REGION 1..735: note = source = /note="Description of Artificial Sequence: Synthetic polypeptide"
MAADGYLPDWLEDTLSEGIRQWWKLKPGPPPPKPAERHKDDSRGLVLPGYKYLGPFNGLDKGEPVNEADAAALEHDKAYDRQLDSGDNPYLKYNHADAEFQERLKEDTSFGGNLARAVFQAKKRVLEPLGLVEEPVKTAPGKKRPVEHSPAGPDSSSGTGKSGQQPARKRLNFGQTGDADSVPDPQPLGQPPAAPSGLGTNTMASGSGAPMADNNEGADGVGNSSGNWHCDSTWMGDRVITTSTRTWALPTYNNHLYKQISSQSGASNDNHYFGYSTPWGYFDFNRFHCHFSPRDWQRLINNNLGFRAKRLNFELFNIQVKEVTQNDGTTTIANNLTSTVQVFTDSEYQLPYVLGSAHQGCLPPFPADVFMVPQYGYLTLNNGSQAVGRSSFYCLEYFPSQMLRTGNNFTFSYTFEDVPFHSSYAHSQSLDRLMNPLIDQYLYYLSRTNTPSGTTTQSRLQFSQAGASDIRDQSRNWLPGPCYRQQRVSKTAADNNNSDYSWTGATKYHLNGRDSLVNPGTAMASHKDDEEKYFPQSGVLIFGKQDSGKTNVDIEKVMITDEEEIRTTNPVATEQYGSVSTNLQSGNTQAATSDVNTQGVLPGMVWQDRDVYLQGPIWAKIPHTDGHFHPSPLMGGFGLKHPPPQILIKSTPVPANPSTTFSAAKFASFITQYSTGQVSVEIEWELQKENSKRWNPEIQYTSNYNKSVNVDFTVDTNGVYSEPRPIGTRYLTRNL

SEQ ID NO: 2539 - protein, 735 aa, synthetic construct
  REGION 1..735: note = source = /note="Description of Artificial Sequence: Synthetic polypeptide"
MAADGYLPDWLEDTLSEGIRQWWKLKPGPPPPKPAERHKDDSRGLVLPGYKYLGPFNGLDKGEPVNEADAAALEHDKAYDRQLDSGDNPYLKYNHADAEFQERLKEDTSFGGNLARAVFQAKKRVLEPLGLVEEPVKTAPGKKRPVEHSPAEPDSSSGTGKSGQQPARKRLNFGQTGDADSVPDPQPLGQPPAAPSGLGTNTMASGSGAPMADNNEGADGVGNSSGNWHCDSTWMGDRVITTSTRTWALPTYNNHLYKQISSQSGASNDNHYFGYSTPWGYFDFNRFHCHFSPRDWQRLINNNWGFRPKRLNFELFNIQVKEVTQNDGTTTIANNLTSTVQVFTDSEYQLPYVLGSAHQGCLPPFPADVFMVPQYGYLTLNNGSQAVGRSSFYCLEYFPSQMLRTGNNFTFSYTFEDVPFHSSYAHSQSLDRLMNPLIDQYLYYLSRTNTPSGTTTQSRLQFSQAGASDIRDQSRNWLPGPCYRQQRVSKTAADNNNSDYSWTGATKYHLNGRDSLVNPGTAMASHKDDEEKYFPQSGVLIFRKQDSGKTNVDIEKVMITDEEEIRTTNPVATEQYGSVSTNLQSGNTQAATSDVNTQGVLPGMVWQDRDVYLQGPIWAKIPHTDGHFHPSPLMGGFGLKHPPPQILIKSTPVPANPSTTFSAAKFASFITQYSTGQVSVEIEWELQKENSKRWNPEIQYTSNYNKSVNVDFTVDTNGVYSEPRPIGTRYLTRNL

SEQ ID NO: 2540 - protein, 735 aa, synthetic construct
  REGION 1..735: note = source = /note="Description of Artificial Sequence: Synthetic polypeptide"
MAADGYLPDWLEDTLSEGIRQWWKLKPGPPPPKPAERHQDDSRGLVLPGHKYLGPFNGLDKGEPVNEADAAALEHDKAYDRQLDSGDNPYLKYNHADAEFQERLKEDTSFGGNLGRAVFQAKKRVLEPLGLVEEPVKTAPGKKRPVEHSPAGPDSSSGTGKSGQQPARKRLNFGQTGDADSVPDPQPLGQPPAAPSGLGTNTMASGSGAPMADNNEGADGVGNSSGNWHCDSTWMGDRVITTSTRTWALPTYNNHLYKQISSQSGASNDNHYFGYSTPWGYFDFNRFHCHFSPRDWQRLINNNWGFRPKRLNFELFNIQVKEVTQNDGTTTIANNLTSTVQVFTDSEYQLPYVLGSAHQGCLPPFPADVFMVPQYGYLTLNNGSQAVGRSSFYCLEYFPSQMLRTGNNFTFSYTFEDVPFHSSYAHSQSLDRLMNPLIDQYLYYLSRTNTPSGTTTQSRLQFSQAGASDIRDQSRNWLPGPCYRQQRVSKTAADNNNSDYSWTGATKYHLNGRDSLVNPGTAMASHKDDEEKYFPQSGVLIFGKQDSGKTNVDIEKVMITDEEEIRTTNPVATEQYGSVSTNLQSGNTQAATSDVNTQGVLPGMVWQDRDVYLQGPIWAKIPHTDGHFHPSPLMGGFGLKHPPPQILIKSTPVPANPSTTFSAAKFASFITQYSTGQVSVEIEWELQKENSKRWNPEIQYTSNYNKSVNVDFTVDTNGVYSEPRPIGTRYLTRNL

SEQ ID NO: 2541 - protein, 735 aa, synthetic construct
  REGION 1..735: note = source = /note="Description of Artificial Sequence: Synthetic polypeptide"
MAADGYLPDWLEDTLSEGIRQWWKLKPGPPPPKPAERHKDDSRGLVLPGYKYLGPFNGLDKGEPVNEADAAALEHDKAYDRQLDSGDNPYLKYNHADAEFQERLKEDTSFGGNLARAVFQAKKRVLEPLGLVEEPVKTAPGKKRPVEHSPAGPDSSSGTGKSGQQPARKRLNFGQTGDADSVPDPQPLGQPPAAPSGLGTNTMASGSGAPMADNNEGADGVGNSSGNWHCDSTWMGDRVITTSTRTWALPTYNNHLYKQISSQSGASNDNHYFGYSTPWGYFDFNRFHCHFSPRDWHRLINNNWGFRPKRLNFELFNIQVKEVTQNDGTTTIANNLTSTVQVFTDSEYQLPYVLGSAHQGCLPPFPADVFMVPQYGYLTLNNGSQAVGRSSFYCLEYFPSQMLRTGNNFTFSYTFEDVPFHSSYAHSQSLDRLMNPLIDQYLYYLSRTNTPSGTTTQSRLQFSQAGASDIRDQSRNWLPGPCYRQQRVSKTAADNNNSDYSWTGATKYHLNGRDSLVNPGTAMASHKDDEEKYFPQSGVLIFGKQDSGKTNVDIEKVMITDEEEIRTTNPVATEQYGSVSTNLQSGNTQAATSDVNTQGVLPGMVWQDRDVYLQGPIWAKIPHTDGHFHPSPLMGGFGLKHPPPQILIKSTPVPANPSTTFSAAKFASFITQYSTGQVSVEIEWELQKENSKRWNPEIQYTSNYNKSVNVDFTVDTNGVYSEPRPIGTRYLTRNL

SEQ ID NO: 2542 - protein, 735 aa, synthetic construct
  REGION 1..735: note = source = /note="Description of Artificial Sequence: Synthetic polypeptide"
MAADGYLPDWLEDTLSEGIRQWWKLKPGPPPPKPAERHKDDSRGLVLPGYKYLGPFNGLDKGEPVNEADAAALEHDKAYDRQLDSGDNPYLKYNHADAEFQERLKEDTSFGGNLGRAVFQAKKRVLEPLGLVEEPVKTAPGKKRPVEHSPVEPDSSSGTGKAGQQPARKRLNFGQTGDADSVPDPQPLGQPPAAPSGLGTNTMATGSGAPMADNNEGADGVGNSSGNWHCDSTWMGDRVITTSTRTWALPTYNNHLYKQISSQSGASNDNHYFGYSTPWGYFDFNRFHCHFSPRDWQRLINNNWGFRPKRLSFKLFNIQVKEVTQNDGTTTIANNLTSTVQVFTDSEYQLPYVLGSAHQGCLPPFPADVFMVPQYGYLTLNNGSQAVGRSSFYCLEYFPSQMLRTGNNFTFSYTFEDVPFHSGYAHSQSLDRLMNPLIDQYLYYLSKTNAPSGTTTMSRLQFSQAGASDIRDQSRNWLPGPCYRQQRVSKTAADNNNSDYSWTGATKYHLNGRDSLVNPGPAMASHKDDEEKYFPQSGVLIFGKQGSNKTNVDIEKVMITDEEEIRTTNPVATEQYGSVSTNLQSGNTQAATSDVNTQGVLPGMVWQDRDVYLQGPIWAKIPHTDGHFHPSPLMGGFGLKHPPPQILIKNTPVPANPSTTFSAAKFASFITQYSTGQVSVEIEWELQKENSKRWNPEIQYTSNYNKSVNVDFTVDTNGVYSEPRPIGTRYLTRNL

SEQ ID NO: 2543 - protein, 735 aa, synthetic construct
  REGION 1..735: note = source = /note="Description of Artificial Sequence: Synthetic polypeptide"
MAADGYLPDWLEDTLSEGIRQWWKLKPGPPPPRPAERHQDDSRGLVLPGYKYLGPFNGLDKGEPVNEADAAALEHDKAYDRQLDSGDNPYLKYNHADAEFQERLKEDTSFGGNLGRAVFQAKKRVLEPLGLVEEPVKTAPGKKRPVEHSPAEPDSSSGTGKAGQQPARKRLNFGQTGDADSVPDPQPLGQPPAAPTSLGSTTMATGSGAPMADNNEGADGVGNSSGNWHCDSTWMGDRVITTSTRTWALPTYNNHLYKQISSQSGASNDNHYFGYSTPWGYFDFNRFHCHFSPRDWQRLINNNWGFRPKRLNFELFNIQVKEVTQNDGTTTIANNLTSTVQVFTDSEYQLPYVLGSAHQGCLPPFPADVFMVPQYGYLTLNNGSQAVGRSSFYCLEYFPSQMLRTGNNFTFSYTFEDVPFHSSYAHSQSLDRLMNPLIDQYLYYLSRTNTPSGTTTQSRLQFSQAGASDIRDQSRNWLPGPCYRQQRVSKTAADNNNSDYSWTGATKYHLNGRDSLVNPGTAMASHKDDEEKYFPQSGVLIFGKQDSGKTNVDIEKVMITDEEEIRTTNPVATEQYGSVSTNLQSGNTQAATSDVNTQGVLPGMVWQDRDVYLQGPIWAKIPHTDGHFHPSPLMGGFGLKHPPPQILIKSTPVPANPSTTFSAAKFASFITQYSTGQVSVEIEWELQKENSKRWNPEIQYTSNYNKSVNVDFTVDTNGVYSEPRPIGTRYLTRNL

SEQ ID NO: 2544 - protein, 735 aa, synthetic construct
  REGION 1..735: note = source = /note="Description of Artificial Sequence: Synthetic polypeptide"
MAADGYLPDWLEDTLSEGIRQWWKLKPGPPPPKPAERHQDDSRGLVLPGHKYLGPFNGLDKGEPVNEADAAALEHDKAYDRQLDSGDNPYLKYNHADAEFQERLKEDTSFGGNLGRAVFQAKKRVLEPLGLVEEPVKTAPGKKRPVEHSPAEPDSSSGTGKAGQQPARKRLNFGQTGDADSVPDPQPLGQPPAAPSGLGTNTMASGSGAPMADNNEGADGVGNSSGNWHCDSTWMGDRVITTSTRTWALPTYNNHLYKQISSQSGASNDNHYFGYSTPWGYFDFNRFHCHFSPRDWQRLINNNWGFRPKRLNFELFNIQVKEVTQNDGTTTIANNLTSTVQVFTDSEYQLPYVLGSAHQGCLPPFPADVFMVPQYGYLTLNNGSQAVGRSSFYCLEYFPSQMLRTGNNFTFSYTFEDVPFHSSYAHSQSLDRLMNPLIDQYLYYLSRTNTPSGTTTQSRLQFSQAGASDIRDQSRNWLPGPCYRQQRVSKTAADNNNSDYSWTGATKYHLNGRDSLVNPGTAMASHKDDEEKYFPQSGVLIFGKQDSGKTNVDIEKVMITDEEEIRTTNPVATEQYGSVSTNLQSGNTQAATSDVNTQGVLPGMVWQDRDVYLQGPIWAKIPHTDGHFHPSPLMGGFGLKHPPPQILIKSTPVPANPSTTFSAAKFASFITQYSTGQVSVEIEWELQKENSKRWNPEIQYTSNYNKSVNVDFTVDTNGVYSEPRPIGTRYLTRNL

SEQ ID NO: 2545 - protein, 735 aa, synthetic construct
  REGION 1..735: note = source = /note="Description of Artificial Sequence: Synthetic polypeptide"
MAADGYLPDWLEDTLSEGIRQWWKLKPGPPPPKPAERHKDDSRGLVLPGYKYLGPFNGLDKGEPVNEADAAALEHDKAYDRQLDSGDNPYLKYNHADAEFQERLKEDTSFGGNLARAVFQAKKRVLEPLGLVEEPVKTAPGKKRPVEHSPAEPDSSSGTGKSGQQPARKRLNFGQTGDADSVPDPQPLGQPPAAPSGLGTNTMASGSGAPMADNNEGADGVGNSSGNWHCDSTWMGDRVITTSTRTWALPTYNNHLYKQISSQSGASNDNHYFGYSTPWGYFDFNRFHCHFSPRDWQRLINNNWGFRPKRLNFKLFNIQVKEVTQNDGTTTIANNLTSTVQVFTDSEYQLPYVLGSAHQGCLPPFPADVFMVPQYGYLTLNNGSQAVGRSSFYCLEYFPSQMLRTGNNFTFSYTFEDVPFHSSYAHSQSLDRLMNPLIDQYLYYLSRTNTPSGTTTQSRLRFSQAGASDIRDQSRNWLPGPCYRQQRVSKTAADNNNSDYSWTGATKYHLNGRDSLVNPGTAMASHKDDEEKYFPQSGVLIFGKQDSEKTNVDIERVMITDEEEIRTTNPVATEQYGSVSTNLQSGNTQAATSDVNTQGVLPGMVWQDRDVYLQGPIWAKIPHTDGHFHPSPLMGGFGLKHPPPQILIKNTPVPANPSTTFSAAKFASFITQYSTGQVSVEIEWELQKENSKRWNPEIQYTSNYNKSVNVDFTVDTNGVYSEPRPIGTRYLTRNL

SEQ ID NO: 2546 - protein, 735 aa, synthetic construct
  REGION 1..735: note = source = /note="Description of Artificial Sequence: Synthetic polypeptide"
MAADGYLPDWLEDTLSEGIRQWWKLKPGPPPPKPAERHQDDSRGLVLPGYKYLGPFNGLDKGEPVNEADAAALEHDKAYDRQLDSGDNPYLKYNHADAEFQERLKEDTSFGGNLGRAVFQAKKRVLEPLGLVEEPVKTAPGKKRPVEHSPVEPDSSSGTGKAGQQPARKRLNFGQTGDADSVPDPQPLGQPPAAPSGLGTNTMATGSGAPMADNNEGADGVGNSSGNWHCDSTWMGDRVITTSTRTWALPTYNNHLYKQISSQSGASNDNHYFGYSTPWGYFDFNRFHCHFSPRDWQRLINNNWGFRPKRLSFKLFNIQVKEVTQNDGTTTIANNLTSTVQVFTDSEYQLPYVLGSAHQGCLPPFPADVFMVPQYGYLTLNNGSQAVGRSSFYCLEYFPSQMLRTGNNFTFSYTFEDVPFHSSYAHSQSLDRLMNPLIDQYLYYLSKTNAPSGTTTMSRLQFSQAGASDIRDQSRNWLPGPCYRQQRVSKTAADNNNSDYSWTGATKYHLNGRDSLVNPGPAMASHKDDEEKYFPQSGVLIFGKQGSNKTNVDIEKVMITDEEEIRTTNPVATEQYGSVSTNLQSGNTQAATSDVNTQGVLPGMVWQDRDVYLQGPIWAKIPHTDGHFHPSPLMGGFGLKHPPPQILIKNTPVPANPSTTFSAAKFASFITQYSTGQVSVEIEWELQKENSKRWNPEIQYTSNYNKSVNVDFTVDTNGVYSEPRPIGTRYLTRNL

SEQ ID NO: 2547 - protein, 735 aa, synthetic construct
  REGION 1..735: note = source = /note="Description of Artificial Sequence: Synthetic polypeptide"
MAADGYLPDWLEDTLSEGIRQWWKLKPGPPPPRPAERHQDDSRGLVLPGYKYLGPFNGLDKGEPVNEADAAALEHDKAYDRQLDSGDNPYLKYNHADAEFQERLKEDTSFGGNLGRAVFQAKKRVLEPLGLVEEPVKTAPGKKRPVEHSPAGPDSSSGTGKSGQQPARKRLNFGQTGDADSVPDPQPLGQPPAAPSGLGTNTMASGSGAPMADNNEGADGVGNSSGNWHCDSTWMGDRVITTSTRTWALPTYNNHLYKQISSQSGASNDNHYFGYSTPWGYFDFNRFHCHFSPRDWQRLINNNWGFRAKRLNFELFNIQVKEVTQNDGTTTIANNLTSTVQVFTDSEYQLPYVLGSAHQGCLPPFPADVFMVPQYGYLTLNNGSQAVGRSSFYCLEYFPSQMLRTGNNFTFSYTFEDVPFHSSYAHSQSLDRLMNPLIDQYLYYLSRTNTPSGTTTQSRLQFSQAGASDIRDQSRNWLPGPCYRQQRVSKTAADNNNSDYSWTGATKYHLNGRDSLVNPGTAMASHKDDEEKYFPQSGVLIFGKQDSGKTNVDIEKVMITDEEEIRTTNPVATEQYGSVSTNLQSGNTQAATSDVNTQGVLPGMVWQDRDVYLQGPIWAKIPHTDGHFHPSPLMGGFGLKHPPPQILIKSTPVPANPSTTFSAAKFASFITQYSTGQVSVEIEWELQKENSKRWNPEIQYTSNYNKSVNVDFTVDTNGVYSEPRPIGTRYLTRNL

SEQ ID NO: 2548 - protein, 735 aa, synthetic construct
  REGION 1..735: note = source = /note="Description of Artificial Sequence: Synthetic polypeptide"
MAADGYLPDWLEDTLSEGIRQWWKLKPGPPPPKPAERHKDDSRGLVLPGYKYLGPFNGLDKGEPVNEADAAALEHDKAYDRQLDSGDNPYLKYNHADAEFQERLKEDTSFGGNLARAVFQAKKRVLEPLGLVEEPVKTAPGKKRPVEHSPAGPDSSSGTGKSGQQPARKRLNFGQTGDADSVPDPQPLGQPPAAPSGLGTNTMASGSGAPTADNNEGADGVGNSSGNWHCDSTWMGDRVITTSTRTWALPTYNNHLYKQISSQSGASNDNHYFGYSTPWGYFDFNRFHCHFSPRDWQRLINNNWGFRPKRLNFELFNIQVKEVTQNDGTTTIANNLTSTVQVFTDSEYQLPYVLGSAHQGCLPPFPADVFMVPQYGYLTLNNGSQAVGRSSFYCLEYFPSQMLRTGNNFTFSYTFEDVPFHSSYAHSQSLDRLMNPLIDQYLYYLSRTNTPSGTTTQSRLQFSQAGASDIRDQSRNWLPGPCYRQQRVSKTAADNNNSDYSWTGATKYHLNGRDSLVNPGTAMASHKDDEEKYFPQSGVLIFGKQDSGKTNVDIEKVMITDEEEIRTTNPVATEQYGSVSTNLQSGNTQAATSDVNTQGVLPGMVWQDRDVYLQGPIWAKIPHTDGHFHPSPLMGGFGLKHPPPQILIKSTPVPANPSTTFSAAKFASFITQYSTGQVSVEIEWELQKENSKRWNPEIQYTSNYNKSVNVDFTVDTNGVYSEPRPIGTRYLTRNL

SEQ ID NO: 2549 - protein, 735 aa, synthetic construct
  REGION 1..735: note = source = /note="Description of Artificial Sequence: Synthetic polypeptide"
MAADGYLPDWLEDTLSEGIRQWWKLKPGPPPPKPAERHKDDSRGLVLPGYKYLGPFNGLDKGEPVNEADAAALEHDKAYDRQLDSGDNPYLKYNHADAEFQERLKEDTSFGGNLARAVFQAKKRVLEPLGLVEEPVKTAPGKKRPVEHSPAGPDSSSGTGKSGQQPARKRLNFGQTGDADSVPDPQPLGQPPAAPSGLGTNTMASGSGAPMADNNEGADGVGNSSGNWHCDSTWMGDRVITTSTRTWALPTYNNHLYKQISSQSGASNDNHYFGYSTPWGYFDFNRFHCHFSPRDWQRLINNNWGFRPKRLNFELFNIQVKEVTQNDGTTTIANNLTSTVQVFTDSEYQLPYVLGSAHQGCLPPFPADVFMVPQYGYLTLNNGSQAVGRSSFYCLEYFPSQMLRTGNNFTFSYTFEDVPFHSSYAHSQSLDRLMNPLIDQYLYYLSRTNTPSGTTTQSRLQFSQAGASDIRDQSRNWLPGPCYRQQRVSKTAADNNNSDYSWTGATKYHLNGRDSLVNPGTAMASHKDDEEKYFPQSGVLIFRKQDSGKTNVDIEKVMITDEEEIRTTNPVATEQYGSVSTNLQSGNTQAATSDVNTQGVLPGMVWQDRDVYLQGPIWAKIPHTDGHFHPSPLMGGFGLKHPPPQILIKSTPVPANPSTTFSAAKFASFITQYSTGQVSVEIEWELQKENSKRWNPEIQYTSNYNKSVNVDFTVDTNGVYSEPRPIGTRYLTRNL

SEQ ID NO: 2550 - protein, 735 aa, synthetic construct
  REGION 1..735: note = source = /note="Description of Artificial Sequence: Synthetic polypeptide"
MAADGYLPDWLEDTLSEGIRQWWKLKPGPPPPKPAERHKDDSRGLVLPGYKYLGPFNGLDKGEPVNEADAAALEHDKAYDRQLDSGDNPYLKYNHADAEFQERLKEDTSFGGNLARAVFQAKKRVLEPLGLVEEPVKTAPGKKRPVEHSPAEPDSSSGTGKSGQQPARKRLNFGQTGDADSVPDPQPLGQPPAAPSGLGTNTMASGSGAPMADNNEGADGVGNSSGNWHCDSTWMGDRVITTSTRTWALPTYNNHLYKQISSQSGASNDNHYFGYSTPWGYFDFNRFHCHFSPRDWQRLINNNWGFRPKRLNFKLFNIQVKEVTQNDGTTTIANNLTSTVQVFTDSEYQLPYVLGSAHQGCLPPFPADVFMVPQYGYLTLNNGSQAVGRSSFYCLEYFPSQMLRTGNNFTFSYTFEDVPFHSSYAHSQSLDRLMNPLIDQYLYYLSRTNTPSGTTTQSRLQFSQAGASDIRDQSRNWLPGPCYRQQRVSKTAADNNNSDYSWTGATKYHLNGRDSLVNPGTAMASHKDDEEKYFPQSGALIFGKQDSGKTNVDIEKVMITDEEEIRTTNPVATEQYGSVSTNLQSGNTQAATSDVNTQGVLPGMVWQDRDVYLQGPIWAKIPHTDGHFHPSPLMGGFGLKHPPPQILIKNTPVPANPSTTFSAAKFASFITQYSTGQVSVEIEWELQKENSKRWNPEIQYTSNYNKSVNVDFTVDTNGVYSEPRPIGTRYLTRNL

SEQ ID NO: 2551 - protein, 735 aa, synthetic construct
  REGION 1..735: note = source = /note="Description of Artificial Sequence: Synthetic polypeptide"
MAADGYLPDWLEDTLSEGIRQWWKLKPGPPPPKPAERHKDDSRGLVLPGYKYLGPFNGLDKGEPVNEADAAALEHDKAYDRQLDSGDNPYLKYNHADAEFQERLKEDTSFGGNLARAVFQAKKRVLEPLGLVEEPVKTAPGKKRPVEHSPAEPGSSSGTGKSGQQPARKRLNFGQTGDADSVPDPQPLGQPPAAPSGLGTNTMASGSGAPMADNNEGADGVGNSSGNWHCDSTWMGDRVITTSTRTWALPTYNNHLYKQISSQSGASNDNHYFGYSTPWGYFDFNRFHCHFSPRDWQRLINNNWGFRPKRLNFKLFNIQVKEVTQNDGTTTIANNLTSTVQVFTDSEYQLPYVLGSAHQGCLPPFPADVFMVPQYGYLTLNNGSQAVGRSSFYCLEYFPSQMLRTGNNFTFSYTFEDVPFHSSYARSQSLDRLMNPLIDQYLYYLSRTNTPSGTTTQSRLRFSQAGASDIRDQSRNWLPGPCYRQQRVSKTAADNNNSDYSWTGATKYHLNGRDSLVNPGTAMASHKDDEEKYFPQSGVLIFGKQDSGKTNVDIERVMITDEEEIRTTNPVATEQYGSVSTNLQSGNTQAATSDVNTQGVLPGMVWQDRDVYLQGPIWAKIPHTDGHFHPSPLMGGFGLKHPPPQILIKNTPVPANPSTTFSAAKFASFITQYSTGQVSVEIEWELQKENSKRWNPEIQYTSNYNKSVNVDFTVDTKGVYSEPRPIGTRYLTRNL

SEQ ID NO: 2552 - protein, 735 aa, synthetic construct
  REGION 1..735: note = source = /note="Description of Artificial Sequence: Synthetic polypeptide"
MAADGYLPDWLEDTLSEGIRQWWKLKPGPPPPKPAERHKDDSRGLVLPGYKYLGPFNGLDKGEPVNEADAAALEHDKAYDRQLDSGDNPYLKYNHADAEFQERLKEDTSFGGNLARAVFQAKKRVLEPLGLVEEPVKTAPGKKRPVEHSPAEPDSSSGTGKSGQQPARKRLNFGQTGDADSVPDPQPLGQPPAAPSGLGTNTMASGSGAPMADNNEGADGVGNSSGNWHCDSTWMGDRVITTSTRTWALPTYNNHLYKQISSQSGASNDNHYFGYSTPWGYFDFNRFHCHFSPRDWQRLINNNWGFRPKRLNFKLFNIQVKEVTQNDGTTTIANNLTSTVQVFTDSEYQLPYVLGSAHQGCLPPFPADVFMVPQYGYLTLNNGSQAVGRSSFYCLEYFPSQMLRTGNNFTFSYTFEDVPFHSSYAHSQSLDRLMNPLIDQYLYYLSRTNTPSGTTTQSRLQFSQAGASDIRDQSRNWLPGPCYRQQRVSKTAADNNNSDYSWTGATKYHLNGRDSLVNPGTAMASHKDDEEKYFPQSGVLIFGKQDSGKTNVDIEKVMITDEEEIRTTNPVATEQYGSVSTNLQSGNTQAATSDVNTQGVLPGMVWQDRDVYLQGPIWAKIPHTDGHFHPSPLMGGFGLKHPPPQILIKSTPVPANPSTTFSAAKFASFITQYSTGQVSVEIEWELQKENSKRWNPEIQYTSNYNKSVNVDFTVDTNGVYSEPRPIGTRYLTRNL

SEQ ID NO: 2553 - protein, 735 aa, synthetic construct
  REGION 1..735: note = source = /note="Description of Artificial Sequence: Synthetic polypeptide"
MAADGYLPDWLEDTLSEGIRQWWKLKPGPPPPKPAERHKDDSRGLVLPGYKYLGPFNGLDKGEPVNEADAAALEHDKAYDRQLDSGDNPYLKYNHADAEFQERLKEDTSFGGNLARAVFQAKKRVLEPLGLVEEPVKTAPGKKRPVEHSPAELDSSSGTGKSGQQPARKRLNFGQTGDADSVPDPQPLGQPPAAPSGLGTNTMASGSGAPMADNNEGADGVGNSSGNWHCDSTWMGDRVITTSTRTWALPTYNNHLYKQISSQSGASNDNHYFGYSTPWGYFDFNRFHCHFSPRDWQRLINNNWGFRPKRLNFKLFNIQVKEVTQNDGTTTIANNLTSTVQVFTDSEYQLPYVLGSAHQGCLPPFPADVFMVPQYGYLTLNNGSQAVGRSSFYCLEYFPSQMLRTGNNFTFSYTFEDVPFHSSYAHSQSLDRLMNPLIDQYLYYLSRTNTPSGTTTQSRLQFSQAGASDIRDQSRNWLPGPCYRQQRVSKTAADNNNSDYSWTGATKYHLNGRDSLVNPGTAMASHKDDEEKYFPQSGVLIFGKQDSGKTNVDIEKVMITDEEEIRTTNPVATEQYGSVSTNLQSGNTQAATSDVNTQGVLPGMVWQDRDVYLQGPIWAKIPHTDGHFHPSPLMGGFGPKHPPPQILIKNTPVPANPSTTFSAAKFASFITQYSTGQVSVEIEWELQKENSKRWNPEIQYTSNYNKSVNVDFTVDANGVYSEPRPIGTRYLTRNL

SEQ ID NO: 2554 - protein, 735 aa, synthetic construct
  REGION 1..735: note = source = /note="Description of Artificial Sequence: Synthetic polypeptide"
MAADGYLPDWLEDTLSEGIRQWWKLKPGPPPPKPAERHKDDSRGLVLPGYKYLGPFNGLDKGEPVNEADAAALEHDKAYDRQLDSGDNPYLKYNHADAEFQERLKEDTSFGGNLARAVFQAKKRVLEPLGLVEEPVKTAPGKKRPVEHSPAELDSSSGTGKSGQQPARKRLNFGQTGDADSVPDPQPLGQPPAAPSGLGTNTMASGSGAPMADNNEGADGVGNSSGNWHCDSTWMGDRVITTSTRTWALPTYNNHLYKQISSQSGASNDNHYFGYSTPWGYFDFNRFHCHFSPRDWQRLINNNWGFRPKRLNFKLFNIQVKEVTQNDGTTTIANNLTSTVQVFTDSEYQLPYVLGSAHQGCLPPFPADVFMVPQYGYLTLNNGSQAVGRSSFYCLEYFPSQMLRTGNNFTFSYTFEDVPFHSSYAHSQSLDRLMNPLIDQYLYYLSRTNTPSGTTTQSRLQFSQAGASDIRDQSRNWLPGPCYRQQRVSKTAADNNNSDYSWTGATKYHLNGRDSLVNPGTAMASHKDDEEKYFPQSGVLIFGKQDSGKTNVDIEKVMITDEEEIRTTNPVATEQYGSVSTNLRSGNTQAATSDVNTQGVLPGMVWQDRDVYLQGPIWAKIPHTDGHFHPSPLMGGFGPKHPPPQILIKNTPVPANPSTTFSAAKFASFITQYSTGQVSVEIEWELQKENSKRWNPEIQYTSNYNKSVNVDFTVDTNGVYSEPRPIGTRYLTRNL

SEQ ID NO: 2555 - protein, 735 aa, synthetic construct
  REGION 1..735: note = source = /note="Description of Artificial Sequence: Synthetic polypeptide"
MAADGYLPDWLEDTLSEGIRQWWKLKPGPPPPKPAERHKDDSRGLVLPGYKYLGPFNGLDKGEPVNEADAAALEHDKAYDRQLDSGDNPYLKYNHADAEFQERLKEDTPFGGNLARAVFQAKKRVLEPLGLVEEPVKTAPGKKRPVEHSPAELDSSSGTGKSGQQPARKRLNFGQTGDADSVPDPQPLGQPPAAPSGLGTNTMASGSGAPMADNNEGADGVGNSSGNWHCDSTWMGDRVITTSTRTWALPTYNNHLYKQISSQSGASNDNHYFGYSTPWGYFDFNRFHCHFSPRDWQRLINNNWGFRPKGLNFKLFNIQVKEVTQNDGTTTIANNLTSTVQVFTDSEYQLPYVLGSAHQGCLPPFPADVFMVPQYGYLTLNNGSQAVGRSSFYCLEYFPSQMLRTGNNFTFSYTFEDVPFHSSYAHSQSLDRLMNPLIDQYLYYLSRTNTPSGTTTQSRLQFSQAGASDIRDQSRNWLPGPCYRQQRVSKTAADNNNSDYSWTGATKYHLNGRDSLVNPGTAMASHKDDEEKYFPQSGVLIFGKQDSGKTNVDIEKVMITDEEEIRTTNPVATEQYGSVSTNLQSGNTQAATSDVNTQGVLPGMVWQDRDVYLQGPIWAKIPHTDGHFHPSPLMGGFGPKHPPPQILIKNTPVPANPSTTFSAAKFASFITQYSTGQVSVEIEWELQKENSKRWNPEIQYTSNYNKSVNVDFTVDTNGVYSEPRPIGTRYLTRNL

SEQ ID NO: 2556 - protein, 735 aa, synthetic construct
  REGION 1..735: note = source = /note="Description of Artificial Sequence: Synthetic polypeptide"
MAADGYLPDWLEDTLSEGIRQWWKLKPGPPPPKPAERHKDDSRGLVLPGYKYLGPFNGLDKGEPVNEADAAALEHDKAYDRQLDSGDNPYLKYNHADAEFQERLKEDTSFGGNLARAVFQAKKRVLEPLGLVEEPVKTAPGKKRPVEHSPAELDSSSGTGKSGQQPARKRLNFGQTGDADSVPDPQPLGQPPAAPSGLGTNTMASGSGAPMADNNEGADGVGNSSGNWHCDSTWMGDRVITTSTRTWALPTYNNHLYKQISSQSGASNDNHYLGYSTPWGYFDFNRFHCHFSPRDWQRLINNNWGFRPKRLNFKLFNIQVKEVTQNDGTTTIANNLTSTVQVFTDSEYQLPYVLGSAHQGCLPPFPADVFMVPQYGYLTLNNGSQAVGRSSFYCLEYFPSQMLRTGNNFTFSYTFEDVPFHSSYAHSQSLDRLMNPLIDQYLYYLSRTNTPSGTTTQSRLQFSQAGASGIRDQSRNWLPGPCYRQQRVSKTAADNNNSDYSWTGATKYHLNGRDSLVNPGTAMASHKDDEEKYFPQSGVLIFGKQDSGKTNVDIEKVMITDEEEIRTTNPVATEQYGSVSTNLQSGNTQAATSDVNTQGVLPGMVWQDRDVYLQGPIWAKIPHTDGHFHPSPLMGGFGPKHPPPQILIKNTPVPANPSTTFSAAKFASFITQYSTGQVSVEIEWELQKGNSKRWNPEIQYTSNYNKSVNVDFTVDTNGVYSEPRPIGTRYLTRNL

SEQ ID NO: 2557 - protein, 735 aa, synthetic construct
  REGION 1..735: note = source = /note="Description of Artificial Sequence: Synthetic polypeptide"
MAADGYLPDWLEDTLSEGIRQWWKLKPGPPPPKPAERHKDDSRGLVLPGYKYLGPFNGLDKGEPVNEADAAALEHDKAYDRQLDSGDNPYLKYNHADAEFQERLKEDTSFGGNLARAVFQAKKRVLEPLGLVEEPVKTAPGKKRPVEHSPAELDSSSGTGKSGQQPARKRLNFGQTGDADSVPDPQPLGQPPAAPSGLGTNTMASGSGAPMADNNEGADGVGNSSGNWHCDSTWMGDRVITTSTRTWALPTYNNHLYKQISSQSGASNDNHYFGYSTPWGYFDFNRFHCHFSPRDWQRLINNNWGFRPKRLNFKLFNIQVKEVTQNDGTTTIANNLTSTVQVFTDSEYQLPYVLGSAHQGCLPPFPADVFMVPQYGYLTLNNGSQAVGRSSFYCLEYFPSQMLRTGNNFTFSYTFEDVPFHSSYAHSQSLDRLMNPLIDQYLYYLSRTNTPSGTTTQSRLQFSQAGASDIRDQSRNWLPGPCYRQQRVSKTAADNNNSDYSWTGATKYHLNGRDSLVNPGTAMASHKDDEEKYFPQSGVLIFGKQDSGKTNVDIEKVMITDEEEIRTTNPVATEQYGSVSTNLQSGNTQAATSDVNTQGVLPGMVWQDRDVYLQGPIWAKIPHTDGHFHPSPLMGGFGPKHPPPQILIKNTPVPANPSTTFSAAKFASFITQYSTGQVSVEIEWELQKENSKRWNPEIQYTSNYNKSVNVDFTVDTNGVYSEPRPIGTRYPTRNL

SEQ ID NO: 2558 - protein, 735 aa, synthetic construct
  REGION 1..735: note = source = /note="Description of Artificial Sequence: Synthetic polypeptide"
MAADGYLPDWLEDTLSEGIRQWWKLKPGPPPPKPAERHKDDSRGLVLPGYKYLGPFNGLDKGEPVNEADAAALEHDKAYDRQLDSGDNPYLKYNHADAEFQERLKEDTSFGGNLARAVFQAKKRVLEPLGLVEEPVKTAPGKKRPVEHSPAELDSSSGTGKSGQQPARKRLNFGQTGDADSVPDPQPLGQPPAAPSGLGTNTMASGSGAPMADNNEGADGVGNSSGNWHCDSTWMGDRVITTSTRTWALPTYNNHLYKQISSQSGASNDNHYFGYSTPWGYFDFNRFHCHFSPRDWQRLINNNWGFRPKRLNFKLFNIQVKEVTQNDGTTTIANNLTSTVQVFTDSEYQLPYVLGSAHQGCLPPFPADVFMVPQYGYLTLNNGSQAVGRSSFYCLEYFPSQMLRTGNNFTFSYTFEDVPFHSSYAHSQSLDRLMNPLIDQYLYYLSRTNTPSGTTTQSRLQFSQAGASDIRDQSRNWLPGPCYRQQRVSKTAADNNNSDYSWTGATKYHLNGRDSLVNPGTAMASHKDDEEKYFPQSGVLIFGKQDSGKTNVDIEKVMITDEEEIRTTNPVATEQYGSVSTNLQSGNTQAATSDVNTQGVLPGMVWQDRDVYLQGPIWAKIPHTDGHFHPSPLMGGFGPKHPPPQILIKNTPVPANPSTTFSAAKLASFITQYSTGQVSVEIEWELQKENSKRWNPEIQYTSNYNKSVNVDFTVDTNGVYSEPRPIGTRYLTRNL

SEQ ID NO: 2559 - protein, 735 aa, synthetic construct
  REGION 1..735: note = source = /note="Description of Artificial Sequence: Synthetic polypeptide"
MAADGYLPDWLEDTLSEGIRQWWKLKPGPPPPKPAERHKDDSRGLVLPGYKYLGPFNGLDKGEPVNEADAAALEHDKAYDRQLDSGDNPYLKYNHADAEFQERLKEDTSFGGNLARAVFQAKKRVLEPLGLVEEPVKTAPGKKRPVEHSPAELDSSSGTGKSGQQPARKRLNFGQTGDADSVPDPQPLGQPPAAPSGLGTNTMASGSGAPMADNNEGADGVGNSSGNWHCDSTWMGDRVITTSTRTWALPTYNNHLYKQISSQSGASNDNHYFGYSTPWGYFDFNRFHCHFSPRDWQRLINNNWGFRPKRLNFKLFNIQVKEVTQNDGTTTIANNLTSTVQVFTDSEYQLPYVLGSAHQGCLPPFPADVFMVPQYGYLTLNNGSQAVGRSSFYCLEYFPSQMLRTGNNFTFSYTFEDVPFHSSYAHSQSLDRLMNPLIDQYLYYLSRTNTPSGTTTQSRLQFSQAGASDIRDQSRNWLPGPCYRQQRVSKTAADNNNSDYSWTGATKYHLNGRDSLVNPGTAMASHKDDEEKYFPQSGVLIFGKQDSGKTNVDIEKVMITDEEEIRTTNPVATEQYGSVSTNLQSGNTQAATSDVNTQGVLPGMVWQDRDVYLQGPIWAKIPHTDGHFHPSPLMGGFGPKHPPPQILIKNTPVPANPSTTFSAAKFASFTTQYSTGQVSVEIEWELQKENSKRWNPEIQYTSNYNKSVNVDFTVDTNGVYSEPRPIGTRYLTRNL

SEQ ID NO: 2560 - protein, 735 aa, synthetic construct
  REGION 1..735: note = source = /note="Description of Artificial Sequence: Synthetic polypeptide"
MAADGYLPDWLEDTLSEGIRQWWKLKPGPPPPKPAERHKDDSRGLVLPGYKYLGPFNGLDKGEPVNEADAAALEHDKAYDRQLDSGDNPYLKYNHADAEFQERLKEDTSFGGNLARAVFQAKKRVLEPLGLVEEPVKTAPGKKRPVEHSPAELDSSSGTGKSGQQPARKRLNFGQTGDADSVPDPQPLGQPPAAPSGLGTNTMASGSGAPMADNNEGADGVGNSSGNWHCDSTWMGDRVITTSTRTWALPTYNNHLYKQISSQSGASNDNHYFGYSTPWGYFDFNRFHCHFSPRDWQRLINNNWGFRPKRLNFKLFNIQVKEVTQNDGTTTIANNLTSTVQVFTDSEYQLPYVLGSAHQGCLPPFPADVFMVPQYGYLTLNNGSQAVGRSSFYCLEYFPSQMLRTGNNFTFSYTFEDVPFHSSYAHSQSLDRLMNPLIDQYLYYLSRTNTPSGTTTQSRLQFSQAGASDIRDQSRNWLPGPCYRQQRVSKTAADNNNSDYSWTGATKYHLNGRDSLVNPGTAMASHKDDEEKYFPRSGVLIFGKQDSGKTNVDIEKVMITDEEEIRTTNPVATEQYGSVSTNLQSGNTQAATSDVNTQGVLPGMVWQDRDVYLQGPIWAKIPHTDGHFHPSPLMGGFGPKHPPPQILIKNTPVPANPSTTFSAAKFASFITQYSTGQVSVEIEWELQKENSKRWNPEIQYTSNYNKSVNVDFTVDTNGVYSEPRPIGTRYLTRNL

SEQ ID NO: 2561 - protein, 735 aa, synthetic construct
  REGION 1..735: note = source = /note="Description of Artificial Sequence: Synthetic polypeptide"
MAADGYLPDWLEDTLSEGIRQWWKLKPGPPPPKPAERHKDDSRGLVLPGYKYLGPFNGLDKGEPVNEADAAALEHDKAYDRQLDSGDNPYLKYNHADAEFQERLKEDTSFGGNLARAVFQAKKRVLEPLGLVEEPVKTAPGKKRPVEHSPAELDSSSGTGKSGQQPARKRLNFGQTGDADSVPDPQPLGQPPAAPSGLGTNTMASGSGAPMADNNEGADGVGNSSGNWHCDSTWMGDRVITTSTRTWALPTYNNHLYKQISSQSGASNDNHYFGYSTPWGYFDFNRFHCHFSPRDWQRLINNNWGFRPKRLNFKLFNIQVKEVTQNDGTATIANNLTSTVQVFTDSEYQLPYVLGSAHQGCLPPFPADVFMVPQYGYLTLNNGSQAVGRSSFYCLEYFPSQMLRTGNNFTFSYTFEDVPFHSSYAHSQSLDRLMNPLIDQYLYYLSRTNTPSGTTTQSRLQFSQAGASDIRDQSRNWLPGPCYRQQRVSKTAADNNNSDYSWTGATKYHLNGRDSLVNPGTAMASHKDDEEKYFPQSGVLIFGKQDSGKTNVDIEKVMITDEEEIRTTNPVATEQYGSVSTNLQSGNTQAATSDVNTQGVLPGMVWQDRDVYLQGPIWAKIPHTDGHFHPSPLMGGFGPKHPPPQILIKNTPVPANPSTTFSAAKFASFITQYSTGQVSVEIEWELQKENSKRWNPEIQYTSNYNKSVNVDFTVDTNGVYSEPRPIGTRYLTRNL

SEQ ID NO: 2562 - protein, 735 aa, synthetic construct
  REGION 1..735: note = source = /note="Description of Artificial Sequence: Synthetic polypeptide"
MAADGYLPDWLEDTLSEGIRQWWKLKPGPPPPKPAERHKDDSRGLVLPGYKYLGPFNGLDKGEPVNEADAAALEHDKAYDRQPDSGDNPYLKYNHADAEFQERLKEDTSFGGNLARAVFQAKKRVLEPLGLVEEPVKTAPGKKRPVEHSPAELDSSSGTGKSGQQPARKRLNFGQTGDADSVPDPQPLGQPPAAPSGLGTNTMASGSGAPMADNNEGADGVGNSSGNWHCDSTWMGDRVITTSTRTWALPTYNNHLYKQISSQSGASNDNHYFGYSTPWGYFDFNRFHCHFSPRDWQRLINNNWGFRPKRLNFKLFNIQVKEVTQNDGTTTIANNLTSTVQVFTDSEYQLPYVLGSAHQGCLPPFPADVFMVPQYGYLTLNNGSQAVGRSSFYCLEYFPSQMLRTGNNFTFSYTFEDVPFHSSYAHSQSLDRLMNPLIDQYLYYLSRTNTPSGTTTQSRLQFSQAGASDIRDQSRNWLPGPCYRQQRVSKTAADNNNSDYSWTGATKYHLNGRDSLVNPGTAMASHKDDEEKYFPQSGVLIFGKQDSGKTNVDIEKVMITDEEEIRTTNPVATEQYGSVSTNLQSGNTQAATSDVNTQGVLPGMVWQDRDVYLQGPIWAKIPHTDGHFHPSPLMGGFGPKHPPPQILIKNTPVPANPSTTFSAAKFASFITQYSTGQVSVEIEWELQKENSKRWNPEIQYTSNYNKSVNVDFTVDTNGVYSEPRPIGTRYLTRNL

SEQ ID NO: 2563 - protein, 735 aa, synthetic construct
  REGION 1..735: note = source = /note="Description of Artificial Sequence: Synthetic polypeptide"
MAADGYLPDWLEDTLSEGIRQWWKLEPGPPPPKPAERHKDDSRGLVLPGYKYLGPFNGLDKGEPVNEADAAALEHDKAYDRQLDSGDNPYLKYNHADAEFQERLKEDTPFGGNLARAVFQAKKRVLEPLGLVEEPVKTAPGKKRPVEHSPAELDSSSGTGKSGQQPARKRLNFGQTGDADSVPDPQPLGQPPAAPSGLGTNTMASGSGAPMADNNEGADGVGNSSGNWHCDSTWMGDRVITTSTRTWALPTYNNHLYKQISSQSGASNDNHYFGYSTPWGYFDFNRFHCHFSPRDWQRLINNNWGFRPKRLNFKLFNIQVKEVTQNDGTTTIANNLTSTVQVFTDSEYQLPYVLGSAHQGCLPPFPADVFMVPQYGYLTLNNGSQAVGRSSFYCLEYFPSQMLRTGNNFTFSYTFEDVPFHSSYAHSQSLDRLMNPLIDQYLYYLSRTNTPSGTTTQSRLQFSQAGASDIRDQSRNWLPGPCYRQQRVSKTAADNNNSDYSWTGATKYHLNGRDSLVNPGTAMASHEDDEEKYFPQSGVLIFGKQDSGKTNVDIEKVMITDEEEIRTTNPVATEQYGSVSTNLQSGNTQAATSDVNTQGVLPGMVWQDRDVYLQGPIWAKIPHTDGHFHPSPLMGGFGPKHPPPQILIKNTPVPANPSTTFSAAKFASFITQYSTGQVSVEIEWELQKENSKRWNPEIQYTSNYNKSVNVDFTVDTNGVYSEPRPIGTRYLTRNL

SEQ ID NO: 2564 - protein, 734 aa, synthetic construct
  REGION 1..734: note = source = /note="Description of Artificial Sequence: Synthetic polypeptide"
MAADGYLPDWLEDTLSEGIRQWWKLKPGPPPPKPAERHKDDSRGLVLPGYKYLGPFNGLDKGEPVNEADAAALEHDKAYDRQLDSGDNPYLKYNHADAEFQERLKEDTSFGGNLARAVFQAKKRVLEPLGLVEEPVKTAPGKKRPVEHSPAELDSSSGTGKSGQQPARKRLNFGQTGDADSVPDPQPLGQPPAAPSGLGTNTMASGSGAPMADNNEGADGVGNSSGNWHCDSTWMGDRVITTSTRTWALPTYNNHLYKQISSQSGASNDNHYFGYSTPWGYFDFNRFHCHFSPRDWQRLINNNWGFRPKRLNFKLFNIQVKEVTQNDGTTTIANNLTSTVQVFTDSEYQLPYVLGSAHQGCLPPFPADVFMVPQYGYLTLNNGSQAVGRSSFYCLEYFPSQMLRTGNNFTFSYTFEDVPFHSSYAHSQSLDRLMNPLIDQYLYYLSRTNTPSGTTTQSRLQFSQAGASDIRDQSRNWLPGPCYRQQRVSKTAADNNSDYSWTGATKYHLNGRDSLVNPGTAMASHKDDEEKYFPQSGVLIFGKQDSGKTNVDIEKVMITDEEEIRTTNPVATEQYGSVSTNLQSGNTQAATSDVNTQGVLPGMVWQDRDVYLQGPIWAKIPHTDGHFHPSPLMGGFGPKHPPPQILIKNTPVPANPSTTFSAAKFASFITQYSTGQVSVEIEWELQKENSKRWNPEIQYTSNYNKSVNVDFTVDTNGVYSEPRPIGTRYLTRNL

SEQ ID NO: 2565 - protein, 735 aa, synthetic construct
  REGION 1..735: note = source = /note="Description of Artificial Sequence: Synthetic polypeptide"
MAADGYLPDWLEDTLSEGIRQWWKLKPGPPPPKPAERHKDDSRGLVLPGYKYLGPFNGLDKGEPVNEADAAALEHDKAYDRQLDSGDNPYLKYNHADAEFQERLKEDTPFGGNLARAVFQAKKRVLEPLGLVEEPVKTAPGKKRPVEHSPAELDSSSGTGKSGQQPARKRLNFGQTGDADSVPDPQPLGQPPAAPSGLGTNTMASGSGAPMADNNEGADGVGNSSGNWHCDSTWMGDRVITTSTRTWALPTYNNHLYKQISSQSGASNDNHYFGYSTPWGYFDFNRFHCHFSPRDWQRLINNNWGFRPKRLNFKLFNIQVKEVTQNGGTTTIANNLTSTVQVFTDSEYQLPYVLGSAHQGCLPPFPADVFMVPQYGYLTLNNGSQAVGRSSFYCLEYFPSQMLRTGNNFTFSYTFEDVPFHSSYAHSQSLDRLMNPLIDQYLYYLSRTNTPSGTTTQSRLQFSQAGASDIRDQSRNWLPGPCYRQQRVSKTAADNNNSDYSWTGATKYHLNGRDSLVNPGTAMASHKDDEEKYFPQSGVLIFGKQDSGKTNVDIEKVMITDEEEIRTTNPVATEQYGSVSTNLQSGNTQAATSDVNTQGVLPGMVWQDRDVYLQGPIWAKIPHTDGHFHPSPLMGGFGPKHPPPQILIKNTPVPANPSTTFSAAKFASFITQYSTGQVSVEIEWELQKENSKRWNPEIQYTSNYNKSVNVDFTVDTNGVYSEPRPIGTRYLTRNL

SEQ ID NO: 2566 - protein, 735 aa, synthetic construct
  REGION 1..735: note = source = /note="Description of Artificial Sequence: Synthetic polypeptide"
MAADGYLPDWLEDTLSEGIRQWWKLKPGPPPPKPAERHKDDSRGLVLPGYKYLGPFNGLDKGEPVNEADAAALEHDKAYDRQLDSGDNPYLKYNHADAEFQERLKEDTSFGGNLARAVFQAKKGVLEPLGLVEEPVKTAPGKKRPVEHSPAELDSSSGTGKSGQQPARKRLNFGQTGDADSVPDPQPLGQPPAAPSGLGTNTMASGSGAPMADNNEGADGVGNSSGNWHCDSTWMGDRVITTSTRTWALPTYNNHLYKQISSQSGASNDNHYFGYSTPWGYFDFNRFHCHFSPRDWQRLINNNWGFRPKRLNFKLFNIQVKEVTQNDGTTTIANNLTSTVQVFTDSEYQLPYVLGSAHQGCLPPFPADVFMVPQYGYLTLNNGSQAVGRSSFYCLEYFPSQMLRTGNNFTFSYTFEDVPFHSSYAHSQSLDRLMNPLIDQYLYYLSRTNTPSGTTTQSRLQFSQAGASDIRDQSRNWLPGPCYRQQRVSKTAADNNNSDYSWTGATKYHLNGRDSLVNPGTAMASHKDDEEKYFPQSGVLIFGKQDSGKTNVDIEKVMITDEEEIRTTNPVATEQYGSVSTNLQSGNTQAATSDVNTQGVLPGMVWQDRDVYLQGPIWAKIPHTDGHFHPSPLMGGFGPKHPPPQILIKNTPVPANPSTTFSAAKFASFITQYSTGQVSVEIEWELQKENSKRWNPEIQYTSNYNKSVNVDFTVDTNGVYSEPRPIGTRYLTRNL

SEQ ID NO: 2567 - protein, 735 aa, synthetic construct
  REGION 1..735: note = source = /note="Description of Artificial Sequence: Synthetic polypeptide"
MAADGYLPDWLEDTLSEGIRQWWKLKPGPPPPKPAERHKDDSRGLVLPGYKYLGPFNGLDKGEPVNEADAAALEHDKAYDRQLDSGDNPYLKYNHADAEFQERLKEDTSFGGNLARAVFQAKKRVLEPLGLVEEPVKTAPGKKRPVEHSPAELDSSSGTGKSGQQPARKRLNFGQTGDADSVPDPQPLGQPPAAPSGLGTNTMASGSGAPMADNNEGADGVGNSSGNWHCDSTWMGDRVITTSTRTWALPTYNNHLYKQISSQSGASNDNHYFGYSTPWGYFDFNRFHCHFSPRDWQRLINNNWGFRPKRLNFKLFNIQVKEVTQNDGTTTIANNLTSTVQVFTDSEYQLPYVLGSAHQGCLPPFPADVFMVPQYGYLTLNNGSQAVGRSSFYCLEYFPSQMLRTGNNFTFSYTFEDVPFHSSYAHSQSLDRLMNPLIDQYLYYLSRTNTPSGTTTQSRLQFSQAGASDIRDQSRNWLPGPCYRQQRVSKTAADNNNSDYSWTGATKYHLNGRDSLVNPGTAMASHKDDEEKYFPQSGVLIFGKQDSGKTNVDIEKVMITDEEEIRTTNPVATEQYGSVSTNLQSGNTQAATSDVNTQGVLPGMVWQDRDVYLQGPIWARIPHTDGHFHPSPLMGGFGPKHPPPQILIKNTPVPANPSTTFSAAKFASFITQYSTGQVSVEIEWELQKENSKRWNPEIQYTSNYNKSVNVDFTVDTNGVYSEPRPIGTRYLTRNL

SEQ ID NO: 2568 - protein, 735 aa, synthetic construct
  REGION 1..735: note = source = /note="Description of Artificial Sequence: Synthetic polypeptide"
MAADGYLPDWLEDTLSEGIRQWWKLKPGPPPPKPAERHKDDSRGLVLPGYKYLGPFNGLDKGEPVNEADAAALEHDKAYDRQLDSGDNPYLKYNHADAEFQERLKEDTSFGGNLARAVFQAKKRVLEPLGLVEEPVKTAPGKKRPVGHSPAELDSSSGTGKSGQQPARKRLNFGQTGDADSVPDPQPLGQPPAAPSGLGTNTMASGSGAPMADNNEGADGVGNSSGNWHCDSTWMGDRVITTSTRTWALPTYNNHLYKQISSQSGASNDNHYFGYSTPWGYFDFNRFHCHFSPRDWQRLINNNWGFRPKRLNFKLFNIQVKEVTQNDGTTTIANNLTSTVQVFTDSEYQLPYVLGSAHQGCLPPFPADVFMVPQYGYLTLNNGSQAVGRSSFYCLEYFPSQMLRTGNNFTFSYTFEDVPFHSSYAHSQSLDRLMNPLIDQYLYYLSRTNTPSGTTTQSRLQFSQAGASDIRDQSRNWLPGPCYRQQRVSKTAADNNNSDYSWTGATKYHLNGRDSLVNPGTAMASHKDDEEKYFPQSGVLIFGKQDSGKTNVDIEKVMITDEEEIRTTNPVATEQYGSVSTNLQSGNTQAATSDVNTQGVLPGMVWQDRDVYLQGPIWAKIPHTDGHFHPSPLMGGFGPKHPPPQILIKNTPVPANPSTTFSAAKFASFITQYSTGQVSVEIEWELQKENSKRWNPEIQYTSNYNKSVNVDFTVDTNGVYSEPRPIGTRYLTRNL

SEQ ID NO: 2569 - protein, 735 aa, synthetic construct
  REGION 1..735: note = source = /note="Description of Artificial Sequence: Synthetic polypeptide"
MAADGYLPDWLEDTLSEGIRQWWKLKPGPPPPKPAERHKDDSRGLVLPGYKYLGPFNGLDKGEPVNEADAAALEHDKAYDRQLDSGDNPYLKYNHADAEFQERLKEDTSFGGNLARAVFQAKKRVLEPLGLVEEPVKTAPGKKRPVEHSPAELDSSSGTGKSGQQPARKRLNFGQTGDADSVPDPQPLGQPPAAPSGLGTNTMASGSGAPMADNNEGADGVGNSSGNWHCDSTWMGDRVITTSTRTWALPTYNNHLYKQISSQSGASNDNHYFGYSTPWGYFDFNRFHCHFSPRDWQRLINNNWGFRPKRLNFKLFNIQVKEVTQNDGTTTIANNLTSTVQVFTDSEYQLPYVLGSAHQGCLPPFPADVFMVPQYGYLTLNNGSQAVGRSSFYCLEYFPSQMLRTGNNFTFSYTFEDVPFHSSYAHSQSLDRLMNPLIDQYLYYLSRTNTPSGTTTQSRLQFSQAGASDIRDQSRNWLPGPCYRQQRVSKTAADNNNSDYSWTGATKYHLNGRDSLVNPGTAMASHKDDEEKYFPQSGVLIFGKQDSGKTNVDIEKVMITDEEEIRTTNPVATEQYGSVSTNLQSGNTQAATSDVNTQGVLPGMVWQDRDVYLQGPIWAKIPHTDGHFHPSPLMGGFGPKHPPPQILIKNTPVPANPSTTFSAAKFASFITQYSTGQVSVEIEWELQKGNSKRWNPEIQYTSNYNKSVNVDFTVDTNGVYSEPRPIGTRYLTRNL

SEQ ID NO: 2570 - protein, 735 aa, synthetic construct
  REGION 1..735: note = source = /note="Description of Artificial Sequence: Synthetic polypeptide"
MAADGYLPDWLEDTLSEGIRQWWKLKPGPPPPKPAERHKDDSRGLVLPGYKYLGPFNGLDKGEPVNEADAAALEHDKAYDRQLDSGDNPYLKYNHADAEFQERLKEDTPFGGNLARAVFQAKKRVLEPLGLVEEPVKTAPGKKGPVEHSPAELDSSSGTGKSGQQPARKRLNFGQTGDADSVPDPQPLGQPPAAPSGLGTNTMASGSGAPMADNNEGADGVGNSSGNWHCDSTWMGDRVITTSTRTWALPTYNNHLYKQISSQSGASNDNHYFGYSTPWGYFDFNRFHCHFSPRDWQRLINNNWGFRPKRLNFKLFNIQVKEVTQNDGTTTIANNLTSTVQVFTDSEYQLPYVLGSAHQGCLPPFPADVFMVPQYGYLTLNNGSQAVGRSSFYCLEYFPSQMLRTGNNFTFSYTFEDVPFHSSYAHSQSLDRLMNPLIDQYLYYLSRTNTPSGTTTQSRLQFSQAGASDIRDQSRSWLPGPCYRQQRVSKTAADNNNSDYSWTGATKYHLNGRDSLVNPGTAMASHKDDEEKYFPQSGVLIFGKQDSGKTNVDIEKVMITDEEEIRTTNPVATEQYGSVSTNLQSGNTQAATSDVNTQGVLPGMVWQDRDVYLQGPIWAKIPHTDGHFHPSPLMGGFGPKHPPPQILIKNTPVPANPSTTFSAAKFASFITQYSTGQVSVEIEWELQKENSKRWNPEIQYTSNYNKSVNVDFTMDTNGVYSEPRPIGTRYLTRNL

SEQ ID NO: 2571 - protein, 735 aa, synthetic construct
  REGION 1..735: note = source = /note="Description of Artificial Sequence: Synthetic polypeptide"
MAADGYLPDWLEDTLSEGIRQWWKLKPGPPPPKPAERHKDDSRGLVLPGYKYLGPFNGLDKGEPVNEADAAALEHDKAYDRQLDSGDNPYLKYNHADAEFQERLKEDTSFGGNLARAVFQAKKRVLEPLGLVEEPVKTAPGKKRPVEHSPAELDSSSGTGKSGQQPARKRLNFGQTGDADSVPDPQPLGQPPAAPSGLGTNTMASGSGAPMADNNEGADGVGNSSGNWHCDSTWMGDRVITTSTRTWALPTYNNHLYKQISSQSGASNDNHYFGYSTPWGYFDFNRFHCHFSPRDWQRLINNNWGFRPKRLNFKLFNIQVKEVTQNDGTTTIANNLTSTVQVFTDSEYQLPYVLGSAHQGCLPPFPADVFMVPQYGYLTLNNGSQAVGRSSFYCLEYFPSQMLRTGNNFTFSYTFEDVPFHSSYAHSQSLDRLMNPLIDQYLYYLSRTNTPSGTTTQSRLQFSQAGASDIRDQSRNWLPGPCYRQQRVSKTAADNNNSDYSWTGATKYHLNGRDSLVNPGTAMASHKDDEEKYFPQSGVLIFGKQDSGKTNADIEKVMITDEEEIRTTNPVATEQYGSVSTNLQSGNTQAATSDVNTQGVLPGMVWQDRDVYLQGPIWAKIPHTDGHFHPSPLMGGFGPKHPPPQILIKNTPVPANPSTTFSAAKFASFITQYSTGQVSVEIEWELQKENSKRWNPEIQYTSNYNKSVNVDFTVDTNGVYSEPRPIGTRYLTRNL

SEQ ID NO: 2572 - protein, 735 aa, synthetic construct
  REGION 1..735: note = source = /note="Description of Artificial Sequence: Synthetic polypeptide"
MAADGYLPDWLEDTLSEGIRQWWKLKPGPPPPKPAERHKDDSRGLVLPGYKYLGPFNGLDKGEPVNEADAAALEHDKAYDRQLDSGDNPYLKYNHADAEFQERLKEDTSFGGNLARAVFQAKKRVLEPLGLVEEPVKTAPGKKRPVEHSPAELDSSSGTGKSGQQPARKRLNFGQTGDADSVPDPQPLGQPPAAPSGLGTNTMASGSGAPMADNNEGGDGVGNSSGNWHCDSTWMGDRVITTSTRTWALPTYNNHLYKQISSQSGASNDNHYFGYSTPWGYFDFNRFHCHFSPRDWQRLINNNWGFRPKRLNFKLFNIQVKEVTQNDGTTTIANNLTSTVQVFTDSEYQLPYVLGSAHQGCLPPFPADVFMVPQYGYLTLNNGSQAVGRSSFYCLEYFPSQMLRTGNNFTFSYTFEDVPFHSSYAHSQSLDRLMNPLIDQYLYYLSRTNTPSGTTTQSRLQFSQAGASDIRDQSRNWLPGPCYRQQRVSKTAADNNNSDYSWTGATKYHLNGRDSLVNPGTAMASHKDDEEKYFPQSGVLIFGKQDSGKTNVDIEKVMITDEEEIRTTNPVATEQYGSVSTNLQSGNTQAATSDVNTQGVLPGMVWQDRDVYLQGPIWAKIPHTDGHFHPSPLMGGFGPKHPPPQILIKNTPVPANPSTTFSAAKFASFITQYSTGQVSVEIEWELQKENSKRWNPEIQYTSNYNKSVNVDFTVDTNGVYSEPRPIGTRYLTRNL

SEQ ID NO: 2573 - protein, 735 aa, synthetic construct
  REGION 1..735: note = source = /note="Description of Artificial Sequence: Synthetic polypeptide"
MAADGYLPDWLEDTLSEGIRQWWKLKPGPPPPKPAERHKDDSRGLVLPGYKYLGPFNGLDKGEPVNEADAAALEHDKAYDRQLDSGDNPYLKYNHADAEFQERLKEDTSFGGNLARAVFQAKKRVLEPLGLVEEPVKTAPGKKRPVEHSPAELDSSSGTGKSGQQPARKRLNFGQTGDADSVPDPQPLGQPPAAPSGLGTNTMASGSGAPMADNNEGADGVGNSSGNWHCDSTWMGDRVITTSTRTWALPTYNNHLYKQISSQSGASNDNHYFGYSTPWGYFDFNRFHCHFPPRDWQRLINNNWGFRPKRLNFKLFNIQVKEVTQNDGTTTIANNLTSTVQVFTDSEYQLPYVLGSAHQGCLPPFPADVFMVPQYGYLTLNNGSQAVGRSSFYCLEYFPSQMLRTGNNFTFSYTFEDVPFHSSYAHSQSLDRLMNPLIDQYLYYLSRTNTPSGTTTQSRLQFSQAGASDIRDQSRNWLPGPCYRQQRVSKTAADNNNSDYSWTGATKYHLNGRDSLVNPGTAMASHKDDEEKYFPQSGVLIFGKQDSGKTNVDIEKVMITDEEEIRTTNPVATEQYGSVSTNLQSGNTQAATSDVNTQGVLPGMVWQDRDVYLQGPIWAKIPHTDGHFHPSPLMGGFGPKHPPPQILIKNTPVPANPSTTFSAAKFASFITQYSTGQVSVEIEWELQKENSKRWNPEIQYTSNYNKSVNVDFTVDTNGVYSEPRPIGTRYLTRNL

SEQ ID NO: 2574 - protein, 735 aa, synthetic construct
  REGION 1..735: note = source = /note="Description of Artificial Sequence: Synthetic polypeptide"
MAADGYLPDWLEDTLSEGIRQWWKLKPGPPPPKPAERHKDDSRGLVLPGYKYLGPFNGLDKGEPVNEADAAALEHDKAYDRQLDSGDNPYLKYNHADAEFQERLKEDTSFGGNLARAVFQAKKRVLEPLGLVEEPVKTAPGKKRPVEHSPAELDSSSGAGKSGQQPARKRLNFGQTGDADSVPDPQPLGQPPAAPSGLGTNTMASGSGAPMADNNEGADGVGNSSGNWHCDSTWMGDRVITTSTRTWALPTYNNHLYKQISSQSGASNDNHYLGYSTPWGYFDFNRFHCHFSPRDWQRLINNNWGFRPKRLNFKLFNIQVKEVTQNDGTTTIANNLTSTVQVFTDSEYQLPYVLGSAHQGCLPPFPADVFMVPQYGYLTLNNGSQAVGRSSFYCLEYFPSQMLRTGNNFTFSYTFEDVPFHSSYAHSQSLDRLMNPLIDQYLYYLSRTNTPSGTTTQSRLQFSQAGASDIRDQSRNWLPGPCYRQQRVSKTAADNNNSDYSWTGATKYHLNGRDSLVNPGTAMASHKDDEEKYFPQSGVLIFGKQDSGKTNVDIEKVMITDEEEIRTTNPVATEQYGSVSTNLQSGNTQAATSDVNTQGVLPGMVWQDRDVYLQGPIWAKIPHTDGHFHPSPLMGGFGPKHPPPQILIKNTPVPANPSTTFSAAKFASFITQYSTGQVSVEIEWELQKENSKRWNPEIQYTSNYNKSVNVDFTVDTNGVYSEPRPIGTRYLTRNL

SEQ ID NO: 2575 - protein, 735 aa, synthetic construct
  REGION 1..735: note = source = /note="Description of Artificial Sequence: Synthetic polypeptide"
MAADGYLPDWLEDTLSEGIRQWWKLKPGPPPPKPAERHKDDSRGLVLPGYKYLGPFNGLDKGEPVNEADAAALEHDKAYDRQLDSGDNPYLKYNHADAEFQERLKEDTPFGGNLARAVFQAKKRVLEPLGLVEEPVKTAPGKKRPVEHSPAELDSSSGTGKSGQQPARKRLNFGQTGDADSVPDPQPLGQPPAAPSGLGTNTMVSGSGAPMADNNEGADGVGNSSGNWHCDSTWMGDRVITTSTRTWALPTYNNHLYKQISSQSGASNDNHYFGYSTPWGYFDFNRFHCHFSPRDWQRLINNNWGFRPKRLNFKLFNIQVKEVTQNDGTTTIANNLTSTVQVFTDSEYQLPYVLGSAHQGCLPPFPADVFMVPQYGYLTLNNGSQAVGRSSFYCLEYFPSQMLRTGNNFTFSYTFEDVPFHSSYAHSQSLDRLMNPLIDQYLYYLSRTNTPSGTTTQSRLQFSQAGASDIRDQSRNWLPGPCYRQQRVSKTAADNNNSDYSWTGATKYHLNGRDSLVNPGTAMASHKDDEEKYFPQSGVLIFGKQDSGKTNVDIEKVMITDEEEIRTTNPVATEQYGSVSTNLQSGNTQAATSDVNTQGVLPGMVWQDRDVYLQGPIWAKIPHTDGHFHPSPLMGGFGPKHPPPQILIKNTPVPANPSTTFSAAKFASFITQYSTGQVSVEIEWELQKENSKRWNPEIQYTSNYNKSVNVDFTVDTNGVYSEPRPIGTRYLTRNL

SEQ ID NO: 2576 - protein, 735 aa, synthetic construct
  REGION 1..735: note = source = /note="Description of Artificial Sequence: Synthetic polypeptide"
MAADGYLPDWLEDTLSEGIRQWWELKPGPPPPKPAERHKDDSRGLVLPGYKYLGPFNGLDKGEPVNEADAAALEHDKAYDRQLDSGDNPYLKYNHADAEFQERLKEDTSFGGNLARAVFQAKKRVLEPLGLVEEPVKTAPGKKRPVEHSPAELDSSSGTGKSGQQPARKRLNFGQTGDADSVPDPQPLGQPPAAPSGLGTNTMASGSGAPMADNNEGADGVGNSSGNWHCDSTWMGDRVITTSTRTWALPTYNNHLYKQISSQSGASNDNHYFGYSTPWGYFDFNRFHCHFSPRDWQRLINNNWGFRPKRLNFKLFNIQVKEVTQNDGTTTIANNLTSTVQVFTDSEYQLPYVLGSAHQGCLPPFPADVFMVPQYGYLTLNNGSQAVGRSSFYCLEYFPSQMLRTGNNFTFSYTFEDVPFHSSYAHSQSLDRLMNPLIDQYLYYLSRTNTPSGTTTQSRLQFSQAGASDIRDQSRNWLPGPCYRQQRVSKTAADNNNSDYSWTGATKYHLNGRDSLVNPGTAMASHKDDEEKYFPQSGVLIFGKQDSGKTNVDIEKVMITDEEEIRTTNPVATEQYGSVSTNLQSGNTQAATSDVNTQGVLPGMVWQDRDVYLQGPIWAKIPHTDGHFHPSPLMGGFGPKHPPPQILIKNTPVPANPSTTFSAAKFASFITQYSTGQVSVEIEWELQKENSKRWNPEIQYTSNYNKSVNVDFTVDTNGVYSEPRPIGTRYLTRNL

SEQ ID NO: 2577 - protein, 735 aa, synthetic construct
  REGION 1..735: note = source = /note="Description of Artificial Sequence: Synthetic polypeptide"
MAADGYLPDWLEDTLSEGIRQWWKLKPGPPPPKPAERHKDDSRGLVLPGYKYLGPFNGLDKGEPVNEADAAALEHDKAYDRQLDSGDNPYLKYNHADAEFQERLKEDTPFGGNLARAVFQAKKRVLEPLGLVEEPVKTAPGKKRPVGHSPAELDSSSGTGKSGQQPARKRLNFGQTGDADSVPDPQPLGQPPAAPSGLGTNTMASGSGAPMADNNEGVDGVGNSSGNWHCDSTWMGDRVITTSTRTWALPTYNNHLYKQISSQSGASNDNHYFGYSTPWGYFDFNRFHCHFSPRDWQRLINNNWGFRPKRLNFKLFNIQVKEVTQNDGTTTIANNLTSTVQVFTDSEYQLPYVLGSAHQGCLPPFPADVFMVPQYGYLTLNNGSQAVGRSSFYCLEYFPSQMLRTGNNFTFSYTFEDVPFHSSYAHSQSLDRLMNPLIDQYLYYLSRTNTPSGTTTQSRLQFSQAGASDIRDQSRNWLPGPCYRQQRVSKTAADNNNSDYSWTGATKYHLNGRDSLVNPGTAMASHKDDEEKYFPQSGVLIFGKQDSGKTNVDIEKVMITDEEEIRTTNPVATEQYGSVSTNLQSGNTQAATSDVNTQGVLPGMVWQDRDVYLQGPIWAKIPHTDGHFHPSPLMGGFGPKHPPPQILIKNTPVPANPSTTFSAAKFASFITQYSTGQVSVEIEWELQKENSKRWNPEIQYTSNYNKSVNVDFTVDTNGVYSEPRPIGTRYLTRNL

SEQ ID NO: 2578 - protein, 735 aa, synthetic construct
  REGION 1..735: note = source = /note="Description of Artificial Sequence: Synthetic polypeptide"
MAADGYLPDWLEDTLSEGIRQWWELKPGPPPPKPAERHKDDSRGLVLPGYKYLGPFNGLDKGEPVNEADAAALEHDKAYDRQLDSGDNPYLKYNHADAEFQERLKEDTSFGGNLARAVFQAKKRVLEPLGLVEEPVKTAPGKKRPVEHSPAELDSSSGTGKSGQQPARKRLNFGQTGDADSVPDPQPLGQPPAAPSGLGTNTMASGSGAPMADNNEGADGVGNSSGNWHCDSTWMGDRVITTSTRTWALPTYNNHLYKQISSQSGASNDNHYFGYSTPWGYFDFNRFHCHFSPRDWQRLINNNWGFRPKRLNFKLFNIQVKEVTQNDGTTTIANNLTSTVQVFTDSEYQLPYVLGSAHQGCLPPFPADVFMVPQYGYLTLNNGSQAVGRSSFYCLEYFPSQMLRTGNNFTFSYTFEDVPFHSSYAHSQSLDRLMNPLIDQYLYYFSRTNTPSGTTTQSRLQFSQAGASDIRDQSRNWLPGPCYRQQRVSKTAADNNNSDYSWTGATKYHLNGRDSLVNPGTAMASHKDDEEKYFPQSGVLIFGKQDSGKTNVDIEKVMITDEEEIRTTNPVATEQYGSVSTNLQSGNTQAATSDVNTQGVLPGMVWQDRDVYLQGPIWAKIPHTDGHFHPSPLMGGFGPKHPPPQILIKNTPVPANPSTTFSAAKFASFITQYSTGQVSVEIEWELQKENSKRWNPEIQYTSNYNKSVNVDFTVDTNGVYSEPRPIGTRYLTRNL

SEQ ID NO: 2579 - protein, 735 aa, synthetic construct
  REGION 1..735: note = source = /note="Description of Artificial Sequence: Synthetic polypeptide"
MAADGYLPDWLEDTLSEGIRQWWKLKPGPPPPKPAERHKDDSRGLVLPGYKYLGPFNGLDKGEPVNEADAAALEHDKAYDRQLDSGDNPYLKYNHADAEFQERLKEDTSFGGNLARAVFQAKKRVLEPLGLVEEPVKTAPGKKRPVEHSPAELDSSSGTGKSGQQPARKRLNFGQTGDADSVPDPQPLGQPPAAPSGLGTNTMASGSGAPMADNNEGADGVGNSSGNWHCDSTWMGDRVITTSTRTWALPTYNNHLYKQISSQSGASNDNHYFGYSTPWGYFDFNRFHCHFSPRDWQRLINNNWGFRPKRLNFKLFNIQVKEVTQNDGTTTIANNLTSTVQVFTDSEYQLPYVLGSAHQGCLPPFPADVFMVPQYGYLTLNNGSQAVGRSSFYRLEYFPSQMLRTGNNFTFSYTFEDVPFHSSYAHSQSLDRLMNPLIDQYLYYLSRTNTPSGTTTQSRLQFSQAGASDIRDQSRNWLPGPCYRQQRVSKTAADNNNSDYSWTGATKYHLNGRDSLVNPGTAMASHKDDEEKYFPQSGVLIFGKQDSGKTNVDIEKVMITDEEEIRTTNPVATEQYGSVSTNLQSGNTQAATSDVNTQGVLPGMVWQDRDVYLQGPIWAKIPHTDGHFHPSPLMGGFGPKHPPPQILIKNTPVPANPSTTFSAAKFASFITQYSTGQVSVEIEWELQKENSKRWNPEIQYTSNYNKSVNVDFTVDTNGVYSEPRPIGTRYLTRNL

SEQ ID NO: 2580 - protein, 735 aa, synthetic construct
  REGION 1..735: note = source = /note="Description of Artificial Sequence: Synthetic polypeptide"
MAADGYLPDWLEDTLSEGIRQWWKLKPGPPPPKPAERHKDDSRGLVLPGYKYLGPFNGLDKGEPVNEADAAALEHDKAYDRQLDSGDNPYLKYNHADAEFQERLKEDTSFGGNLARAVFQAKKRVLEPLGLVEEPVKTAPGKKRPVEHSPAELDSSSGTGKSGQQPARKRLNFGQTGDADSVPDPQPLGQPPAAPSGLGTNTMASGSGAPMADNNEGADGVGNSSGNWHCDSTWMGDRVITTSTRTWALPTYNNHLYKQISSQSGASNDNHYLGYSTPWGYFDFNRFHCHFSPRDWQRLINNNWGFRPKRLNFKLFNIQVKEVTQNDGTTTIANNLTSTVQVFTDSEYQLPYVLGSAHQGCLPPFPADVFMVPQYGYLTLNNGSQAVGRSSFYCLEYFPSQMLRTGNNFTFSYTFEDVPFHSSYAHSQSLDRLMNPLIDQYLYYLSRTNTPSGTTTQSRLQFSQAGASDIRDQSRNWLPGPCYRQQRVSKTAADNNNSDYSWTGATKYHLNGRDSLVNPGTAMASHKDDEEKYFPQSGVLIFGKQDSGKTNVDIEKVMITDEEEIRTTNPVATEQYGSVSTNLQSGNTQAATSDVNTQGVLPGMVWQDGDVYLQGPIWAKIPHTDGHFHPSPLMGGFGPKHPPPQILIKNTPVPANPSTTFSAAKFASFITQYSTGQVSVEIEWELQKENSKRWNPEIQYTSNYNKSVNVDFTVDTNGVYSEPRPIGTRYLTRNL

SEQ ID NO: 2581 - protein, 735 aa, synthetic construct
  REGION 1..735: note = source = /note="Description of Artificial Sequence: Synthetic polypeptide"
MAADGYLPDWLEDTLSEGIRQWWKLKPGPPPPKPAERHKDDSRGLVLPGYKYLGPFNGLDKGEPVNEADAAALEHDKAYDRQLDSGDNPYLKYNHADAEFQERLKEDTSFGGNLARAVFQAKKRVLEPLGLVEEPVKTAPGKKRPVEHSPAELDSSSGTGKSGQQPARKRLNFGQTGDADSVPDPQPLGQPPAAPSGLGTNTMASGSGAPMADNNEGADGVGNSSGNWHCDSTWMGDRVITTSTRTWALPTYNNHLYKQISSQSGASNDNHYFGYSTPWGYFDFNRFHCHFSPRDWQRLINNNWGFRPKRLNFKLFNIQVKEVTQNDGTTTIANNLTSTVQVFTDSEYQLPYVLGSAHQGCLPPFPADVFMVPQYGYLTLNNGSQAVGRSSFYCLEYFPPQMLRTGNNFTFSYTFEDVPFHSSYAHSQSLDRLMNPLIDQYLYYLSRTNTPSGTTTQSRLQFSQAGASDIRDQSRNWLPGPCYRQQRVSKTAADNNNSDYSWTGATKYHLNGRDSLVNPGTAMASHKDDEEKYFPQSGVLIFGKQDSGKTNVDIEKVMITDEEEIRTTNPVATEQYGSVSTNLQSGNTQAATSDVNTQGVLPGMVWQDRDVYLQGPIWAKIPHTDGHFHPSPLMGGFGPKHPPPQILIKNTPVPANPSTTFSAAKFASFITQYSTGQVSVEIEWELQKENSKRWNPEIQYTSNYNKSVNVDFTVDTNGVYSEPRPIGTRYLTRNL

SEQ ID NO: 2582 - protein, 735 aa, synthetic construct
  REGION 1..735: note = source = /note="Description of Artificial Sequence: Synthetic polypeptide"
MAADGYLPDWLEDTLSEGIRQWWKLKPGPPPPKPAERHKDDSRGLVLPGYKYLGPFNGLDKGEPVNEADAAALEHDKAYDRQLDSGDNPYLKYNHADAEFQERLKEDTSFGGNLARAVFQAKKRVLEPLGLVEEPVKTAPGKKRPVEHSPAELDSSSGTGKSGQQPARKRLNFGQTGDADSVPDPQPLGQPPAAPSGLGTNTMASGSGAPMADNNEGADGVGNSSGNWHCDSTWMGDRVITTSTRAWALPTYNNHLYKQISSQSGASNDNHYLGYSTPWGYFDFNRFHCHFSPRDWQRLINNNWGFRPKRLNFKLFNIQVKEVTQNDGTTTIANNLTSTVQVFTDSEYQLPYVLGSAHQGCPPPFPADVFMVPQYGYLTLNNGSQAVGRSSFYCLEYFPSQMLRTGNNFTFSYTFEDVPFHSSYAHSQSLDRLMNPLIDQYLYYLSRTNTPSGTTTQSRLQFSQAGASDIRDQSRNWLPGPCYRQQRVSKTAADNNNSDYSWTGATKYHLNGRDSLVNPGTAMASHKDDEEKYFPQSGVLIFGKQDSGKTNVDIEKVMITDEEEIRTTNPVATEQYGSVSTNLQSGNTQAATSDVNTQGVLPGMVWQDRDVYLQGPIWAKIPHTDGHFHPSPLMGGFGPKHPPPQILIKNTPVPANPSTTFSAAKFASFITQYSTGQVSVEIEWELQKENSKRWNPEIQYTSNYNKSVNVDFTVDTNGVYSEPRPIGTRYLTRNL

SEQ ID NO: 2583 - protein, 735 aa, synthetic construct
  REGION 1..735: note = source = /note="Description of Artificial Sequence: Synthetic polypeptide"
MAADGYLPDWLEDTLSEGIRQWWKLKPGPPPPKPAERHKDDSRGLVLPGYKYLGPFNGLDKGEPVNEADAAALEHDKAYDRQLDSGDNPYLKYNHADAEFQERLKEDTSFGGNLARAVFQAKKRVLEPLGLVEEPVKTAPGKKRPVEHSPAELDSSSGTGKSGQQPARKRLNFGQTGDADSVPDPQPLGQPPAAPSGLGTNTMASGSGAPMADNNEGADGVGNSSGNWHCDSTWMGDRVITTSTRTWALPTYNNHLYKQISSQSGASNDNHYFGYSTPWGYFDFNRFHCHFSPRDWQRLINNNWGFRPKRLNFKLFNIQVKEVTQNDGTTTIANNLTSTVQVFTDSEYQLPYVLGSAHQGCLPPFPADVFMVPQYGYLTLNNGSQAVGRSSFYCLEYFPSQMLRTGNNFTFSYTFEDVPFHSSYAHSQSLDRLMNPLIDQYLYYLSRTNTPSGTTTQSRLQFSQAGASDIRDQSRNWLPGPCYRQQRVSKTAADNNNSDYSWTGATKYHLNGRDSLVNPGTAMASHKDDEEKYFPQSGVLIFGKQDSGKTNVDIEKVMITDEEEIRTTNPVATEQYGSVSTNLQSGNTQAATSDVNTQGVLPGMVWQDRDVYLQGPIWAKIPHTDGHFHPSPLMGGFGPKHPPPQILIKNTPVPANPSTTFSAAKFAFFITQYSTGQVSVEIEWELQKENSKRWNPEIQYTSNYNKSVNVDFTVDTNGVYSEPRPIGTRYLTRNL

SEQ ID NO: 2584 - protein, 735 aa, synthetic construct
  REGION 1..735: note = source = /note="Description of Artificial Sequence: Synthetic polypeptide"
MAADGYLPDWLEDTLSEGIRQWWKLKPGPPPPKPAERHKDDSRGLVLPGYKYLGPFNGLDKGEPVNEADAAALEHDKAYDRQLDSGDNPYLKYNHADAEFQERLKEDTSFGGNLARAVFQAKKRVLEPLGLVEEPVKTAPGKKRPVEHSPAELDSSSGTGKSGQQPARKRLNFGQTGDADSVPDPQPLGQPPAAPSGLGTNTMASGSGAPMADNNEGADGVGNSSGNWHCDSTWMGDRVITTSTRTWALPTYNNHLYKQISSQSGASNDNHYLGYSTPWGYFDFNRFHCHFSPRDWQRLINNNWGFRPKRLNFKLFNIQVKEVTQNDGTTTIANNLTSTVQVFTDSEYQLPYVLGSAHQGCLPPFPADVFMVPQYGYLTLNNGSQAVGRSSFYRLEYFPSQMLRTGNNFTFSYTFEDVPFHSSYAHSQSLDRLMNPLIDQYLYYLSRTNTPSGTTTQSRLQFSQAGASDIRDQSRNWLPGPCYRQQRVSKTAADNNNSDYSWTGATKYHLNGRDSLVNPGTAMASHKDDEEKYFPQSGVLIFGKQDSGKTNVDIEKVMITDEEEIRTTNPVATEQYGSVSTNLQSGNTQAATSDVNTQGVLPGMVWQDRDVYLQGPIWAKIPHTDGHFHPSPLMGGFGPKHPPPQILIKNTPVPANPSTTFSAAKFASFITQYSTGQVSVEIEWELQKENSKRWNPEIQYTSNYNKSVNVDFTVDTNGVYSEPRPIGTRYLTRNL

SEQ ID NO: 2585 - protein, 734 aa, synthetic construct
  REGION 1..734: note = source = /note="Description of Artificial Sequence: Synthetic polypeptide"
MAADGYLPDWLEDTLSEGIRQWWKLKPGPPPPKPAERHKDDSRGLVLPGYKYLGPFNGLDKGEPVNEADAAALEHDKAYDRQLDSGDNPYLKYNHADAEFQERLKEDTSFGGNLARAVFQAKKRVLEPLGLVEEPVKTAPGKKRPVEHSPAELDSSSGTGKSGQQPARKRLNFGQTGDADSVPDPQPLGQPPAAPSGLGTNTMASGSGAPMADNNEGADGVGNSSGNWHCDSTWMGDRVITTSTRTWALPTYNNHLYKQISSQSGASNDNHYLGYSTPWGYFDFNRFHCHFSPRDWQRLINNNWGFRPKRLNFKLFNIQVKEVTQNDGTTTIANNLTSTVQVFTDSEYQLPYVLGSAHQGCLPPFPADVFMVPQYGYLTLNNGSQAVGRSSFYCLEYFPSQMLRTGNNFTFSYTFEDVPFHSSYAHSQSLDRLMNPLIDQYLYYLSRTNTPSGTTTQSRLQFSQAGASDIRDQSRNWLPGPCYRQQRVSKTAADNNSDYSWTGATKYHLNGRDSLVNPGTAMASHKDDEEKYFPQSGVLIFGKQDSGKTNVDIEKVMITDEEEIRTTNPVATEQYGSVSTNLQSGNTQAATSDVNTQGVLPGMVWQDRDVYLQGPIWAKIPHTDGHFHPSPLMGGFGPKHPPPQILIKNTPVPANPSTTFSAAKFASFITQYSTGQVSVEIEWELQKENSKRWNPEIQYTSNYNKSVNVDFTVDTNGVYSEPRPIGTRYLTRNL

SEQ ID NO: 2586 - protein, 734 aa, synthetic construct
  REGION 1..734: note = source = /note="Description of Artificial Sequence: Synthetic polypeptide"
MAADGYLPDWLEDTLSEGIRQWWKLKPGPPPPKPAERHKDDSRGLVLPGYKYLGPFNGLDKGEPVNEADAAALEHDKAYDRQLDSGDNPYLKYNHADAEFQERLKEDTSLGNLARAVFQAKKRVLEPLGLVEEPVKTAPGKKRPVEHSPAELDSSSGTGKSGQQPARKRLNFGQTGDADSVPDPQPLGQPPAAPSGLGTNTMASGSGAPMADNNEGADGVGNSSGNWHCDSTWMGDRVITTSTRTWALPTYNNHLYKQISSQSGASNDNHYFGYSTPWGYFDFNRFHCHFSPRDWQRLINNNWGFRPKRLNFKLFNIQVKEVTQNDGTTTIANNLTSTVQVFTDSEYQLPYVLGSAHQGCLPPFPADVFMVPQYGYLTLNNGSQAVGRSSFYCLEYFPSQMLRTGNNFTFSYTFEDVPFHSSYAHSQSLDRLMNPLIDQYLYYLSRTNTPSGTTTQSRLQFSQAGASDIRDQSRNWLPGPCYRQQRVSKTAADNNNSDYSWTGATKYHLNGRDSLVNPGTAMASHKDDEEKYFPQSGVLIFGKQDSGKTNVDIEKVMITDEEEIRTTNPVATEQYGSVSTNLQSGNTQAATSDVNTQGVLPGMVWQDRDVYLQGPIWAKIPHTDGHFHPSPLMGGFGPKHPPPQILIKNTPVPANPSTTFSAAKFASFITQYSTGQVSVEIEWELQKENSKRWNPEIQYTSNYNKSVNVDFTVDTNGVYSEPRPIGTRYLTRNL

SEQ ID NO: 2587 - protein, 735 aa, synthetic construct
  REGION 1..735: note = source = /note="Description of Artificial Sequence: Synthetic polypeptide"
MAADGYLPDWLEDTLSEGIRQWWKLKPGPPPPKPAERHKDDSRGLVLPGYKYLGPFNGLDKGEPVNEADAAALEHDKAYDRQLDSGDNPYLKYNHADAEFQERLKEDTSFGGNLARAVFQAKKRVLEPLGLVEEPVKTAPGKKRPVEHSPAELDSSSGTGKSGQQPARKRLNFGQTGDADSVPDPQPLGQPPAAPSGLGTNTMASGSGAPMADNNEGADGVGNSSGNWHCDSTWMGDRVITTSTRTWALPTYNNHLYKQISSQSGASNDNHYFGYSTPWGYFDFNRFHCHFSPRDWQRLINNNWGFRPKRLNFKLFNIQVKEVTQNDGTTTIANNLTSTVQVFTDSEYQLPYVLGSAHQGCLPPFPADVFMVPQYGYLTLNNGSQAVGRSSFYCLEYFPSQMLRTGNNFTFSYTFEDVPFHSSYAHSQSLDRLMNPLIDQYLYYLSRTNTPSGTTTQSRLQFSQAGASDIRDQSRNWLPGPCYRQQRVSKTAADNNNSDYSWTGATKYHLNGRDSLVNPGTAMASHKDDEEKYFPQSGVLIFGKQDSGKTNVDIEKVMITDEEEIRTTNPVATEQYGSVSTNLQSGNTQAATSDVNTQGVLPGMVWQDRDVYLQGPIWAKIPHTDGHFHPSPLMGGFGPKHPPPQILIKNTPVPANPSTTFSAAKFASFITQYSTGQVGVEIEWELQKENSKRWNPEIQYTSNYNKSVNVDFTVDTNGVYSEPRPIGTRYLTRNL

SEQ ID NO: 2588 - protein, 735 aa, synthetic construct
  REGION 1..735: note = source = /note="Description of Artificial Sequence: Synthetic polypeptide"
MAADGYLPDWLEDTLSEGIRQWWKLKPGPPPPKPAERHKDDSRGLVLPGYKYLGPFNGLDKGEPVNEADAAALEHDKAYDRQLDSGDNPYLKYNHADAEFQERLKEDTSFGGNLARAVFQAKKRVLEPLGLVEEPVKTAPGKKRPVEHSPAELDSSSGTGKSGQQPARKRLNFGQTGDADSVPDPQPLGQPPAAPSGLGTNTMASGSGAPMADNNEGADGVGNSSGNWHCDSTWMGDRVITTSTRTWALPTYNNHLYKQISSQSGASNDNHYFGYSTPWGYFDFNRFHCHFSPRDWQRLINNNWGFRPKRLNFKLFNIQVKEVTQNDSTTTIANNLTSTVQVFTDSEYQLPYVLGSAHQGCLPPFPADVFMVPQYGYLTLNNGSQAVGRSSFYCLEYFPSQMLRTGNNFTFSYTFEDVPFHSSYAHSQSLDRLMNPLIDQYLYYLSRTNTPSGTTTQSRLQFSQAGASDIRDQSRNWLPGPCYRQQRVSKTAADNNNSDYSWTGATKYHLNGRDSLVNPGTAMASHKDDEEKYFPQSGVLIFGKQDSGKTNVDIEKVMITDEEEIRTTNPVATEQYGSVSTNLQSGNTQAATSDVNTQGVLPGMVWQDRDVYLQGPIWAKIPHTDGHFHPSPLMGGFGPKHPPPQILIKNTPVPANPSTTFSAAKFASFITQYSTGQVSVEIEWELQKENSKRWNPEIQYTSNYNKSVNVDFTVDTNGVYSEPRPIGTRYLTRNL

SEQ ID NO: 2589 - protein, 735 aa, synthetic construct
  REGION 1..735: note = source = /note="Description of Artificial Sequence: Synthetic polypeptide"
MAADGYLPDWLEDTLSEGIRQWWKLKPGPPPPKPAERHKDDSRGLVLPGYKYLGPFNGLDKGEPVNEADAAALEHDKAYDRQLDSGDNPYLKYNHADAEFQERLKEDTSFGGNLARAVFQAKKRVLEPLGLVEEPVKTAPGKKRPVEHSPAELDSSSGTGKSGQQPARKRLNFGQTGDADSVPDPQPLGQPPAAPSGLGTNTMASGSGAPMADNNEGADGVGNSSGNWHCDSTWMGDRVITTSTRTWALPTYNNHLYKQISSQSGASNDNHYFGYSTPWGYFDFNRFHCHFSPRDWQRLINNNWGFRPKRLNFKLFNIQVKEVTQNDGTTTIANNLTSTVQVFTDSEYQLPYVLGSAHQGCLPPFPADVFMVPQYGYLTLNNGSQAVGRSSFYCLEYFPSQMLRTGNNFTFSYTFEDVPFHSSYAHSQSLDRLMNPLIDQYLYYLSRTNTPSGTTTQSRLQFSQAGASDIRDQSRNWLPGPCYRQQRVSKTAADNNNSDYSWTGATKYHLNGRDSLVNPGTAMASHKDDEEKYFPQSGVLIFRKQDSGKTNVDIEKVMITDEEEIRTTNPVATEQYGSVSTNLQSGNTQAATSDVNTQGVLPGMVWQDRDVYLQGPIWAKIPHTDGHFHPSPLMGGFGPKHPPPQILIKNTPVPANPSTTFSAAKFAYFITQYSTGQVSVEIEWELQKENSKRWNPEIQYTSNYNKSVNVDFTVDTNGVYSEPRPIGTRYLTRNL

SEQ ID NO: 2590 - protein, 735 aa, synthetic construct
  REGION 1..735: note = source = /note="Description of Artificial Sequence: Synthetic polypeptide"
MAADGYLPDWLEDTLSEGIRQWWKLKPGPPPPKPAERHKDDSRGLVLPGYKYLGPFNGLDKGEPVNEADAAALEHDKAYDRQLDSGDNPYLKYNHADAEFQERLKEDTSFGGNLARAVFQAKKRVLEPLGLVEEPVKTAPGKKRPVEHSPAELDSSSGTGKSGQQPARKRLNFGQTGDADSVPDPQPLGQPPAAPSGLGTNTMASGSGAPMADNNEGADGVGNSSGNWHCDSTWMGDRVITTSTRTWALPTYNNHLYKQISSQSGASNDNHYFGYSTPWGYFDFNRFHCHFSPRDWQRLINNNWGFRPKRLDFKLFNIQVKEVTQNDGTTTIANNLTSTVQVFTDSEYQLPYVLGSAHQGCLPPFPADVFMVPQYGYLTLNNGSQAVGRSSFYCLEYFPSQMLRTGNNFTFSYTFEDVPFHSSYAHSQSLDRLMNPLIDQYLYYLSRTNTPSGTTTQSRLQFSQAGASDIRDQSRNWLPGPCYRQQRVSKTAADNNNSDYSWTGATKYHLNGRDSLVNPGTAMASHKDDEEKYFPQSGVLIFGKQDSGKTNVDIEKVMITDEEEIRTTNPVATEQYGSVSTNLQSGNTQAATSDVNTQGVLPGMVWQDRDVYLQGPIWAKIPHTDGHFHPSPLMGGFGPKHPPPQILIKNTPVPANPSTTFSAAKFASFITQYSTGQVSVEIEWELQKENSKRWNPEIQYTSNYNKSVNVDFTVDTNGVYSEPRPIGTRYLTRNL

SEQ ID NO: 2591 - protein, 735 aa, synthetic construct
  REGION 1..735: note = source = /note="Description of Artificial Sequence: Synthetic polypeptide"
MAADGYLPDWLEDTLSEGIRQWWKLKPGPPPPKPAERHKDDSRGLVLPGYKYLGPFNGLDKGEPVNEADAAALEHDKAYDRQLDSGDNPYLKYNHADAEFQERLKEDTSFGGNLARAVFQAKKRVLEPLGLVEEPVKTAPGKKRPVEHSPAELDSSSGTGKSGQQPARKRLNFGQTGGADSVPDPQPLGQPPAAPSGLGTNTMASGSGAPMADNNEGADGVGNSSGNWHCDSTWMGDRVITTSTRTWALPTYNNHLYKQISSQSGASNDNHYFGYSTPWGYFDFNRFHCHFSPRDWQRLINNNWGFRPKRLNFKLFNIQVKEVTQNDGTTTIANNLTSTVQVFTDSEYQLPYVLGSAHQGCLPPFPADVFMVPQYGYLTLNNGSQAVGRSSFYCLEYFPSQMLRTGNNFTFSYTFEDVPFHSSYAHSQSLDRLMNPLIDQYLYYLSRTNTPSGTTTQSRLQFSQAGASDIRDQSRNWLPGPCYRQQRVSKTAADNNNSDYSWTGATKYHLNGRDSLVNPGTAMASHKDDEEKYFPQSGVLIFGKQDSGKTNVDIEKVMITDEEEIRTTNPVATEQYGSVSTNLQSGNTQAATSDVNTQGVLPGMVWQDRDVYLQGPIWAKIPHTDGHFHPSPLMGGFGPKHPPPQILIKNTPVPANPSTTFSAAKFASFITQYSTGQVSVEIEWELQKENSKRWNPEIQYTSNYNKSVNVDFTVDTNGVYSEPRPIGTRYLTRNL

SEQ ID NO: 2592 - protein, 735 aa, synthetic construct
  REGION 1..735: note = source = /note="Description of Artificial Sequence: Synthetic polypeptide"
MAADGYLPDWLEDTLSEGIRQWWKLKPGPPPPKPAERHKDDSRGLVLPGYKYLGPFNGLDKGEPVNEADAAALEHDKAYDRQLDSGDNPYLKYNHADAEFQERLKEDTSFGGNLARAVFQAKKRVLEPLGLVEEPVKTAPGKKRPVEHSPAELDSSSGTGKSGQQPARKRLNFGQTGDADSVPDPQPLGQPPAAPSGLGTNTMASGSGAPMADNNEGADGVGNSSGNWHCDSTWMGDRVITTSTRTWALPTYNNHLYKQISSQSGASNDNHYFGYSTPWGYFDFNRFHCHFSPRDWQRLINNNWGFRPKRLNFKLFNIQVKEVTQNDGTTTIANNLTSTVQVFTDSEYQLPYVLGSAHQGCLPPFPADVFMVPQYGYLTLNNGSQAVGRSSFYCLEYFPSQMLRTGNNLTFSYTFEDVPFHSSYAHSQSLDRLMNPLIDQYLYYLSRTNTPSGTTTQSRLQFSQAGASDIRDQSRNWLPGPCYRQQRVSKTAADNNNSDYSWTGATKYHLNGRDSLVNPGTAMASHKDDEEKYFPQSGVLIFGKQDSGKTNVDIEKVMITDEEEIRTTNPVATEQYGSVSTNLQSGNTQAATSDVNTQGVLPGMVWQDRDVYLQGPIWAKIPHTDGHFHPSPLMGGFGPKHPPPQILIKNTPVPANPSTTFSAAKFASFITQYSTGQVSVEIEWELQKENSKRWNPEIQYTSNYNKSVNVDFTVDTNGVYSEPRPIGTRYLTRNL

SEQ ID NO: 2593 - protein, 735 aa, synthetic construct
  REGION 1..735: note = source = /note="Description of Artificial Sequence: Synthetic polypeptide"
MAADGYLPDWLEDTLSEGIRQWWKLKPGPPPPKPAERHKDDSRGLVLPGYKYLGPFNGLDKGEPVNEADAAALEHDKAYDRQLDSGDNPYLKYNHADAEFQERLKEDTSFGGNLARAVFQAKKRVLEPLGLVEEPVKTAPGKKRPVEHSPAELDSSSGTGKSGQQPARKRLNFGQTGDADSVPDPQPLGQPPAAPSGLGTNTMASGSGAPMADNNEGADGVGNSSGNWHCDSTWMGDRVITTSTRTWALPTYNNHLYKQISSQSGASNDNHYFGYSTPWGYFDFNRFHCHFSPRDWQRLINNNWGFRPKRLNFKLFNIQVKEVTQNDGTTTIANNLTSTVQVFTDSEYQLPYVLGSAHQGCLPPFPADVFMVPQYGYHTLNNGSQAVGRSSFYCLEYFPSQMLRTGNNFTFSYTFEDVPFHSSYAHSQSLDRLMNPLIDQYLYYLSRTNTPSGTTTQSRLQFSQAGASDIRDQSRNWLPGPCYRQQRVSKTAADNNNSDYSWTGATKYHLNGRDSLVNPGTAMASHKDDEEKYFPQSGVLIFGKQDSGKTNVDIEKVMITDEEEIRTTNPVATEQYGSVSTNLQSGNTQAATSDVNTQGVLPGMVWQDRDVYLQGPIWAKIPHTDGHFHPSPLMGGFGPKHPPPQILIKNTPVPANPSTTFSAAKFASFITQYSTGQVSVEIEWELQKENSKRWNPEIQYTSNYNKSVNVDFTVDTNGVYSEPRPIGTRYLTRNL

SEQ ID NO: 2594 - protein, 735 aa, synthetic construct
  REGION 1..735: note = source = /note="Description of Artificial Sequence: Synthetic polypeptide"
MAADGYLPDWLEDTLSEGIRQWWKLKPGPPPPKPAERHKDDSRGLVLPGYKYLGPFNGLDKGEPVNEADAAALEHDKAYDRQLDSGDNPYLKYNHADAEFQERLKEDTSFGGNLARAVFQAKKRVLEPLGLVEEPVKTAPGKKRPVEHSPAELDSSSGTGKSGQQPARKRLNFGQTGDADSVPDPQPLGQPPAAPSGLGTNTMASGSGAPMADNNEGADGVGNSSGNWHCDSTWMGDRVITTSTRTWALPTYNNHLYKQISSQSGASNDNHYFGYSTPWGYFDFNRFHCHFSPRDWQRLINNNWGFRPKRLNFKLFNIQVKEVTQNDGTTTIANNLTSTVQVFTDSEYQLPYVLGSAHQGCLPPFPADVFMVPQYGYLTLNNGSQAVGRSSFYCLEYFPSQMLRTGNNFTFSYTFEDVPFHSSYAHSQSLDRLMNPLIDQYPYYLSRTNTPSGTTTQSRLQFSQAGASDIRDQSRNWLPGPCYRQQRVSKTAADNNNSDYSWTGATKYHLNGRDSLVNPGTAMASHKDDEEKYFPQSGVLIFGKQDSGKTNVDIEKVMITDEEEIRTTNPVATEQYGSVSTNLQSGNTQAATSDVNTQGVLPGMVWQDRDVYLQGPIWAKIPHTDGHFHPSPLMGGFGPKHPPPQILIKNTPVPANPSTTFSAAKFASFITQYSTGQVSVEIEWELQKENSKRWNPEIQYTSNYNKSVNVDFTVDTNGVYSEPRPIGTRYLTRNL

SEQ ID NO: 2595 - protein, 735 aa, synthetic construct
  REGION 1..735: note = source = /note="Description of Artificial Sequence: Synthetic polypeptide"
MAADGYLPDWLEDTLSEGIRQWWKLKPGPPPPKPAERHKDDSRGLVLPGYKYLGPFNGLDKGEPVNEADAAALEHDKAYDRQLDSGDNPYLKYNHADAEFQERLKEDTSFGGNLARAVFQAKKRVLEPLGLVEEPVKTAPGKKRPVEHSPAELDSSSGTGKSGQQPARKRLNFGQTGDADSVPDPQPLGQPPAAPSGLGTNTMASGSGAPMADNNEGADGVGNSSGNWHCDSTWMGDRVITTSTRTWALPTYNNHLYKQISSQSGASNDNHYFGYSTPWGYFDFNRFHCHFSPRDWQRLINNNWGFRPKRLNFKLFNIQVKEVTQNDGTTTIANNLTSTVQVFTDSEYQLPYVLGSAHQGCLPPFPADVFMVPQYGYLTLNNGSQAVGRSSFYCLEYFPSQMLRTGNNFTFSYTFEDVPFHSSYAHSQSLDRLMNPLIDQYLYYLSRTNTPSGTTTQSRLQFSQAGASDIRDQSRNWLPGPCYRQQRVSKTAADNNNSDYSWTGATKYHLNGRDSLVNPGTAMASHKDDEEKYFPQSGVLIFGKQDSGKTNVDIEKVMITDEEEIRTTNPVATEQYGSVSTNLQSGNTQAATSDVNTQGVLPGMVWQDRDVYLQGPIWAKIPHTDGHFHPSPLMGGFGPKHPPPQILIKNTPVPANPPTTFSAAKFASFITQYSTGQVSVEIEWELQKENSKRWNPEIQYTSNYNKSVNVDFTVDTNGVYSEPRPIGTRYLTRNL

SEQ ID NO: 2596 - protein, 735 aa, synthetic construct
  REGION 1..735: note = source = /note="Description of Artificial Sequence: Synthetic polypeptide"
MAADGYLPDWLEDTLSEGIRQWWKLKPGPPPPKPAERHKDDSRGLVLPGYKYLGPFNGLDKGEPVNEADAAALEHDKAYDRQLDSGDNPYLKYNHADAEFQERLKEDTSFGGNLARAVFQAKKRVLEPLGLVEEPVKTAPGKKRPVEHSPAELDSSSGTGKSGQQPARKRLNFGQTGDADSVPDPQPLGQPPAAPSGLGTNTMASGSGAPMADNNEGADGVGNSSGNWHCDSTWMGDRVITTSTRTWALPTYNNHLYKQISSQSGASNDNHYFGYSTPWGYFDFNRFHCHFSPRDWQRLINNNWGFRPKRLNFKLFNIQVKEVTQNDGTTTIANNLTSTVQVFTDSEYQLPYVLGSAHQGCLPPFPADVFMVPQYGYLTLNNGSQAVGRSSFYCLEYFPSQMLRTGNNFTFSYTFEDVPFHSSYAHSQSLDRLMNPLIDQYLYYLSRTNTPSGTTTQSRLQFSQAGASDIRDQSRNWLPGPCYRQQRVPKTAADNNNSDYSWTGATKYHLNGRDSLVNPGTAMASHKDDEEKYFPQSGVLIFGKQDSGKTNVDIEKVMITDEEEIRTTNPVATEQYGSVSTNLQSGNTQAATSDVNTQGVLPGMVWQDRDVYLQGPIWAKIPHTDGHFHPSPLMGGFGPKHPPPQILIKNTPVPANPSTTFSAAKFASFITQYSTGQVSVEIEWELQKENSKRWNPEIQYTSNYNKSVNVDFTVDTNGVYSEPRPIGTRYLTRNL

SEQ ID NO: 2597 - protein, 735 aa, synthetic construct
  REGION 1..735: note = source = /note="Description of Artificial Sequence: Synthetic polypeptide"
MAADGYLPDWLEDTLSEGIRQWWKLKPGPPPPKPAERHKDDSRGLVLPGYKYLGPFNGLDKGEPVNEADAAALEHDKAYDRQLDSGDNPYLKYNHADAEFQERLKEDTSFGGNLARAVFQAKKRVLEPLGLVEEPVKTAPGKKRPVEHSPAELDSSSGTGKSGQQPARKRLNFGQTGDADSVPDPQPLGQPPAAPSGLGTNTMASGSGAPMADNNEGADGVGNSSGNWHCDSTWMGDRVITTSTRTWALPTYNNHLYKQISSQSGASNDNHYFGYSTPWGYFDFNRFHCHFSPRDWQRLINNNWGFRPKRLNFKLFNIQVKEVTQNDGTTTIANNLTSTVQVFTDSEYQLPYVLGSAHQGCLPPFPADVFMVPQYGYLTLNNGSQAVGRSSFYCLEYFPSQMLRTGNNFTFSYTFEDVPFHSSYAHSQSLDRLMNPLIDQYLYYLSRTNTPSGTTTQSRLQFSQAGASDIRDQSRNWLPGPCYRQQRVSKTAADNNNSDYSWTGATKYHLNGRDSLVNPGTAMASHKDDEEKYFPQSGVLIFGKQDSGKTNVDIEKVMITDEEEIRTTNPVATEQYGSVSTNLQSGNTQAATSDVNTQGVLPGMVWQDRDVYLQGPIWAKIPHTDGHFHPSPLMGGFGPKHPPPQILIKNTPVPANPSTTFSAAKFASFITQYSTGQVSVEIEWELQKENSKRWNPEIQYTSNYNKSVNVDFTVDTNGVYSEPRPIGTRYLTRNL

SEQ ID NO: 2598 - protein, 735 aa, synthetic construct
  REGION 1..735: note = source = /note="Description of Artificial Sequence: Synthetic polypeptide"
MAADGYLPDWLEDTLSEGIRQWWKLKPGPPPPKPAERHKDDSRGLVLPGYKYLGPFNGLDKGEPVNEADAAALEHDKAYDRQLDSGDNPYLKYNHADAEFQERLKEDTPFGGNLARAVFQAKKRVLEPLGLVEEPVKTAPGKKRPVEHSPAELDSSSGTGKSGQQPARKRLNFGQTGDADSVPDPQPLGQPPAAPSGLGTNTMASGSGAPMADNNEGADGVGNSSGNWHCDSTWMGDRVITTSTRTWALPTYNNHLYKQISSQSGASNDNHYFGYSTPWGYFDFNRFHCHFSPRDWQRLINNNWGFRPKRLNFKLFNIQVKEVTQNDGTTTIANNLTSTVQVFTDSEYQLPYVLGSAHQGCLPPFPADVFMVPQYGYLTLNNGSQAVGRSSFYCLEYFPSQMLRTGNNFTFSYTFEDVPFHSSYAHSQSLDRLMNPLIDQYLYYLSRTNTPSGTTTQSRLQFSQAGASDIRDQSRNWLPGPCYRQQRVSKTAADNNNSDYSWTGATKYHLNGRDSLVNPGTAMASHKDDEEKYFPQSGVLIFGKQDSGKTNVDIEKVMITDEEEIRTTNPVATEQYGSVSTNLQSGNTQAATSDVNTQGVLPGMVWQDRDVYLQGPIWAKIPHTDGHFHPSPLMGGFGPKHPPPQILIKNTPVPANPSTTFSAAKFASFITQYSTGQVSVEIEWELQKENSKRWNPEIQYTSNYNKSVNVDFTVDTNGVYSEPRPIGTRYLTRNL

SEQ ID NO: 2599 - protein, 735 aa, synthetic construct
  REGION 1..735: note = source = /note="Description of Artificial Sequence: Synthetic polypeptide"
MAADGYLPDWLEDTLSEGIRQWWKLKPGPPPPKPAERHKDDSRGLVLPGYKYLGPFNGLDKGEPVNEADAAALEHDKAYDRQLDSGDNPYLKYNHADAEFQERLKEDTSFGGNLARAVFQAKKRVLEPLGLVEEPVKTAPGKKRPVEHSPAELDSSSGTGKSGQQPARKRLNFGQTGDADSVPDPQPLGQPPAAPSGLGTNTMASGSGAPMADNNEGADGVGNSSGNWHCDSTWMGDRVITTSTRTWALPTYNNHLYKQISSQSGASNDNHYFGYSTPWGYFDFNRFHCHFSPRDWQRLINNNWGFRPKRLNSKLFNIQVKEVTQNDGTTTIANNLTSTVQVFTDSEYQLPYVLGSAHQGCLPPFPADVFMVPQYGYLTLNNGSQAVGRSSFYCLEYFPSQMLRTGNNFTFSYTFEDVPFHSSYAHSQSLDRLMNPLIDQYLYYLSRTNTPSGTTTQSRLQFSQAGASDIRDQSRNWLPGPCYRQQRVSKTAADNNNSDYSWTGATKYHLNGRDSLVNPGTAMASHKDDEEKYFPQSGVLIFGKQDSGKTNVDIEKVMITDEEEIRTTNPVATEQYGSVSTNLQSGNTQAATSDVNTQGVLPGMVWQDRDVYLQGPIWAKIPHTDGHFHPSPLMGGFGPKHPPPQILIKNTPVPANPSTTFSAAKFASFITQYSTGQVSVEIEWELQKENSKRWNPEIQYTSNYNKSVNVDFTVDTNGVYSEPRPIGTRYLTRNL

SEQ ID NO: 2600 - protein, 735 aa, synthetic construct
  REGION 1..735: note = source = /note="Description of Artificial Sequence: Synthetic polypeptide"
MAADGYLPDWLEDTLSEGIRQWWKLKPGPPPPKPAERHKDDSRGLVLPGYKYLGPFNGLDKGEPVNEADAAALEHDKAYDRQLDSGDNPYLKYNHADAEFQERLKEDTSFGGNLARAVFQAKKRVLEPLGLVEEPVKTAPGKKRPVEHSPAELDSSSGTGKSGQQPARKRLNFGQTGDADSVPDPQPLGQPPAAPSGLGTNTMASGSGAPMADNNEGADGVGNSSGNWHCDSTWMGDRVITTSTRTWALPTYNNHLYKQISSQSGASNDNHYFGYSTPWGYFDFNRFHCHFSPRDWQRLINNNWGFRPKRLNFKLFNIQVKEVTQNDGTTTIANNLTSTVQVFTDSEYQLPYVLGSAHQGCLPPFPADVFMVPQYGYLTLNNGSQAVGRSSFYCLEYFPSQMLRTGNNFTFSYTFEDVPFHSSYAHSQGLDRLMNPLIDQYLYYLSRTNTPSGTTTQSRLQFSQAGASDIRDQSRNWLPGPCYRQQRVSKTAADNNNSDYSWTGATKYHLNGRDSLVNPGTAMASHKDDEEKYFPQSGVLIFGKQDSGKTNVDIEKVMITDEEEIRTTNPVATEQYGSVSTNLQSGNTQAATSDVNTQGVLPGMVWQDRDVYLQGPIWAKIPHTDGHFHPSPLMGGFGPKHPPPQILIKNTPVPANPSTTFSAAKFASFITQYSTGQVSVEIEWELQKENSKRWNPEIQYTSNYNKSVNVDFTVDTNGVYSEPRPIGTRYLTRNL

SEQ ID NO: 2601 - protein, 735 aa, synthetic construct
  REGION 1..735: note = source = /note="Description of Artificial Sequence: Synthetic polypeptide"
MAADGYLPDWLEDTLSEGIRQWWKLKPGPPPPKPAERHKDDSRGLVLPGYKYLGPFNGLDKGEPVNEADAAALEHDKAYDRQLDSGDNPYLKYNHADAEFQERLKEDTSFGGNLARAVFQAKKRVLEPLGLVEEPVKTAPGKKRPVEHSPAELDSSSGTGKSGQQPARKRLNFGQTGDADSVPDPQPLGQPPAAPSGLGTNTMASGSGAPMADNNEGADGVGNSSGNWHCDSTWMGDRVITTSTRTWALPTYNNHLYKQISSQSGASNDNHYFGYSTPWGYFDFNRFHCHFSPRDWQRLINNNWGFRPKRLNFKLFNIQVKEVTQNDGTTTIANNLTSTVQVFTDSEYQLPYVLGSAHQGCLPPLPADVFMVPQYGYLTLNNGSQAVGRSSFYCLEYFPSQMLRTGNNFTFSYTFEDVPFHSSYAHSQSLDRLMNPLIDQYLYYLSRTNTPSGTTTQSRLQFSQAGASDIRDQSRNWLPGPCYRQQRVSKTAADNNNSDYSWTGATKYHLNGRDSLVNPGTAMASHKDDEEKYFPQSGVLIFGKQDSGKTNVDIEKVMITDEEEIRTTNPVATEQYGSVSTNLQSGNTQAATSDVNTQGVLPGMVWQDRDVYLQGPIWAKIPHTDGHFHPSPLMGGFGPKHPPPQILIKNTPVPANPSTTFSAAKFASFITQYSTGQVSVEIEWELQKENSKRWNPEIQYTSNYNKSVNVDFTVDTNGVYSEPRPIGTRYLTRNL

SEQ ID NO: 2602 - protein, 735 aa, synthetic construct
  REGION 1..735: note = source = /note="Description of Artificial Sequence: Synthetic polypeptide"
MAADGYLPDWLEDTLSEGIRQWWKLKPGPPPPKPAERHKDDSRGLVLPGYKYLGPFNGLDKGEPVNEADAAALEHDKAYDRQLDSGDNPYLKYNHADAEFQERLKEDTSFGGNLARAVFQAKKRVLEPLGLVEEPVKTAPGKKRPVEHSPAELDSSSGTGKSGQQPARKRLNFGQTGDADSVPDPQPLGQPPAAPSGLGTNTMASGSGAPMADNNEGADGVGNSSGNWHCDSTWMGDRVITTSTRTWALPTYNNHLYKQISSQSGASNDNHYFGYSTPWGYFDFNRFHCHFSPRDWQRPINNNWGFRPKRLNFKLFNIQVKEVTQNDGTTTIANNLTSTVQVFTDSEYQLPYVLGSAHQGCLPPFPADVFMVPQYGYLTLNNGSQAVGRSSFYCLEYFPSQMLRTGNNFTFSYTFEDVPFHSSYAHSQSLDRLMNPLIDQYLYYLSRTNTPSGTTTQSRLQFSQAGASDIRDQSRNWLPGPCYRQQRVSKTAADNNNSDYSWTGATKYHLNGRDSLVNPGTAMASHKDDEEKYFPQSGVLIFGKQDSGKTNVDIEKVMITDEEEIRTTNPVATEQYGSVSTNLQSGNTQAATSDVNTQGVLPGMVWQDRDVYLQGPIWAKIPHTDGHFHPSPLMGGFGPKHPPPQILIKNTPVPANPSTTFSAAKFASFITQYSTGQVSVEIEWELQKENSKRWNPEIQYTSNYNKSVNVDFTVDTNGVYSEPRPIGTRYLTRNL

SEQ ID NO: 2603 - protein, 735 aa, synthetic construct
  REGION 1..735: note = source = /note="Description of Artificial Sequence: Synthetic polypeptide"
MAADGYLPDWLEDTLSEGIRQWWKLKPGPPPPKPAERHKDDSRGLVLPGYKYLGPFNGLDKGEPVNEADAAALEHDEAYDRQLDSGDNPYLKYNHADAEFQERLKEDTSFGGNLARAVFQAKKRVLEPLGLVEEPVKTAPGKKRPVEHSPAELDSSSGTGKSGQQPARKRLNFGQTGDADSVPDPQPLGQPPAAPSGLGTNTMASGSGAPMADNNEGADGVGNSSGNWHCDSTWMGDRVITTSTRTWALPTYNNHLYKQISSQSGASNDNHYFGYSTPWGYFDFNRFHCHFSPRDWQRLINNNWGFRPKRLNFKLFNIQVKEVTQNDGTTTIVNNLTSTVQVFTDSEYQLPYVLGSAHQGCLPPFPADVFMVPQYGYLTLNNGSQAVGRSSFYCLEYFPSQMLRTGNNFTFSYTFEDVPFHSSYAHSQSLDRLMNPLIDQYLYYLSRTNTPSGTTTQSRLQFSQAGASDIRDQSRNWLPGPCYRQQRVSKTAADNNNSDYSWTGATKYHLNGRDSLVNPGTAMASHKDDEEKYFPQSGVLIFGKQDSGKTNVDIEKVMITDEEEIRTTNPVATEQYGSVSTNLQSGNTQAATSDVNTQGVLPGMVWQDRDVYLQGPIWAKIPHTDGHFHPSPLMGGFGPKHPPPQILIKNTPVPANPSTTFSAAKFAYFITQYSTGQVSVEIEWELQKGNSKRWNPEIQYTSNYNKSVNVDFTVDTNGVYSEPRPIGTRYLTRNL

SEQ ID NO: 2604 - protein, 735 aa, synthetic construct
  REGION 1..735: note = source = /note="Description of Artificial Sequence: Synthetic polypeptide"
MAADGYLPDWLEDTLSEGIRQWWKLKPGPPPPKPAERHKDDSRGLVLPGYKYLGPFNGLDKGEPVNEADAAALEHDKAYDRQLDSGDNPYLKYNHADAEFQERLKEDTSFGGNLARAVFQAKKRVLEPLGLVEEPVKTAPGKKRPVEHSPAELDSSSGTGKSGQQPARKRLNFGQTGDADSVPDPQPLGQPPAAPSGLGTNTMASGSGAPMADNNEGADGVGNSSGNWHCDSTWMGDRVITTSTRTWALPTYNNHLYKQISSQSGASNDNHYFGYSTPWGYFDFNRFHCHFSPRDWQRLINNNWGFRPKRLNFKLFNIQVKEVTQNDGTTTIANNLTSTVQVFTDSEYQLPYVLGSAHQGCLPPFPADVFMVPQYGYLTLNNGSQAVGRSSFYCLEYFPSQMLRTGNNCTFSYTFEDVPFHSSYAHSQSLDRLMNPLIDQYLYYLSRTNTPSGTTTQSRLQFSQAGASDIRDQSRNWLPGPCYRQQRVSKTAADNNNSDYSWTGATKYHLNGRDSLVNPGTAMASHKDDEEKYFPQSGVLIFGKQDSGKTNVDIEKVMITDEEEIRTTNPVATEQYGSVSTNLQSGNTQAATSDVNTQGVLPGMVWQDRDVYLQGPIWAKIPHTDGHFHPSPLMGGFGPKHPPPQILIKNTPVPANPSTTFSAAKFASFITQYSTGQVSVEIEWELQKENSKRWNPEIQYTSNYNKSVNVDFTVDTNGVYSEPRPIGTRYLTRNL

SEQ ID NO: 2605 - protein, 735 aa, synthetic construct
  REGION 1..735: note = source = /note="Description of Artificial Sequence: Synthetic polypeptide"
MAADGYLPDWLEDTLSEGIRQWWKLKPGPPPPKPAERHKDDSRGLVLPGYKYLGPFNGLDKGEPVNEADAAALEHDKAYDRQLDSGDNPYLKYNHADAEFQERLKEDTSFGGNLARAVFQAKKRVLEPLGLVEEPVKTAPGKKRPVEHSPAELDSSSGTGKSGQQPARKRLNFGQTGDADSVPDPQPLGQPPAAPSGLGTNTMASGSGAPMADNNEGADGVGNSSGNWHCDSTWMGDRVITTSTRTWALPTYNNHLYKQISSQSGASNDNHYFGYSTPWGYFDFNRFHCHFSPRDWQRLINNNWGFRPKRPNFKLFNIQVKEVTQNDGTTTIANNLTSTVQVFTDSEYQLPYVLGSAHQGCLPPFPADVFMVPQYGYLTLNNGSQAVGRSSFYCLEYFPSQMLRTGNNFTFSYTFEDVPFHSSYAHSQSLDRLMNPLIDQYLYYLSRTNTPSGTTTQSRLQFSQAGASDIRDQSRNWLPGPCYRQQRVSKTAADNNNSDYSWTGATKYHLNGRDSLVNPGTAMASHKDDEEKYFPQSGVLIFGKQDSGKTNVDIEKVMITDEEEIRTTNPVATEQYGSVSTNLQSGNTQAATSDVNTQGVLPGMVWQDRDVYLQGPIWAKIPHTDGHFHPSPLMGGFGPKHPPPQILIKNTPVPANPSTTFSAAKFASFITQYSTGQVSVEIEWELQKENSKRWNPEIQYTSNYNKSVNVDFTVDTNGVYSEPRPIGTRYLTRNL

SEQ ID NO: 2606 - protein, 735 aa, synthetic construct
  REGION 1..735: note = source = /note="Description of Artificial Sequence: Synthetic polypeptide"
MAADGYLPDWLEDTLSEGIRQWWKLKPGPPPPKPAERHKDDSRGLVLPGYKYLGPFNGLDKGEPVNEADAAALEHDKAYDRQLDSGDNPYLKYNHADAEFQERLKEDTSFGGNLARAVFQAKKRVLEPLGLVEEPVKTAPGKKRPVEHSPAELDSSSGTGKSGQQPARKRLNFGQTGDADSVPDPQPLGQPPAAPSGLGTNTMASGSGAPMAGNNEGADGVGNSSGNWHCDSTWMGDRVITTSTRTWALPTYNNHLYKQISSQSGASNDNHYFGYSTPWGYFDFNRFHCHFSPRDWQRLINNNWGFRPKRLNFKLFNIQVKEVTQNDGTTTIANNLTSTVQVFTDSEYQLPYVLGSAHQGCLPPFPADVFMVPQYGYLTLNNGSQAVGRSSFYCLEYFPSQMLRTGNNFTFSYTFEDVPFHSSYAHSQSLDRLMNPLIDQYLYYLSRTNTPSGTTTQSRLQFSQAGASDIRDQSRNWLPGPCYRQQRVSKTAADNNNSDYSWTGATKYHLNGRDSLVNPGTAMASHKDDEEKYFPQSGVLIFGKQDSGKTNVDIEKVMITDEEEIRTTNPVATEQYGSVSTNLQSGNTQAATSDVNTQGVLPGMVWQDRDVYLQGPIWAKIPHTDGHFHPSPLMGGFGPKHPPPQILIKNTPVPANPSTTFSAAKFASFITQYSTGQVSVEIEWELQKENSKRWNPEIQYTSNYNKSVNVDFTVDTNGVYSEPRPIGTRYLTRNL

SEQ ID NO: 2607 - protein, 735 aa, synthetic construct
  REGION 1..735: note = source = /note="Description of Artificial Sequence: Synthetic polypeptide"
MAADGYLPDWLEDTLSEGIRQWWKLKPGPPPPKPAERHKDDSRGLVLPGYKYLGPFNGLDKGEPVNEADAAALEHDKAYDRQLDSGDNPYLKYNHADAEFQERLKEDTPFGGNLARAVFQAKKRVLEPLGLVEEPVKTAPGKKRPVEHSPAELDSSSGTGKSGQQPARKRLNFGQTGDADSVPDPQPLGQPPAAPSGLGTNTMASGSGAPMADNNEGADGVGNSSGNWHCDSTWMGDRVITTSTRTWALPTYNNHLYKQISSQSGASNDNHYFGYSTPWGYFDFNRFHCHFSPRDWQRLINNNWGFRPKRLNFKLFNIQVKEVTQNDGTTTIANNLTSTVQVFTDSEYQLPYVLGSAHQGCLPPFPADVFMVPQYGYLTLNNGSQAVGRSSFYCLEYFPSQMLRTGNNFTFSYTFEDVPFHSSYAHSQSLDRLMNPLIDQYLYYLSRTNTPSGTTTQSRLQFSQAGASDIRDQSRNWLPGPCYRQQRVSKTAADNNNSDYSWTGATKYHLNGRDSLVNPGTAMASHKDDEEKYFPQSGVLIFGKQDSGKTNVDIEKVMITDEEEIRTTNPVATEQYGSVSTNLQSGNTQAATSDVNTQGVLPGMVWQDRDVYLQGPIWAKIPHTDGHFHPSPLMGGFGPKHPPPQILIKNTPVPANPSTTFSAAKFASFITQYSTGQVSVEIEWELQKENSKRWNPEIQYTSNYNKSVNVDFTMDTNGVYSEPRPIGTRYLTRNL

SEQ ID NO: 2608 - protein, 735 aa, synthetic construct
  REGION 1..735: note = source = /note="Description of Artificial Sequence: Synthetic polypeptide"
MAADGYLPDWLEDTLSEGIRQWWKLKPGPPPPKPAERHKDDSRGLVLPGYKYLGPFNGLDKGEPVNEADAAALEHDKAYDRQLDSGDNPYLKYNHADAEFQERLKEDTSFGGNLARAVFQAKKRVLEPLGLVEEPVKTAPGKKRPVEHSPAELDSSSGTGKSGQQPARKRLNFGQTGDADSVPDPQPLGQPPAAPSGLGTNTMASGSGAPMADNNEGADGVGNSSGNWHCDSTWMGDRVITTSTRTWALPTYNNHLYKQISSQSGASNDNHYFGYSTPWGYFDFNRFHCHFSPRDWQRLINNNWGFRPKRLNFKLFNIQVKEVTQNDGTTTIANNLTSTVQVFTDSEYQLPYVLGSAHQGCLPPFPADVFMVPQYGYLTLNNGSQAVGRSSFYCLEYFPSQMLRTGNNFTFSYTFEDVPFHSSYAHSQSLDRLMNPLIDQYLYYLSRTNTPSGTTTQPRLQFSQAGASDIRDQSRNWLPGPCYRQQRVSKTAADNNNSDYSWTGATKYHLNGRDSLVNPGTAMASHKDDEEKYFPQSGVLIFGKQDSGKTNVDIEKVMITDEEEIRTTNPVATEQYGSVSTNLQSGNTQAATSDVNTQGVLPGMVWQDRDVYLQGPIWAKIPHTDGHFHPSPLMGGFGPKHPPPQILIKNTPVPANPSTTFSAAKFASFITQYSTGQVSVEIEWELQKENSKRWNPEIQYTSNYNKSVNVDFTVDTNGVYSEPRPIGTRYLTRNL

SEQ ID NO: 2609 - protein, 735 aa, synthetic construct
  REGION 1..735: note = source = /note="Description of Artificial Sequence: Synthetic polypeptide"
MAADGYLPDWLEDTLSEGIRQWWKLKPGPPPPKPAERHKDDSRGLVLPGYKYLGPFNGLDKGEPVNEADAAALEHDKAYDRQLDSGDNPYLKYNHADAEFQERLKEDTSFGGNLARAVFQAKKRVLEPLGLVEEPVKTAPGKKRPVEHSPAELDSSSGTGKSGQQPARKRLNFGQTGDADSVPDPQPLGQPPAAPSGLGTNTMASGSGAPMADNNEGADGVGNSSGNWHCDSTWMGDRVITTSTRTWALPTYNNHLYKQISSQSGASNDNHYFGYSTPWGYFDFNRFHCHFSPRDWQRLINNNWGFRPKRLNFKLFNIQVKEVTQNDGTTTIANNLTSTVQVFTDSEYQLPYVLGSAHQGCLPPFPADVFMVPQYGYLTLNNGSQAVGRSSFYCLEYFPSQMLRTGNNFTFSYTFEDVPFHSSYAHSQSLDRLMNPLIDQYLYYLSRTNTPSGTTTQSRLQFSQAGASDIRDQSRNWLPGPCYRQQRVSKTAADNNNSDYSWTGATKHHLNGRDSLVNPGTAMASHKDDEEKYFPQSGVLIFGKQDSGKTNVDIEKVMITDEEEIRTTNPVATEQYGSVSTNLQSGNTQAATSDVNTQGVLPGMVWQDRDVYLQGPIWAKIPHTDGHFHPSPLMGGFGPKHPPPQILIKNTPVPANPSTTFSAAKFASFITQYSTGQVSVEIEWELQKENSKRWNPEIQYTSNYNKSVNVDFTVDTNGVYSEPRPIGTRYLTRNL

SEQ ID NO: 2610 - protein, 735 aa, synthetic construct
  REGION 1..735: note = source = /note="Description of Artificial Sequence: Synthetic polypeptide"
MAADGYLPDWLEDTLSEGIRQWWKLKPGPPPPKPAERHKDDSRGLVLPGYKYLGPFNGLDKGEPVNEADAAALEHDKAYDRQLDSGDNPYLKYNHADAEFQERLKEDTSFGGNLARAVFQAKKRVLEPLGLVEEPVKTAPGKKRPVEHSPAELDSSSGTGKSGQQPARKRLNFGQTGDADSVPDPQPLGQPPAAPSGLGTNTMASGSGAPMADNNEGADGVGNSSGNWHCDSTWMGDRVITTSTRTWALPTYNNHLYKQISSQSGASNDNHYFGYSTPWGYFDLNRFHCHFSPRDWQRLINNNWGFRPKRLNFKLFNIQVKEVTQNDGTTTIANNLTSTVQVFTDSEYQLPYVLGSAHQGCLPPFPADVFMVPQYGYLTLNNGSQAVGRSSFYCLEYFPSQMLRTGNNFTFSYTFEDVPFHSSYAHSQSLDRLMNPLIDQYLYYLSRTNTPSGTTTQSRLQFSQAGASDIRDQSRNWLPGPCYRQQRVSKTAADNNNSDYSWTGATKYHLNGRDSLVNPGTAMASHKDDEEKYFPQSGVLIFGKQDSGKTNVDIEKVMITDEEEIRTTNPVATEQYGSVSTNLQSGNTQAATSDVNTQGVLPGMVWQDRDVYLQGPIWAKIPHTDGHFHPSPLMGGFGPKHPPPQILIKNTPVPANPSTTFSAAKFASFITQYSTGQVSVEIEWELQKENSKRWNPEIQYTSNYNKSVNVDFTVDTNGVYSEPRPIGTRYLTRNL

SEQ ID NO: 2611 - protein, 735 aa, synthetic construct
  REGION 1..735: note = source = /note="Description of Artificial Sequence: Synthetic polypeptide"
MAADGYLPDWLEDTLSEGIRQWWKLKPGPPPPKPAERHKDDSRGLVLPGYKYLGPLNGLDKGEPVNEADAAALEHDKAYDRQLDSGDNPYLKYNHADAEFQERLKEDTSFGGNLARAVFQAKKRVLEPLGLVEEPVKTAPGKKRPVEHSPAELDSSSGTGKSGQQPARKRLNFGQTGDADSVPDPQPLGQPPAAPSGLGTNTMASGSGAPMADNNEGADGVGNSSGNWHCDSTWMGDRVITTSTRTWALPTYNNHLYKQISSQSGASNDNHYFGYSTPWGYFDFNRFHCHFSPRDWQRLINNNWGFRPKRLNFKLFNIQVKEVTQNDGTTTIANNLTSTVQVFTDSEYQLPYVLGSAHQGCLPPFPADVFMVPQYGYLTLNNGSQAVGRSSFYCLEYFPSQMLRTGNNFTFSYTFEDVPFHSSYAHSQSLDRLMNPLIDQYLYYLSRTNTPSGTTTQSRLQFSQAGASDIRDQSRNWLPGPCYRQQRVSKTAADNNNSDYSWTGATKYHLNGRDSLVNPGTAMASHKDDEEKYFPQSGVLIFGKQDSGKTNVDIEKVMITDEEEIRTTNPVATEQYGSVSTNLQSGNTQAATSDVNTQGVLPGMVWQDRDVYLQGPIWAKIPHTDGHFHPSPLMGGFGPKHPPPQILIKNTPVPANPSTTFSAAKFASFITQYSTGQVSVEIEWELQKENSKRWNPEIQYTSNYNKSVNVDFTVDTNGVYSEPRPIGTRYLTRNL

SEQ ID NO: 2612 - protein, 735 aa, synthetic construct
  REGION 1..735: note = source = /note="Description of Artificial Sequence: Synthetic polypeptide"
MAADGYLPDWLEDTLSEGIRQWWKLKPGPPPPKPAERHKDDSRGLVLPGYKYLGPFNGLDKGEPVNEADAAALEHDKAYDRQLDSGDNPYLKYNHADAEFQERLKEDTSFGGNLARAVFQAKKRVLEPLGLVEEPVKTAPGKKRPVEHSPAELDSSSGTGKSGQQPARKRLNFGQTGDADSVPDPQPLGQPPAAPSGLGTNTMASGSGAPMADNNEGADGVGNSSGNWHCDSTWMGDRVITTSTRTWALPTYNNHLYKQISSQSGASNDNHYFGYSTPWGYFDFNRFHCHFSPRDWQRLINNNWGFRPKRLNFKLFNIQVKEVTQNDGTTTIANNLTSTVQVFTDSEYQLPYVLGSAHQGCLPPFPADVFMVPQYGYLTLNNGSQAVGRSSFYCLEYFPSQMLRTGNNFTFSYTFEDVPFHSSYAHSQSLDRLMNPLIDQYLYYLSRTNTPSGTTTQSRLQFSQAGASDIRDQSRNWLPGPCYRQQRVSKTAADNNNSDYSWTGATKYHLNGRDSLVNPGTAMASHKDDEEKYFPQSGVLIFGKQDSGKTNVDIEKVMITDEEEIRTTNPVATEQYGSVSTNLQSGNTQAATSDVNTQGVLPGMVWQDRDVYLQGPIWAKIPHTDGHFHPSPLMGGFGPKHPPPQILIKNTPVPANPSTTFSAAKFASFITQYSTGQVSVEIEWELQKENSKRWNPEIQYTSNYNKSVNVDFTVDTNGVYSEPRPIGTRYLARNL

SEQ ID NO: 2613 - protein, 735 aa, synthetic construct
  REGION 1..735: note = source = /note="Description of Artificial Sequence: Synthetic polypeptide"
MAADGYLPDWLEDTLSEGIRQWWKLKPGPPPPKPAERHKDDSRGLVLPGYKYLGPFNGLDKGEPVNEADAAALEHDKAYDRQLDSGDNPYLKYNHADAEFQERLKEDTSFGGNLARAVFQAKKRVLEPLGLVEEPVKTAPGKKRPVEHSPAELDSSSGTGKSGQQPARKRLNFGQTGDADSVPDPQPLGQPPAAPSGLGTNTMASGSGAPMADNNEGADGVGNSSGNWHCDSTWMGDRVITTSTRTWALPTYNNHLYKQISSQSGASNDNHYFGYSTPWGYFDFNRFHCHFSPRDWQRLINNNWGFRPKRLNFKLFNIQVKEVTQNDGTTTIANNLTSTVQVFTDSEYQLPYVLGSAHQGCLPPFPADVFMVPQYGYLTLNNGSQAVGRSSFYCLEYFPSQMLRTGNNFTLSYTFEDVPFHSSYAHSQSLDRLMNPLIDQYLYYLSRTNTPSGTTTQSRLQFSQAGASDIRDQSRNWLPGPCYRQQRVSKTAADNNNSDYSWTGATKYHLNGRDSLVNPGTAMASHKDDEEKYFPQSGVLIFGKQDSGKTNVDIEKVMITDEEEIRTTNPVATEQYGSVSTNLQSGNTQAATSDVNTQGVLPGMVWQDRDVYLQGPIWAKIPHTDGHFHPSPLMGGFGPKHPPPQILIKNTPVPANPSTTFSAAKFASFITQYSTGQVSVEIEWELQKENSKRWNPEIQYTSNYNKSVNVDFTVDTNGVYSEPRPIGTRYLTRNL

SEQ ID NO: 2614 - protein, 735 aa, synthetic construct
  REGION 1..735: note = source = /note="Description of Artificial Sequence: Synthetic polypeptide"
MAADGYLPDWLEDTLSEGIRQWWKLKPGPPPPKPAERHKDDSRGLVLPGYKYLGPFNGLDKGEPVNEADAAALEHDKAYDRQLDSGDNPYLKYNHADAEFQERLKEDTSFGGNLARAVFQAKKRVLEPLGLVEEPVKTAPGKKRPVEHSPAELDSSSGTGKSGQQPARKRLNFGQTGDADSVPDPQPLGQPPAAPSGLGTNTMASGSGAPMADNNEGADGVGNSSGNWHCDSTWMGDRVITTSTRTWALPTYNNHLYKQISSQSGASNDNHYFGYSTPWGYFDFNRFHCHFSPRDWQRLINNNWGFRPKRLNFKLFNIQVKEVTQNDGTTTIANNLTSTVQVFTDSEYQLPYVLGSAHQGCLPPFPADVFMVPQYGYLTLNNGSQAVGRSSFYCLEYFPSQMLRTGNNFTFSYTFEDVPFHSSYAHSQSLDRLMNPLIDQYLYYLSRTNTPSGTTTQSRLQFSQAGASDIRDQSRNWLPGPCYRQQRVSKTAADNNNSDYSWTGATKYHLNGRDSLVNPGTAMASHKDDEEKYFPQSGVLIFRKQDSGKTNVDIEKVMITDEEEIRTTNPVATEQYGSVSTNLQSGNTQAATSDVNTQGVLPGMVWQDRDVYLQGPIWAKIPHTDGHFHPSPLMGGFGPKHPPPQILIKNTPVPANPSTTFSAAKFASFITQYSTGQVSVEIEWELQKENSKRWNPEIQYTSNYNKSVNVDFTVDTNGVYSEPRPIGTRYLTRNL

SEQ ID NO: 2615 - protein, 735 aa, synthetic construct
  REGION 1..735: note = source = /note="Description of Artificial Sequence: Synthetic polypeptide"
MAADGYLPDWLEDTLSEGIRQWWKLKPGPPPPKPAERHKDDSRGLVLPGYKYLGPFNGLDKGEPVNEADAAALEHDKAYDRQLDSGDNPYLKYNHADAEFQERLKEDTSFGGNLARAVFQAKKRVLEPLGLVEEPVKTAPGKKRPVEHSPAELDSSSGTGKSGQQPARKRLNFGQTGDADSVPDPQPLGQPPAAPSGLGTNTMASGSGAPMADNNEGADGVGNSSGNWHCDSTWMGDRVITTSTRTWALPTYNNHLYKQISSQSGASNDNHYFGYSTPWGYFDFNRFHCHFSPRDWQRLINNNWGFRPKRLNFKLFNIQVKEVTQNDGTTTIANNLTSTVQVFTDSEYQLPYVLGSAHQGCLPPFPADVFMVPQYGYLTLNNGSQAVGRSSFYCLEYFPSQMLRTGNNFTFSYTFEDVPFHSSYAHSQSLDRLMNPLIDQYLYYLSRTNTPSGTTTQSRLQFSQAGASDIRDQSRNWLPGPCYRQQRVSKTAADNNNSDYSWTGATKYHLNGRDSLVNPGTAMASHKDDEEKYFPQSGVLIFGKRDSGKTNVDIEKVMITDEEEIRTTNPVATEQYGSVSTNLQSGNTQAATSDVNTQGVLPGMVWQDRDVYLQGPIWAKIPHTDGHFHPSPLMGGFGPKHPPPQILIKNTPVPANPSTTFSAAKFASFITQYSTGQVSVEIEWELQKENSKRWNPEIQYTSNYNKSVNVDFTVDTNGVYSEPRPIGTRYLTRNL

SEQ ID NO: 2616 - protein, 735 aa, synthetic construct
  REGION 1..735: note = source = /note="Description of Artificial Sequence: Synthetic polypeptide"
MAADGYLPDWLEDTLSEGIRQWWKLKPGPPPPKPAERHKDDSRGLVLPGYKYLGPFNGLDKGEPVNEADAAALEHDKAYDRQLDSGDNPYLKYNHADAEFQERLKEDTSFGGNLARAVFQAKKRVLEPLGLVEEPVKTAPGKKRPVEHSPAELDSSSGTGKSGQQPARKRLNFGQTGDADSVPDPQPLGQPPAAPSGLGTNTMASGSGAPMADNNEGADGVGNSSGNWHCDSTWMGDRAITTSTRTWALPTYNNHLYKQISSQSGASNDNHYFGYSTPWGYFDFNRFHCHFSPRDWQRLINNNWGFRPKRLNFKLFNIQVKEVTQNDGTTTIANNLTSTVQVFTDSEYQLPYVLGSAHQGCLPPFPADVFMVPQYGYLTLNNGSQAVGRSSFYCLEYFPSQMLRTGNNFTFSYTFEDVPFHSSYAHSQSLDRLMNPLIDQYLYYLSRTNTPSGTTTQSRLQFSQAGASDIRDQSRNWLPGPCYRQQRVSKTAADNNNSDYSWTGATKYHLNGRDSLVNPGTAMASHKDDEEKYFPQSGVLIFGKQDSGKTNVDIEKVMITDEEEIRTTNPVATEQYGSVSTNLQSGNTQAATSDVNTQGVLPGMVWQDRDVYLQGPIWAKIPHTDGHFHPSPLMGGFGPKHPPPQILIKNTPVPANPSTTFSAAKFASFITQYSTGQVSVEIEWELQKENSKRWNPEIQYTSNYNKSVNVDFTVDTNGVYSEPRPIGTRYLTRNL

SEQ ID NO: 2617 - protein, 735 aa, synthetic construct
  REGION 1..735: note = source = /note="Description of Artificial Sequence: Synthetic polypeptide"
MAADGYLPDWLEDTLSEGIRQWWKLKPGPPPPKPAERHKDDSRGLVLPGYKYLGPFNGLDKGEPVNEADAAALEHDKAYDRQLDSGDNPYLKYNHADAEFQERLKEDTSFGGNLARAVFQAKKRVLEPLGLVEEPVKTAPGKKRPVEHSPAELDSSSGTGKSGQQPARKRLNFGQTGDADSVPDPQPLGQPPAAPSGLGTNTMASGSGAPMADNNEGADGVGNSSGNWHCDSTWMGDRVITTSTRTWALPTYNNHLYKQISSQSGASNDNHYFGYSTPWGYFDFNRFHCHFSPRDWQRLINNNWGFRPKRLNFKLFNIQVKEVTQNDGTTTIANNLTSTVQVFTDSEYQLPYVLGSAHQGCLPPFPADVFMVPQYGYLTLNNGSQAVGRSSFYCLEYFPSQMLRTGNNFTFSYTFEDVPFHSSYAHSQSLDRLMNPLIDQYLYYLSRTNTPSGTTTQSRLQFSQAGASDIRDQSRNWLPGPCYRQQRVSKTAADNNNSDYSWTGATKYHLNGRDSLVNPGTAMASHKDDEEKYFPQSGVLIFGKQDSGKTNVDIEKVMITDEEEIRTTNPVATEQYGSVSTNLQSGNTQAATSDVNTQGVLPGMVWQDRDVYLQGPIWAKIPHTDGHFHPSPLMGGFGPKHPPPQILIKNTPVPANPSTTFSAAKFAYFITQYSTGQVSVEIEWELQKENSKRWNPEIQYTSNYNKSVNVDFTVDTNGVYSEPRPIGTRYLTRNL

SEQ ID NO: 2618 - protein, 735 aa, synthetic construct
  REGION 1..735: note = source = /note="Description of Artificial Sequence: Synthetic polypeptide"
MAADGYLPDWLEDTLSEGIRQWWKLKPGPPPPKPAERHKDDSRGLVLPGYKYLGPFNGLDKGEPVNEADAAALEHDKAYDRQLDSGDNPYLKYNHADAEFQERLKEDTSFGGNLARAVFQAKKRVLEPLGLVEEPVKTAPGKKRPVEHSPAELDSSSGTGKSGQQPARKRLNFGQTGDADSVPDPQPLGQPPAAPSGLGTNTMASGSGAPMADNNEGADGVGNSSGNWHCDSTWMGDRVITTSTRTWALPTYNNHLYKQISSQSGASNDNHYFGYSTPWGYFGFNRFHCHFSPRDWQRLINNNWGFRPKRLNFKLFNIQVKEVTQNDGTTTIANNLTSTVQVFTDSEYQLPYVLGSAHQGCLPPFPADVFMVPQYGYLTLNNGSQAVGRSSFYCLEYFPSQMLRTGNNFTFSYTFEDVPFHSSYAHSQSLDRLMNPLIDQYLYYLSRTNTPSGTTTQSRLQFSQAGASDIRDQSRNWLPGPCYRQQRVSKTAADNNNSDYSWTGATKYHLNGRDSLVNPGTAMASHKDDEEKYFPQSGVLIFGKQDSGKTNVDIEKVMITDEEEIRTTNPVATEQYGSVSTNLQSGNTQAATSDVNTQGVLPGMVWQDRDVYLQGPIWAKIPHTDGHFHPSPLMGGFGPKHPPPQILIKNTPVPANPSTTFSAAKFAYFITQYSTGQVSVEIEWELQKENSKRWNPEIQYTSNYNKSVNVDFTVDTNGVYSEPRPIGTRYLTRNL

SEQ ID NO: 2619 - protein, 735 aa, synthetic construct
  REGION 1..735: note = source = /note="Description of Artificial Sequence: Synthetic polypeptide"
MAADGYLPDWLEDTLSEGIRQWWKLKPGPPPPKPAERHKDDSRGLVLPGYKYLGPFNGLDKGEPVNEADAAALEHDKAYDRQLDSGDNPYLKYNHADAEFQERLKEDTSFGGNLARAVFQAKKRVLEPLGLVEEPVKTAPGKKRPVEHSPAELDSSSGTGKSGQQPARKRLNFGQTGDADSVPDPQPLGQPPAAPSGLGTNTMASGSGAPMADNNEGADGVGNSSGNWHCDSTWMGDRVITTSTRTWALPTYNNHLYKQISSQSGASNDNRYFGYSTPWGYFDFNRFHCHFSPRDWQRLINNNWGFRPKRLNFKLFNIQVKEVTQNDGTTTIANNLTSTVQVFTDSEYQLPYVLGSAHQGCLPPFPADVFMVPQYGYLTLNNGSQAVGRSSFYCLEYFPSQMLRTGNNFTFSYTFEDVPFHSSYAHSQSLDRLMNPLIDQYLYYLSRTNTPSGTTTQSRLQFSQAGASDIRDQSRNWLPGPCYRQQRVSKTAADNNNSDYSWTGATKYHLNGRDSLVNPGTAMASHKDDEEKYFPQSGVLIFGKQDSGKTNVDIEKVMITDEEEIRTTNPVATEQYGSVSTNLQSGNTQAATSDVNTQGVLPGMVWQDRDVYLQGPIWAKIPHTDGHFHPSPLMGGFGPKHPPPQILIKNTPVPANPSTTFSAAKFASFITQYSTGQVSVEIEWELQKENSKRWNPEIQYTSNYNKSVNVDFTVDTNGVYSEPRPIGTRYLTRNL

SEQ ID NO: 2620 - protein, 735 aa, synthetic construct
  REGION 1..735: note = source = /note="Description of Artificial Sequence: Synthetic polypeptide"
MAADGYLPDWLEDTLSEGIRQWWKLKPGPPPPKPAERHKDDSRGLVLPGYKYLGPFNGLDKGEPVNEADAAALEHDKAYDRQLDSGDNPYLKYNHADAEFQERLKEDTPFGGNLARAVFQAKKRVLEPLGLVEEPVKTAPGKKRPVEHSPAELDSSSGTGKSGQQPARKRLNFGQTGDADSVPDPQPLGQPPAAPSGLGTNTMASGSGAPMADNNEGADGVGNSSGNWHCDSTWMGDRVITTSTRTWALPTYNNHLYKQISSQSGASNDNHYFGYSTPWGYFDFNRFHCHFSPRDWQRLINNNWGFRPKRLNFKLFNIQVKEVTQNDGTTTIANNLTSTVQVFTDSEYQLPYVLGSAHQGCLPPFPADVFMVPQYGYLTLNNGSQAVGRSSFYCLEYFPSQMLRTGNNFTFSYTFEDVPFHSSYAHSRSLDRLMNPLIDQYLYYLSRTNTPSGTTTQSRLQFSQAGASDIRDQSRNWLPGPCYRQQRVSKTAADNNNSDYSWTGATKYHLNGRDSLVNPGTAMASHKDDEEKYFPQSGVLIFGKQDSGKTNVDIEKVMITDEEEIRTTNPVATEQYGSVSTNLQSGNTQAATSDVNTQGVLPGMVWQDRDVYLQGPIWAKIPHTDGHFHPSPLMGGFGPKHPPPQILIKNTPVPANPSTTFSAAKFASFITQYSTGQVSVEIEWELQKENSKRWNPEIQYTSNYNKSVNVDFTVDTNGVYSEPRPIGTRYLTRNL

SEQ ID NO: 2621 - protein, 735 aa, synthetic construct
  REGION 1..735: note = source = /note="Description of Artificial Sequence: Synthetic polypeptide"
MAADGYLPDWLEDTLSEGIRQWWKLKPGPPPPKPAERHKDGSRGLVLPGYKYLGPFNGLDKGEPVNEADAAALEHDKAYDRQLDSGDNPYLKYNHADAEFQERLKEDTSFGGNLARAVFQAKKRVLEPLGLVEEPVKTAPGKKRPVEHSPAELDSSSGTGKSGQQPARKRLNFGQTGDADSVPDPQPLGQPPAAPSGLGTNTMASGSGAPMADNNEGADGVGNSSGNWHCDSTWMGDRVITTSTRTWALPTYNNHLYKQISSQSGASNDNHYFGYSTPWGYFDFNRFHCHFSPRDWQRLINNNWGFRPKRLNFKLFNIQVKEVTQNDGTTTIANNLTSTVQVFTDSEYQLPYVLGSAHQGCLPPFPADVFMVPQYGYLTLNNGSQAVGRSSFYCLEYFPSQMLRTGNNFTFSYTFEDVPFHSSYAHSQSLDRLMNPLIDQYLYYLSRTNTPSGTTTQSRLQFSQAGASDIRDQSRNWLPGPCYRQQRVSKTAADNNNSDYSWTGATKYHLNGRDSLVNPGTAMASHKDDEEKYFPQSGVLIFGKQDSGKTNVDIEKVMITDEEEIRTTNPVATEQYGSVSTNLQSGNTQAATSDVNTQGVLPGMVWQDRDVYLQGPIWAKIPHTDGHFHPSPLMGGFGPKHPPPQILIKNTPVPANPSTTFSAAKFASFITQYSTGQVSVEIEWELQKENSKRWNPEIQYTSNYNKSVNVDFTVDTNGVYSEPRPIGTRYLTRNL

SEQ ID NO: 2622 - protein, 735 aa, synthetic construct
  REGION 1..735: note = source = /note="Description of Artificial Sequence: Synthetic polypeptide"
MAADGYLPDWLEDTLSEGIRQWWKLKPGPPPPKPAERHKDDSRGLVLPGYKYLGPFNGLDKGEPVNEADAAALEHDKAYDRQLDSGDNPYLKYNHADAGFQERLKEDTSFGGNLARAVFQAKKRVLEPLGLVEEPVKTAPGKKRPVEHSPAELDSSSGTGKSGQQPARKRLNFGQTGDADSVPDPQPLGQPPAAPSGLGTNTMASGSGAPMADNNEGADGVGNSSGNWHCDSTWMGDRVITTSTRTWALPTYNNHLYKQISSQSGASNDNHYFGYSTPWGYFDFNRFHCHFSPRDWQRLINNNWGFRPKRLNFKLFNIQVKEVTQNDGTTTIANNLTSTVQVFTDSEYQLPYVLGSAHQGCLPPFPADVFMVPQYGYLTLNNGSQAVGRSSFYCLEYFPSQMLRTGNNFTFSYTFEDVPFHSSYAHSQSLDRLMNPLIDQYLYYLSRTNTPSGTTTQSRLQFSQAGASDIRDQSRNWLPGPCYRQQRVSKTAADNNNSDYSWTGATKYHLNGRDSLVNPGTAMASHKDDEEKYFPQSGVLIFGKQDSGKTNVDIEKVMITDEEEIRTTNPVATEQYGSVSTNLQSGNTQAATSDVNTQGVLPGMVWQDRDVYLQGPIWAKIPHTDGHFHPSPLMGGFGPKHPPPQILIKNTPVPANPSTTFSAAKFASFITQYSTGQVSVEIEWELQKENSKRWNPEIQYTSNYNKSVNVDFTVDTNGVYSEPRPIGTRYLTRNL

SEQ ID NO: 2623 - protein, 735 aa, synthetic construct
  REGION 1..735: note = source = /note="Description of Artificial Sequence: Synthetic polypeptide"
MAADGYLPDWLEDTLSEGIRQWWKLKPGPPPPKPAERHKDDSRGLVLPGYKYLGPFNGLDKGEPVNEADAAALEHDKAYDRQLDSGDNPYLKYNHADAEFQERLKEDTSFGGNLARAVFQAKKRVLEPLGLVEEPVKTAPGKKRPVEHSPAELDSSSGTGKSGQQPARKRLNFGQTGDADSVPDPQPLGQPPAAPSGLGTNTMASGSGAPMADNNEGADGVGNSSGNWHCDSTWMGDRVITTSTRTWALPTYNNHLYKQISSQSGASNDNHYLGYSTPWGYFDFNRFHCHFSPRDWQRLINNNWGFRPKRLNFKLFNIQVKEVTQNDGTTTIANNLTSTVQVFTDSEYQLPYVLGSAHQGCLPPFPADVFMVPQYGYLTLNNGSQAVGRSSFYCLEYFPSQMLRTGNNFTFSYTFEDVPFHSSYAHSQSLDRLMNPLIDQYLYYLSRTNTPSGTTTQSRLQFSQAGASDIRDQSRNWLPGPCYRQQRVSKTAADNNNSDYSWTGATKYHLNGRDSLVNPGTAMASHKDDEEKYFPQSGVLIFGKQDSGKTNVDIEKVMITDEEEIRTTNPVATEQYGSVSTNLQSGNTQAATSDVNTQGVLPGMVWQDRDVYLQGPIWAKIPHTDGHFHPSPLMGGFGPKHPPPQILIKNTPVPANPSTTFSAAKFASFITQYSTGQVSVEIERELQKENSKRWNPEIQYTSNYNKSVNVDFTVDTNGVYSEPRPIGTRYLTRNL

SEQ ID NO: 2624 - protein, 735 aa, synthetic construct
  REGION 1..735: note = source = /note="Description of Artificial Sequence: Synthetic polypeptide"
MAADGYLPDWLEDTLSEGIRQWWKLKPGPPPPKPAERHKDDSRGLVLPGYKYLGPFNGLDKGEPVNEADAAALEHDKAYDRQLDSGDNPYLKYNHADAEFQERLKEDTSFGGNLARAVFQAKKRVLEPLGLVEEPVKTAPGKKRPVEHSPAELDSSSGTGKSGQQPARKRLNFGQTGDADSVPDPQPLGQPPAAPSGLGTNTMASGSGAPMADNNEGADGVGNSSGNWHCDSTWMGDRVITTSTRTWALPTYNNHLYKQISSQSGASNDNHYFGYSTPWGYFDFNRFHCHFSPRDWQRLINNNWGFRPKRLNFKLFNIQVKEVTQNDGTTTIANNLTSTVQVFTDSEYQLPYVLGSAHQGCLPPFPADVFMVPQYGYLTLNNGSQAVGRSSFYCLEYFPSQMLRTGNNFTFSYTFEDVPFHSSYAHSQSLDRLMNPLIDQYLYYLSRTNTPSGTTTQSRLQFSQAGASDIRDQSRNWLPGPCYRQQRVSKTAADNNNSDYSWTGATKYHLNGRDSLVNPGTAMASHKDDEEKYFPQSGVLIFGKQDSGKANVDIEKVMITDEEEIRTTNPVATEQYGSVSTNLQSGNTQAATSDVNTQGVLPGMVWQDRDVYLQGPIWAKIPHTDGHFHPSPLMGGFGPKHPPPQILIKNTPVPANPSTTFSAAKFASFITQYSTGQVSVEIEWELQKENSKRWNPEIQYTSNYNKSVNVDFTVDTNGVYSEPRPIGTRYLTRNL

SEQ ID NO: 2625 - protein, 735 aa, synthetic construct
  REGION 1..735: note = source = /note="Description of Artificial Sequence: Synthetic polypeptide"
MAADGYLPDWLEDTLSEGIRQWWKLKPGPPPPKPAERHKDDSRGLVLPGYKYLGPFNGLDKGEPVNEADAAALEHDKAYDRQLDSGDNPYLKYNHADAEFQERLKEDTSFGGNLARAVFQAKKRVLEPLGLVEEPVKTAPGKKRPVEHSPAELDSSSGTGKSGQQPARKRLNFGQTGDADSVPDPQPLGQPPAAPSGLGTNTMASGSGAPMADNNEGADGVGNSSGNWHCDSTWMGDRVITTSTRTWALPTYNNHLYKQISSQSGASNDNHYFGYSTPWGYFDFNRFHCHFSPRDWQRLTNNNWGFRPKRLNFKLFNIQVKEVTQNDGTTTIANNLTSTVQVFTDSEYQLPYVLGSAHQGCLPPFPADVFMVPQYGYLTLNNGSQAVGRSSFYCLEYFPSQMLRTGNNFTFSYTFEDVPFHSSYAHSQSLDRLMNPLIDQYLYYLSRTNTPSGTTTQSRLQFSQAGASDIRDQSRNWLPGPCYRQQRVSKTAADNNNSDYSWTGATKYHLNGRDSLVNPGTAMASHKDDEEKYFPQSGVLIFGKQDSGKTNVDIEKVMITDEEEIRTTNPVATEQYGSVSTNLQSGNTQAATSDVNTQGVLPGMVWQDRDVYLQGPIWAKIPHTDGHFHPSPLMGGFGPKHPPPQILIKNTPVPANPSTTFSAAKFASFITQYSTGQVSVEIEWELQKENSKRWNPEIQYTSNYNKSVNVDFTVDTNGVYSEPRPIGTRYLTRNL

SEQ ID NO: 2626 - protein, 735 aa, synthetic construct
  REGION 1..735: note = source = /note="Description of Artificial Sequence: Synthetic polypeptide"
MAADGYLPDWLEDTLSEGIRQWWKLKPGPPPPKPAERHKDDSRGLVLPGYKYLGPFNGLDKGEPVNEADAAALEHDKAYDRQLDSGDNPYLKYNHADAEFQERLKEDTSFGGNLARAVFQAKKRVLEPLGLVEEPVKTAPGKKRPVEHSPAELDSSSGTGKSGQQPARKRLNFGQTGDADSVPDPQPLGQPPAAPSGLGTNTMASGSGAPMADNNEGADGVGNSSGNWHCDSTWMGDRVITTSTRTWALPTYNNHLYKQISSQSGASNDNHYFGYSTPWGYFDFNRFHCHFSPRDWQRLINNNWGFRPKRLNFKLFNIQVKEVTQNDGTTTIANNLTSTVRVFTDSEYQLPYVLGSAHQGCLPPFPADVFMVPQYGYLTLNNGSQAVGRSSFYCLEYFPSQMLRTGNNFTFSYTFEDVPFHSSYAHSQSLDRLMNPLIDQYLYYLSRTNTPSGTTTQSRLQFSQAGASDIRDQSRNWLPGPCYRQQRVSKTAADNNNSDYSWTGATKYHLNGRDSLVNPGTAMASHKDDEEKYFPQSGVLIFGKQDSGKTNVDIEKVMITDEEEIRTTNPVATEQYGSVSTNLQSGNTQAATSDVNTQGVLPGMVWQDRDVYLQGPIWAKIPHTDGHFHPSPLMGGFGPKHPPPQILIKNTPVPANPSTTFSAAKFASFITQYSTGQVSVEIEWELQKENSKRWNPEIQYTSNYNKSVNVDFTVDTNGVYSEPRPIGTRYLTRNL

SEQ ID NO: 2627 - protein, 735 aa, synthetic construct
  REGION 1..735: note = source = /note="Description of Artificial Sequence: Synthetic polypeptide"
MAADGYLPDWLEDTLSEGIRQWWKLKPGPPPPKPAERHKDDSRGLVLPGYKYLGPFNGLDKGEPVNEADAAALEHDKAYDRQLDSGDNPYLKYNHADAEFQERLKEDTSFGGNLARAVFQAKKRVLEPLGLVGEPVKTAPGKKRPVEHSPAELDSSSGTGKSGQQPARKRLNFGQTGDADSVPDPQPLGQPPAAPSGLGTNTMASGSGAPMADNNEGADGVGNSSGNWHCDSTWMGDRVITTSTRTWALPTYNNHLYKQISSQSGASNDNHYFGYSTPWGYFDFNRFHCHFSPRDWQRLINNNWGFRPKRLNFKLFNIQVKEVTQNDGTTTIANNLTSTVQVFTDSEYQLPYVLGSAHQGCLPPFPADVFMVPQYGYLTLNNGSQAVGRSSFYCLEYFPSQMLRTGNNFTFSYTFEDVPFHSSYAHSQSLDRLMNPLIDQYLYYLSRTNTPSGTTTQSRLQFSQAGASDIRDQSRNWLPGPCYRQQRVSKTAADNNNSDYSWTGATKYHLNGRDSLVNPGTAMASHKDDEEKYFPQSGVLIFGKQDSGKTNVDIEKVMITDEEEIRTTNPVATEQYGSVSTNLQSGNTQAATSDVNTQGVLPGMVWQDRDVYLQGPIWAKIPHTDGHFHPSPLMGGFGPKHPPPQILIKNTPVPANPSTTFSAAKFASFITQYSTGQVSVEIEWELQKENSKRWNPEIQYTSNYNKSVNVDFTVDTNGVYSEPRPIGTRYLTRNL

SEQ ID NO: 2628 - protein, 735 aa, synthetic construct
  REGION 1..735: note = source = /note="Description of Artificial Sequence: Synthetic polypeptide"
MAADGYLPDWLEDTLSEGIRQWWKLKPGPPPPKPAERHKDDSRGLVLPGYKYLGPFNGLDKGEPVNEADAAALEHDKAYDRQLDSGDNPYLKYNHADAEFQERLKEDTSFGGNLARAVFQAKKRVLEPLGLVEEPVKTAPGKKRPVEHSPAELDSSSGTGKSGQQPARKRLNFGQTGDADSVPGPQPLGQPPAAPSGPGTNTMASGSGAPMADNNEGADGVGNSSGNWHCDSTWMGDRVVTTSTRTWALPTYNNHLYKQISSQSGASNDNHYFGYSTPWGYFDFNRFHCHFSPRDWQRLINNNWGFRPKRLNFKLFNIQVKEVTQNDGTTTIANNLTSTVQVFTDSEYQLPYVLGSAHQGCLPPFPADVFMVPQYGYLTLNNGSQAVGRSSFYCLEYFPSQMLRTGNNFTFSYTFEDVPFHSSYAHSQSLDRLMNPLIDQYLYYLSRTNTPSGTTTQSRLQFSQAGASDIRDQSRNWLPGPCYRQQRVPKTAADNNNSDYSWTGATKYHLNGRDSLVNPGTAMASHKDDEEKYFPQSGVLIFGKQDSGKTNVDIEKVMITDEEEIRTTNPVATEQYGSVSTNLQSGNTQAATSDVNTQGVLPGMVWQDRDVYLQGPIWAKIPHTDGHFHPSPLMGGFGPKHPPPQILIKNTPVPANPSTTFSAAKFASFITQYSTGQVSVEIEWELQKENSKRWNPEIQYTSNYNKSVNVDFTVDTNGVYSEPRPIGTRYLTRNL

SEQ ID NO: 2629 - protein, 735 aa, synthetic construct
  REGION 1..735: note = source = /note="Description of Artificial Sequence: Synthetic polypeptide"
MAADGYLPDWLEDTLSEGIRQWWKLKPGPPPPKPAERHKDDSRGLVLPGYKYLGPFNGLDKGEPVNEADAAALEHDKAYDRQLDSGDNPYLKYNHADAEFQERLKEDTSFGGNLARAVFQAKKRVLEPLGLVEGPVKTAPGKKRPVEHSPAELDSSSGTGKSGQQPARKRLNFGQTGDADSVPDPQPLGQPPAAPSGLGTNTMASGSGAPMADNNEGADGVGNSSGNWHCDSTWMGDRVITTSTRTWALPTYNNHLYKQISSQSGASNDNHYFGYSTPWGYFDFNRFHCHFSPRDWQRLINNNWGFRPKRLNFKLFNIQVKEVTQNDGTTTIANNLTSTVQVFTDSEYQLPYVLGSAHQGCLPPFPADVFMVPQYGYLTLNNGSQAVGRSSFYCLEYFPSQMLRTGNNFTFSYTFEDVPFHSSYAHSQSLDRLMNPLIDQYLYYLSRTNTPSGTTTQSRLQFSQAGASDIRDQSRNWLPGPCYRQQRVSKTAADNNNSDYSWTGATKYHLNGRDSLVNPGTAMASHKDDEEKYFPQSGVLIFGKQDSGKTNVDIEKVMITDEEEIRTTNPVATEQYGSVSTNLQSGNTQAATSDVNTQGVLPGMVWQDRDVYLQGPIWAKIPHTDGHFHPSPLMGGFGPKHPPPQILIKNTPVPANPSTTFSAAKFASFITQYSTGQVSVEIEWELQKENSKRWNPEIQYTSNYNKSVNVDFTVDTNGVYSEPRPIGTRYLTRNL

SEQ ID NO: 2630 - protein, 735 aa, synthetic construct
  REGION 1..735: note = source = /note="Description of Artificial Sequence: Synthetic polypeptide"
MAADGYLPDWLEDTLSEGIRQWWKLKPGPPPPKPAERHKDDSRGLVLPGYKYLGPFNGLDKGEPVNEADAAALEHDKAYDRQLDSGDNPYLKYNHADAEFQERLKEDTSFGGNLARAVFQAKKRVLEPLGLVEEPVKTAPGKKRPVEHSPAELDSSSGTGKSGQQPARKRLNFGQTGDADSVPDPQPLGQPPAAPSGLGTNTMASGSGAPMADNNEGADGVGNSSGNWHCDSTWMGDRVITTSTRTWALPTYNNHLYKQISSQSGASNDNHYLGYSTPWGYFDFNRFHCHFSPRDWQRLINNNWGFRPKRLNFKLFNIQVKEVTQNDGTTTIANNLTSTVQVFTDSEYQLPYVLGSAHQGCLPPFPADVFMVPQYGYLTLNNGSQAVGRSSFYCLEYFPSQMLRTGNNFTFSYTFEDVPFHSSYAHSQSLDRLMNPLIDQYLYYLSRTNTPSGTTTQSRLQFSQAGASDIRDQSRNWLPGPCYRQQRVSKTAADNNNSDYSWTGATKYHLNGRDSLVNPGTAMASHKDDEEKYFPQSGVLIFGKQDSGKTNVDIEKVMITDEEEIRTTNPVATEQYGSVSTNLQSGNTQAATSDVNTQGVLPGMVWQDRDVYLQGPIWAKIPHTDGHFHPSPLMGGFGPKHPPPQILIKNTPVPANPSTTFSAAKFASFITQYSTGQVSVEIEWELQKENSKRWNPEIQYTSNYNKSVNVDFTVDTNGVYSEPRPIGTRYLTRNL

SEQ ID NO: 2631 - protein, 735 aa, synthetic construct
  REGION 1..735: note = source = /note="Description of Artificial Sequence: Synthetic polypeptide"
MAADGYLPDWLEDTLSEGIRQWWKLKPGPPPPKPAERHKDDSRGLVLPGYKYLGPFNGLDKGEPVNEADAAALEHDKAYDRQLDSGDNPYLKYNHADAEFQERLKEDTSFGGNLARAVFQAKKRVLEPLGLVEEPVKTAPGKKGPVEHSPAELDSSSGTGKSGQQPARKRLNFGQTGDADSVPDPQPLGQPPAAPSGLGTNTMASGSGAPMADNNEGADGVGNSSGNWHCDSTWMGDRVITTSTRTWALPTYNNHLYKQISSQSGASNDNHYFGYSTPWGYFDFNRFHCHFSPRDWQRLINNNWGFRPKRLNFKLFNIQVKEVTQNDGTTTIANNLTSTVQVFTDSEYQLPYVLGSAHQGCLPPFPADVFMVPQYGYLTLNNGSQAVGRSSFYCLEYFPSQMLRTGNNFTFSYTFEDVPFHSSYAHSQSLDRLMNPLIDQYLYYLSRTNTPSGTTTQSRLQFSQAGASDIRDQSRNWLPGPCYRQQRVSKTAADNNNSDYSWTGATKYHLNGRDSLVNPGTAMASHKDDEEKYFPQSGVLIFGKQDSGKTNVDIEKVMITDEEEIRTTNPVATEQYGSVSTNLQSGNTQAATSDVNTQGVLPGMVWQDRDVYLQGPIWAKIPHTDGHFHPSPLMGGFGPKHPPPQILIKNTPVPANPSTTFSAAKFASFITQYSTGQVSVEIEWELQKENSKRWNPEIQYTSNYNKSVNVDFTVDTNGVYSEPRPIGTRYLTRNL

SEQ ID NO: 2632 - protein, 735 aa, synthetic construct
  REGION 1..735: note = source = /note="Description of Artificial Sequence: Synthetic polypeptide"
MAADGYLPDWLEDTLSEGIRQWWKLKPGPPPPKPAERHKDDSRGLVLPGYKYLGPFNGLDKGEPVNEADAAALEHDKAYDRQLDSGDNPYLKYNHADAEFQERLKEDTPFGGNLARAVFQAKKRVLEPLGLVEEPVKTAPGKKRPVEHSPAELDSSSGTGKSGQQPARKRLNFGQTGDADSVPDPQPLGQPPAAPSGLGTNTMASGSGAPMADNNEGADGVGNSSGNWHCDSTWMGDRVITTSTRTWALPTYNNHLYKQISSQSGASNDNHYFGYSTPWGYFDFNRFHCHFSPRDWQRLINNNWGFRPKRLNFKLFNIQVKEVTQNDGTTTIANNLTSTVQVFTDSEYQLPYVLGSAHQGCLPPFPADVFMVPQYGYLTLNNGSQAVGRSSFYCLEYFPSQMLRTGNNFTFSYTFEDVPFHSSYAHSQSLDRLMNPLIDQYLYYLSRANTPSGTTTQSRLQFSQAGASDIRDQSRNWLPGPCYRQQRVSKTAADNNNSDYSWTGATKYHLNGRDSLVNPGTAMASHKDDEEKYFPQSGVLIFGKQDSGKTNVDIEKVMITDEEEIRTTNPVATEQYGSVSTNLQSGNTQAATSDVNTQGVLPGMVWQDRDVYLQGPIWAKIPHTDGHFHPSPLMGGFGPKHPPPQILIKNTPVPANPSTTFSAAKFASFITQYSTGQVSVEIEWELQKENSKRWNPEIQYTSNYNKSVNVDFTVDTNGVYSEPRPIGTRYLTRNL

SEQ ID NO: 2633 - protein, 735 aa, synthetic construct
  REGION 1..735: note = source = /note="Description of Artificial Sequence: Synthetic polypeptide"
MAADGYLPDWLEDTLSEGIRQWWKLKPGPPPPKPAERHKDDSRGLVLPGYKYLGPFNGLDKGEPVNEADAAALEHDKAYDRQLDSGDNPYLKYNHADAEFQERLKEDTSFGGNLARAVFQAKKRVLEPLGLVEEPVKTAPGKKRPVEHSPAELDSSSGTGKSGQQPARKRLNFGQTGDADSVPDPQPLGQPPAAPSGLGTNTMASGSGAPMADNNEGADGVGNSSGNWHCDSTWMGDRVITTSTRTWALPTYNNHLYKQISSQSGASNDNHYFGYSAPWGYFDFNRFHCHFSPRDWQRLINNNWGFRPKRLNFKLFNIQVKEVTQNDGTTTIANNLTSTVQVFTDSEYQLPYVLGSAHQGCLPPFPADVFMVPQYGYLTLNNGSQAVGRSSFYCLEYFPSQMLRTGNNFTFSYTFEDVPFHSSYAHSQSLDRLMNPLIDQYLYYLSRTNTPSGTTTQSRLQFSQAGASDIRDQSRNWLPGPCYRQQRVSKTAADNNNSDYSWTGATKYHLNGRDSLVNPGTAMASHKDDEEKYFPQSGVLIFGKQDSGKTNVDIEKVMITDEEEIRTTNPVATEQYGSVSTNLQSGNTQAATSDVNTQGVLPGMVWQDRDVYLQGPIWAKIPHTDGHFHPSPLMGGFGPKHPPPQILIKNTPVPANPSTTFSAAKFASFITQYSTGQVSVEIEWELQKENSKRWNPEIQYTSNYNKSVNVDFTVDTNGVYSEPRPIGTRYLTRNL

SEQ ID NO: 2634 - protein, 735 aa, synthetic construct
  REGION 1..735: note = source = /note="Description of Artificial Sequence: Synthetic polypeptide"
MAADGYLPDWLEDTLSEGIRQWWKLKPGPPPPKPAERHKDDSRGLVLPGYKYLGPFNGLDKGEPVNEADAAALEHDKAYDRQLDSGDNPYLKYNHADAEFQERLKEDTSFGGNLARAVFQAKKRVLEPLGLVEEPVKTAPGKKRPVEHSPAELDSSSGTGKSGQQPARKRLNFGQTGDADSVPDPQPLGQPPAAPSGLGTNTMASGSGAPMADNNEGADGVGNSSGNWHCDSTWMGDRVITTSTRTWALPTYNNHLYKQISSQSGASNDNHYFGYSTPWGYFDFNRFHCHFSPRDWQRLINNNWGFRPKRLNFKLFNIQVKEVTQNDGTTTIANNLTSTVQVFTDSEYQLPYVLGSAHQGCLPPFPADVFMVPQYGYLTLNNGSQAVGRSSFYCLEYFPSQMLRTGNNFTFSYTFEDVPFHSSYAHSQSLDRLMNPLIDQYLYYLSRTNTPSGTTTQSRLQFSQAGASDIRDQSRNWLPGPCYRQQRVSKTAADNNNSDYSWTGATKYHLNGRDSLVNPGTAMASHKDDEEKYFPQSGVLIFGKQDSGKTNVDIEKVMITDEEEIRTTNPVATEQYGSVSTNLQSGNTQAATSDVNTQGVLPGMVWQDRDVYLQGPIWAKIPHTDGHFHPSPLMGGFGPKHPPPQILIKNTPVPANPSTTFSAAKFASLITQYSTGQVSVEIEWELQKENSKRWNPEIQYTSNYNKSVNVDFTVDTNGVYSEPRPIGTRYLTRNL

SEQ ID NO: 2635 - protein, 735 aa, synthetic construct
  REGION 1..735: note = source = /note="Description of Artificial Sequence: Synthetic polypeptide"
MAADGYLPDWLEDTLSEGIRQWWKLKPGPPPPKPAERHKDDSRGLVLPGYKYLGPFNGLDKGEPVNEADAAALEHDKAYDRQLDSGDNPYLKYNHADAEFQERLKEDTSFGGNLARAVFQAKKRVLEPLGLVEEPVKTAPGKKRPVEHSPAELDSSSGTGKSGQQPARKGLNFGQTGDADSVPDPQPLGQPPAAPSGLGTNTMASGSGAPMADNNEGADGVGNSSGNWHCDSTWMGDRVITTSTRTWALPTYNNHLYKQISSQSGASNDNHYFGYSTPWGYFDFNRFHCHFSPRDWQRLINNNWGFRPKRLNFKLFNIQVKEVTQNDGTTTIANNLTSTVQVFTDSEYQLPYVLGSAHQGCLPPFPADVFMVPQYGYLTLNNGSQAVGRSSFYCLEYFPSQMLRTGNNFTFSYTFEDVPFHSSYAHSQSLDRLMNPLIDQYLYYLSRTNTPSGTTTQSRLQFSQAGASDIRDQSRNWLPGPCYRQQRVSKTAADNNNSDYSWTGATKYHLNGRDSLVNPGTAMASHKDDEEKYFPQSGVLIFGKQDSGKTNVDIEKVMITDEEEIRTTNPVATEQYGSVSTNLQSGNTQAATSDVNTQGVLPGMVWQDRDVYLQGPIWAKIPHTDGHFHPSPLMGGFGPKHPPPQILIKNTPVPANPSTTFSAAKFASFITQYSTGQVSVEIEWELQKENSKRWNPEIQYTSNYNKSVNVDFTVDTNGVYSEPRPIGTRYLTRNL

SEQ ID NO: 2636 - protein, 735 aa, synthetic construct
  REGION 1..735: note = source = /note="Description of Artificial Sequence: Synthetic polypeptide"
MAADGYLPDWLEDTLSEGIRQWWKLKPGPPPPKPAERHKDDSRGLVLPGYKYLGPFNGLDKGEPVNEADAAALEHDEAYDRQLDSGDNPYLKYNHADAEFQERLKEDTSFGGNLARAVFQAKKRVLEPLGLVEEPVKTAPGKKRPVEHSPAELDSSSGTGKSGQQPARKRLNFGQTGDADSVPDPQPLGQPPAAPSGLGTNTMASGSGAPMADNNEGADGVGNSSGNWHCDSTWMGDRVITTSTRTWALPTYNNHLYKQISSQSGASNDNHYFGYSTPWGYFDFNRFHCHFSPRDWQRLINNNWGFRPKRLNFKLFNIQVKEVTQNDGTTTIVNNLTSTVQVFTDSEYQLPYVLGSAHQGCLPPFPADVFMVPQYGYLTLNNGSQAVGRSSFYCLEYFPSQMLRTGNNFTFSYTFEDVPFHSSYAHSQSLDRLMNPLIDQYLYYLSRTNTPSGTTTQSRLQFSQAGASDIRDQSRNWLPGPCYRQQRVSKTAADNNNSDYSWTGATKYHLNGRDSLVNPGTAMASHKDDEEKYFPQSGVLIFGKQDSGKTNVDIEKVMITDEEEIRTTNPVATEQYGSVSTNLQSGNTQAATSDVNTQGVLPGMVWQDRDVYLQGPIWAKIPHTDGHFHPSPLMGGFGPKHPPPQILIKNTPVPANPSTTFSAAKFAYFITQYSTGQVSVEIEWELQKENSKRWNPEIQYTSNYNKSVNVDFTVDTNGVYSEPRPIGTRYLTRNL

SEQ ID NO: 2637 - protein, 735 aa, synthetic construct
  REGION 1..735: note = source = /note="Description of Artificial Sequence: Synthetic polypeptide"
MAADGYLPDWLEDTLSEGIRQWWKLKPGPPPPKPAERHKDDSRGLVLPGYKYLGPFNGLDKGEPVNEADAAALEHDKAYDRQLDSGDNPYLKYNHADAEFQERLKEDTSFGGNLARAVFQAKKRVLEPLGLVEEPVKTAPGKKRPVEHSPAELDSSSGTGKSGQQPARKRLNFGQTGDADSVPDPQPLGQPPAAPSGLGTNTMASGSGAPMADNNEGADGVGNSSGNWHCDSTWMGDRVITTSTRTWALPTYNNHLYKQISSQSGASNDNHYFGYSTPWGYFDFNRFHCHFSPRDWQRLINNNWGFRPKRLNFKLFNIQVKEVTQNDGTTTIANNLTSTVQVFTDSEYQLPYVLGSAHQGCLPPFPADVFMVPQYGYLTLNNGSQAVGRSSFYCLEYFPSQMLRTGNNFTFSYTFEDVPFHSSYAHSQSLDRLMNPLIDQYLYYLSRTNTPSGTTTQSRLQFSQAGASGIRDQSRNWLPGPCYRQQRVSKTAADNNNSDYSWTGATKYHLNGRDSLVNPGTAMASHKDDEEKYFPQSGVLIFGKQDSGKTNVDIEKVMITDEEEIRTTNPVATEQYGSVSTNLQSGNTQAATSDVNTQGVLPGMVWQDRDVYLQGPIWAKIPHTDGHFHPSPLMGGFGPKHPPPQILIKNTPVPANPSTTFSAAKFASFITQYSTGQVSVEIEWELQKENSKRWNPEIQYTSNYNKSVNVDFTVDTNGVYSEPRPIGTRYLTRNL

SEQ ID NO: 2638 - protein, 735 aa, synthetic construct
  REGION 1..735: note = source = /note="Description of Artificial Sequence: Synthetic polypeptide"
MAADGYLPDWLEDTLSEGIRQWWKLKPGPPPPKPAERHKDDSRGLVLPGYKYLGPFNGLDKGEPVNEADAAALEHDKAYDRQLDSGDNPYLKYNHADAEFQERLKEDTSFGGNLARAVFQAKKRVLEPLGLVEEPVKTAPGKKRPVEHSPAELDSSSGTGKSGQQPARKRLNFGQTGDADSVPDPQPLGQPPAAPSGLGTNTMASGSGAPMADNNEGADGVGNSSGNWHCDSTWMGDRVITTSTRTWALPTYNNHLYKQISSQSGASNDNHYFGYSTPWGYFDFNRFHCHFSPRDWQRLINNNWGFRPKRLNFKLFNIQVKEVTQNDGTTTIANNLTSTVQVFTDSEYQLPYVLGSAHQGCLPPFPADVFMVPQYGYLTLNNGSQAVGRSSFYCLEYFPSQMLRTGNNFTFSYTFEDVPFHSSYAHSQSLDRLMNPLIDQYLYYLSRTNTPSGTTTQSRLQFSQAGASDIRDQSRNWLPGPCYRQQRVSKTAADNNNSDYSWTGATKYHLNGRDSLVNPGTAMASHKDDEEKYFPQSGVLIFGKQDSGKTNVDIEKVVITDEEEIRTTNPVATEQYGSVSTNLQSGNTQAATSDVNTQGVLPGMVWQDRDVYLQGPIWAKIPHTDGHFHPSPLMGGFGPKHPPPQILIKNTPVPANPSTTFSAAKFASFITQYSTGQVSVEIEWELQKENSKRWNPEIQYTSNYNKSVNVDFTVDTNGVYSEPRPIGTRYLTRNL

SEQ ID NO: 2639 - protein, 735 aa, synthetic construct
  REGION 1..735: note = source = /note="Description of Artificial Sequence: Synthetic polypeptide"
MAADGYLPDWLEDTLSEGIRQWWKLKPGPPPPKPAERHKDDSRGLVLPGYKYLGPFNGLDKGEPVNEADAAALEHDKAYDRQLDSGDNPYLKYNHADAEFQERLKEDTSFGGNLARAVFQAKKRVLEPLGLVEEPVKTAPGKKRPVEHSPAELDSSSGTGKSGQQPARKRLNFGQTGDADSVPDPQPLGQPPAAPSGLGTNTMASGSGAPMADNNEGADGVGNSSGNWHCDSTWMGDRVITTSTRTWALPTYNNHLYKQISSQSGASNDNHYFGYSTPWGYFDFNRFHCHFSPRDWQRLINNNWGFRPKRLNFKLFNIQVKEVTQNDGTTTIANNLTSTVQVFTDSEYQLPYVLGSAHQGCLPPFPADVFMVPQYGYLTLNNGSQAVGRSSFYCLEYFPSQMLRTGNNFTFSYTFEDVPFHSSYAHSQSLDRLMNPLIDQYLYYLSRTNTPSGTTTQSRLQFSQAGASDIRDQSRNWLPGPCYRQQRVSKTAADNNNSDYSWTGATKYHLNGRDSLVNPGTAMASHKDDEEKYFPQSGVLIFGKQDSGKTNVDIEKVMITDEEEIRTTNPVATEQYGSVSTNLQSGDTQAATSDVNTQGVLPGMVWQDRDVYLQGPIWAKIPHTDGHFHPSPLMGGFGPKHPPPQILIKNTPVPANPSTTFSAAKFASFITQYSTGQVSVEIEWELQKENSKRWNPEIQYTSNYNKSVNVDFTVDTNGVYSEPRPIGTRYLTRNL

SEQ ID NO: 2640 - protein, 735 aa, synthetic construct
  REGION 1..735: note = source = /note="Description of Artificial Sequence: Synthetic polypeptide"
MAADGYLPDWLEDTLSEGIRQWWKLKPGPPPPKPAERHKDDSRGLVLPGYKYLGPFNGLDKGEPVNEADAAALEHDKAYDRQLDSGDNPYLKYNHADAEFQERLKEDTSFGGNLARAVFQAKKRVLEPLGLVEEPVKTAPGKKRPVEHSPAELDSSSGTGKSGQQPARKRLNFGQTGDADSVPDPQPLGQPPAAPSGLGTNTMASGSGAPMADNNEGADGVGNSSGNWHCDSTWMGDRVITTSTRTWALPTYNNHLYKQISSQSGASNDNHYFGYSTPWGYFDFNRFHCHFSPRDWQRLINNNWGFRPKRLNFRLFNIQVKEVTQNDGTTTIANNLTSTVQVFTDSEYQLPYVLGSAHQGCLPPFPADVFMVPQYGYLTLNNGSQAVGRSSFYCLEYFPSQMLRTGNNFTFSYTFEDVPFHSSYAHSQSLDRLMNPLIDQYLYYLSRTNTPSGTTTQSRLQFSQAGASDIRDQSRNWLPGPCYRQQRVSKTAADNNNSDYSWTGATKYHLNGRDSLVNPGTAMASHKDDEEKYFPQSGVLIFGKQDSGKTNVDIEKVMITDEEEIRTTNPVATEQYGSVSTNLQSGNTQAATSDVNTQGVLPGMVWQDRDVYLQGPIWAKIPHTDGHFHPSPLMGGFGPKHPPPQILIKNTPVPANPSTTFSAAKFASFITQYSTGQVSVEIEWELQKENSKRWNPEIQYTSNYNKSVNVDFTVDTNGVYSEPRPIGTRYLTRNL

SEQ ID NO: 2641 - protein, 735 aa, synthetic construct
  REGION 1..735: note = source = /note="Description of Artificial Sequence: Synthetic polypeptide"
MAADGYLPDWLEDTLSEGIRQWWKLKPGPPPPKPAERHKDDSRGLVLPGYKYLGPFNGLDKGEPVNEADAAALEHGKAYDRQLDSGDNPYLKYNHADAEFQERLKEDTSFGGNLARAVFQAKKRVLEPLGLVEEPVKTAPGKKRPVEHSPAELDSSSGTGKSGQQPARKRLNFGQTGDADSVPDPQPLGQPPAAPSGLGTNTMASGSGAPMADNNEGADGVGNSSGNWHCDSTWMGDRVITTSTRTWALPTYNNHLYKQISSQSGASNDNHYFGYSTPWGYFDFNRFHCHFSPRDWQRLINNNWGFRPKRLNFKLFNIQVKEVTQNDGTTTIANNLTSTVQVFTDSEYQLPYVLGSAHQGCLPPFPADVFMVPQYGYLTLNNGSQAVGRSSFYCLEYFPSQMLRTGNNFTFSYTFEDVPFHSSYAHSQSLDRLMNPLIDQYLYYLSRTNTPSGTTTQSRLQFSQAGASDIRDQSRNWLPGPCYRQQRVSKTAADNNNSDYSWTGATKYHLNGRDSLVNPGTAMASHKDDEEKYFPQSGVLIFGKQDSGKTNVDIEKVMITDEEEIRTTNPVATEQYGSVSTNLQSGNTQAATSDVNTQGVLPGMVWQDRDVYLQGPIWAKIPHTDGHFHPSPLMGGFGPKHPPPQILIKNTPVPANPSTTFSAAKFASFITQYSTGQVSVEIEWELQKENSKRWNPEIQYTSNYNKSVNVDFTVDTNGVYSEPRPIGTRYLTRNL

SEQ ID NO: 2642 - protein, 735 aa, synthetic construct
  REGION 1..735: note = source = /note="Description of Artificial Sequence: Synthetic polypeptide"
MAADGYLPDWLEDTLSEGIRQWWKLKPGPPPPKPAERHKDDSRGLVLPGYKYLGPFNGLDKGEPVNEADAAALEHDKAYDRQLDSGDNPYLKYNHADAEFQERLKEDTSFGGNLARAVFQAKKRVLEPLGLVEEPVKTAPGKKRPVEHSPAELDSSSGTGKSGQQPARKRLNFGQTGDADSVPDPQPLGQPPAAPSGPGTNTMASGSGAPMADNNEGADGVGNSSGNWHCDSTWMGDRVITTSTRTWALPTYNNHLYKQISSQSGASNDNHYFGYSTPWGYFDFNRFHCHFSPRDWQRLINNNWGFRPKRLNFKLFNIQVKEVTQNDGTTTIANNLTSTVQVFTDSEYQLPYVLGSAHQGCLPPFPADVFMVPQYGYLTLNNGSQAVGRSSFYCLEYFPSQMLRTGNNFTFSYTFEDVPFHSSYAHSQSLDRLMNPLIDQYLYYLSRTNTPSGTTTQSRLQFSQAGASDIRDQSRNWLPGPCYRQQRVSKTAADNNNSDYSWTGATKYHLNGRDSLVNPGTAMASHKDDEEKYFPQSGVLIFGKQDSGKTNVDIEKVMITDEEEIRTTNPVATEQYGSVSTNLQSGNTQAATSDVNTQGVLPGMVWQDRDVYLQGPIWAKIPHTDGHFHPSPLMGGFGPKHPPPQILIKNTPVPANPSTTFSAAKFASFITQYSTGQVSVEIEWELQKENSKRWNPEIQYTSNYNKSVNVDFTVDTNGVYSEPRPIGTRYLTRNL

SEQ ID NO: 2643 - protein, 735 aa, synthetic construct
  REGION 1..735: note = source = /note="Description of Artificial Sequence: Synthetic polypeptide"
MAADGYLPDWLEDTLSEGIRQWWKLKPGPPPPKPAERHKDDSRGLVLPGYKYLGPFNGLDKGEPVNEADAAALEHDKAYDRQLDSGDNPYLKYNHADAEFQERLKEDTSFGGNLARAVFQAKKRVLEPLGLVEEPVKTAPGKKRPVEHSPAGPDSSSGTGKSGQQPARKRLNFGQTGDADSVPDPQPLGQPPAAPSGLGTNTMASGSGAPMADNNEGADGVGNSSGNWHCDSTWMGDRVITTSTRTWALPTYNNHLYKQISSQSGASNDNHYFGYSTPWGYFDFNRFHCHFSPRDWQRLINNNWGFRPKRLNFELFNIQVKEVTQNDGTTTIANNLTSTVQVFTDSEYQLPYVLGSAHQGCLPPFPADVFMVPQYGYLTLNNGSQAVGRSSFYCLEYFPSQMLRTGNNFTFSYTFEDVPFHSSYAHSQSLDRLMNPLIDQYLYYLSRTNTPSGTTTQSRLQFSQAGASDIRDQSRNWLPGPCYRQQRVSKTAADNNNSDYSWTGATKYHLNGRDSLVNPGTAMASHKDDEEKYFPQSGVLIFGKQDSEKTNVDIEKVMITDEEEIRTTNPVATEQYGSVSTNLQSGNTQAATSDVNTQGVLPGMVWQDRDVYLQGPIWAKIPHTDGHFHPSPLMGGFGLKHPPPQILIKSTPVPANPSTTFSAAKFASFITQYSTGQVSVEIEWELQKENSKRWNPEIQYTSNYNKSVNVDFTVDTNGVYSEPRPIGTRYLTRNL

SEQ ID NO: 2644 - protein, 735 aa, synthetic construct
  REGION 1..735: note = source = /note="Description of Artificial Sequence: Synthetic polypeptide"
MAADGYLPDWLEDTLSEGIRQWWKLKPGPPPPKPAERHKDDSRGLVLPGYKYLGPFNGLDKGEPVNEADAAALEHDKAYDRQLDSGDNPYLKYNHADAEFQERLKEDTSFGGNLARAVFQAKKRVLEPLGLVEEPVKTAPGKKRPVEHSPAGPDSSSGTGKSGQQPARKRLNFGQTGDADSVPDPQPLGQPPAAPSGLGTNTMASGSGAPMADNNEGADGVGNSSGNWHCDSTWMGDRVITTSTRTWALPTYNNHLYKQISSQSGASNDNHYFGYSTPWGYFDFNRFHCHFSPRDWQRLINNNWGFRPKRLNFELFNIQVKEVTQNDGTTTIANNLTSTVQVFTDSEYQLPYVLGSAHQGCLPPFPADVFMVPQYGYLTLNNGSQAVGRSSFYCLEYFPSQMLRTGNNFTFSYTFEDVPFHSSYAHSQSLDRLMNPLIDQYLYYLSRTNTPSGTTTQSRLQFSQAGASDIRDQSRNWLPGPCYRQQRVSKTAADNNNSDYSWTGATKYHLNGRDSLVNPGTAMASHKDDEEKYFPQSGVLIFGKQDSGKTNVDIEKVMITDEEEIRTTNPVATEQYGSVSTNLQSGNTQAATSDVNTQGVLPGMVWQDRDVYLQGPIWAKIPHTDGHFHPSPLMGGFGLKHPPPQILIKSTPVPANPSTTLSAAKFASFITQYSTGQVSVEIEWELQKENSKRWNPEIQYTSNYNKSVNVDFTVDTNGVYSEPRPIGTRYLTRNL

SEQ ID NO: 2645 - protein, 734 aa, synthetic construct
  REGION 1..734: note = source = /note="Description of Artificial Sequence: Synthetic polypeptide"
MAADGYLPDWLEDTLSEGIRQWWKLKPGPPPPKPAERHKDDSRGLVLPGYKYLGPFNGLDKGEPVNEADAAALEHDKAYDRQLDSGDNPYLKYNHADAEFQERLKEDTSFGGNLARAVFQAKKRVLEPLGLVEEPVKTAPGKKRPVEHSPAGPDSSSGTGKSGQQPARKRLNFGQTGDADSVPDPQPLGQPPAAPSGLGTNTMASGSGAPMADNNEGADGVGNSSGNWHCDSTWMGDRVITTSTRTWALPTYNNHLYKQISSQSGASNDNHYFGYSTPWGYFDFNRFHCHFSPRDWQRLINNNWGFRPKRLNFELFNIQVKEVTQNDGTTTIANNLTSTVQVFTDSEYQLPYVLGSAHQGCLPPFPADVFMVPQYGYLTLNNGSQAVGRSSFYCLEYFPSQMLRTGNNFTFSYTFEDVPFHSSYAHSQSLDRLMNPLIDQYLYYLSRTNTPSGTTTQSRLQFSQAGASDIRDQSRNWLPGPCYRQQRVSKTAADNNSDYSWTGATKYHLNGRDSLVNPGTAMASHKDDEEKYFPQSGVLIFGKQDSGKTNVDIEKVMITDEEEIRTTNPVATEQYGSVSTNLQSGNTQAATSDVNTQGVLPGMVWQDRDVYLQGPIWAKIPHTDGHFHPSPLMGGFGLKHPPPQILIKSTPVPANPSTTFSAAKFASFITQYSTGQVSVEIEWELQKENSKRWNPEIQYTSNYNKSVNVDFTVDTNGVYSEPRPIGTRYLTRNL

SEQ ID NO: 2646 - protein, 735 aa, synthetic construct
  REGION 1..735: note = source = /note="Description of Artificial Sequence: Synthetic polypeptide"
MAADGYLPDWLEDTLSEGIRQWWKLKPGPPPPKPAERHKDDSRGLVLPGYKYLGPFNGLDKGEPVNEADAAALEHDKAYDRQLDSGDNPYLKYNHADAEFQERLKEDTSFGGNLGRTVFQAKKRVLEPLGLVEEPVKTAPGKKRPVEHSPVEPDSSSGTGKAGQQPARKRLNFGQTGDADSVPDPQPLGQPPAAPSGLGTNTMATGSGAPMADNNEGADGVGNSSGNWHCDSTWMGDRVITTSTRTWALPTYNNHLYKQISSQSGASNDNHYFGYSTPWGYFDFNRFHCHFSPRDWQRLINNNWGFRPKRLSFKLFNIQVKEVTQNDGTTTIANNLTSTVQVFTDSEYQLPYVLGSAHQGCLPPFPADVFMVPQYGYLTLNNGSQAVGRSSFYCLEYFPSQMLRTGNNFTFSYTFEDVPFHSSYAHSQSLDRLMNPLIDQYLYYLSKTNAPSGTTTMSRLQFSQAGASDIRDQSRNWLPGPCYRQQRVSKTAADNNNSDYSWTGATKYHLNGRDSLVNPGPAMASHKDDEEKYFPQSGVLIFGKQGSNKTNVDIEKVMITDEEEIRTTNPVATEQYGSVSTNLQSGNTQAATSDVNTQGVLPGMVWQDRDVYLQGPIWAKIPHTDGHFHPSPLMGGFGLKHPPPQILIKNTPVPANPSTTFSAAKFASFITQYSTGQVSVEIEWELQKENSKRWNPEIQYTSNYNKSVNVDFTVDTNGVYSEPRPIGTRYLTRNL

SEQ ID NO: 2647 - protein, 735 aa, synthetic construct
  REGION 1..735: note = source = /note="Description of Artificial Sequence: Synthetic polypeptide"
MAADGYLPDWLEDTLSEGIRQWWKLKPGPPPPKPAERHKDDSRGLVLPGYKYLGPFNGLDKGEPVNEADAAALEHDKAYDRQLDSGDNPYLKYNHADAEFQERLKEDTSFGGNLGRAVFQAKKRVLEPLGLVEEPVKTAPGKKRPVEHSPVEPDSSSGTGKAGQQPARKRLNFGQTGDADSVPDPQPLGQPPAAPSGLGTNTMATGSGAPMADNNEGADGVGNSSGNWHCDSTWMGDRVITTSTRTWALPTYNNHLYKQISSQSGASNDNHYFGYSTPWGYFDFNRFHCHFSPRDWQRLINNNWGFRPKRLSFKLFNIQVKEVTQNDGTTTIANNLTSTVQVFTDSEYQLPYVLGSAHQGCLPPFPADVFMVPQYGYLTLNNGSQAVGRSSFYCLEYFPSQMLRTGNNFTFSYTFEDVPFHSSYAHSQSLDRLMNPLIDQYLYYLSKTNAPSGTTTMSRLQFSQAGASDIRDQSRNWLPGPCYRQQRVSKTAADNNNSDYSWTGATKYHLNGRDSLVNPGPAMANHKDDEEKYFPQSGVLIFGKQGSNKTNVDIEKVMITDEEEIRTTNPVATEQYGSVSTNLQSGNTQAATSDVNTQGVLPGMVWQDRDVYLQGPIWAKIPHTDGHFHPSPLMGGFGLKHPPPQILIKNTPVPANPSTTFSAAKFASFITQYSTGQVSVEIEWELQKENSKRWNPEIQYTSNYNKSVNVDFTVDTNGVYSEPRPIGTRYLTRNL

SEQ ID NO: 2648 - protein, 735 aa, synthetic construct
  REGION 1..735: note = source = /note="Description of Artificial Sequence: Synthetic polypeptide"
MAADGYLPDWLEDTLSEGIRQWWKLKPGPPPPKPAERHKDDSRGLVLPGYKYLGPFNGLDKGEPVNEADAAALEHDKAYDRQLDSGDNPYLKYNHADAEFQERLKEDTSFGGNLGRAVFQAKKRVLEPLGLVEEPVKTAPGKKRPVEHSPVEPDSSSGTGKAGQQPARKRLNFGQTGDADSVPDPQPLGQPPAAPSGLGTNTMATGSGAPMADNNEGADGVGNSSGNWHCDSTWMGDRVITTSTRTWALPTYNNHLYKQISSQSGASNDNHYFGYSTPWGYFDFNRFHCHFSPRDWQRLINNNWGFRPKRLSFKLFNIQVKEVTQNDGTTTIANNLTSTVQVFTDSEYQLPYVLGSAHQGCLPPFPADVFMVPQYGYLTLNNGSQAVGRSSFYCLEYFPSQMLRTGNNFTFSYTFEDVPFHSSYAHSQSLDRLMNPLIDQYLYYLSKTNAPSGTTTMSRLQFSQAGASDIRDQSRNWLPGPCYRQQRVSKTAADNNNSDYSWTGATKYHLNGRDSLVNPGPAMASHKDDEEKYFPQSGVLIFGKQGSNKTNVDIEKVMITDEEEIRTTNPVATEQYGSVSTNLQSGNTQAATSDVNTQGVLPGMVWQDRDVYLQGPIWAKIPHTDGHFHPSPLMGGFGLKHPPPQILIKNTPVPANPSTTFSAAKFASFITQYSTGQVSVEIEWELQKENSKRWNPEIQYTSNYNKSVNVDFTVDTNGVYSEPRPIGTRYPTRNL

SEQ ID NO: 2649 - protein, 735 aa, synthetic construct
  REGION 1..735: note = source = /note="Description of Artificial Sequence: Synthetic polypeptide"
MAADGYLPDWLEDTLSEGIRQWWKLKPGPPPPKPAERHKDDSRGLVLPGYKYLGPFNGLDKGEPVNEADAAALEHDKAYDRQLDSGDNPYLKYNHADAEFQERLKEDTSFGGNLGRAVFQAKKRVLEPLGLVEEPVKTAPGKKRPVEHSPVEPDSSSGTGKAGQQPARKRLNFGQTGDADSVPDPQPLGQPPAAPSGLGTNTMATGSGAPMADNNEGADGVGNSSGNWHCDSTWMGDRVITTSTRTWALPTYNNHLYKQISSQSGASNDNHYFGYSTPWGYFDFNRFHCHFSPRDWQRLINNNWGFRPKRLSFKLFNIQVKEVTQNDGTTTIANNLTSTVQVFTDSEYQLPYVLGSAHQGCLPPFPADVFMVPQYGYLTLNNGSQAVGRSSFYCLEYFPSQMLRTGNNFTFSYTFEDVPFHSSYAHSQSLDRLMNPLIDQYLYYLSKTNAPSGTTTMSRLQFSQAGASDIRDQSRNWLPGPCYRQQRVSKTAADNNNSDYSWTGATKYHLNGRDSLVNPGPAMASHKDDEEKYFPQSGVLIFGKQGSNKTNVDIEKVMITDEEEIRTTNPVATEQYGSVSTNLQSGNTQAATSDVNTQGVLPGMVWQDRDVYLQGPIWAKIPHTDGHFHPSPLMGGFGLKHPPPQILIKNTPVPANPSTTFSAAKFASFITQYSTGQVSVEIEWELQKENSKRWNPEIQYTSNYNKSVNVDFTVGTNGVYSEPRPIGTRYLTRNL

SEQ ID NO: 2650 - protein, 735 aa, synthetic construct
  REGION 1..735: note = source = /note="Description of Artificial Sequence: Synthetic polypeptide"
MAADGYLPDWLEDTLSEGIRQWWKLKPGPPPPKPAERHKDDSRGLVLPGYKYLGPFNGLDKGEPVNEADAAALEHDKAYDRQLDSGDNPYLKYNHADAEFQERLKEDTSFGGNLGRAVFQAKKRVLEPLGLVEEPVKTAPGKKRPVEHSPVEPDSSSGTGKAGQQPARKRLNFGQTGDADSVPDPQPLGQPPAAPSGLGTNTMATGSGAPMADNNEGADGVGNSSGNWHCDSTWMGDRVITTSTRTWALPTYNNHLYKQISSQSGASNDNHYFGYSTPWGYFDFNRFHCHFSPRDWQRLINNNWGFRPKRLSFKLFNIQVKEVTQNDGTTTIANNLTSTVQVFTDSEYQLPYVLGSAHQGCLPPFPADVFMVPQYGYLTLNNGSQAVGRSSFYCLEYFPSQMLRTGNNFTFSYTFEDVPFHSSYAHSQSLDRLMNPLIDQYLYYLSKTNAPSGTTTMSRLQFSQAGASDIRDQSRNWLPGPCYRQQRVSKTAADNNNSDYSWTGATKYHLNGRDSLVNPGPAMASHKDDEEKYFPQSGVLIFGKQGSNKTNVDIEKVMITDEEEIRTTNPVATEQYGSVSTNLQSGNTQAATSDVNTQGVLPGMVWQDRDVYLQGPIWAKIPHTDGHFHPSPLMGGFGLKYPPPQILIKNTPVPANPSTTFSAAKFASFITQYSTGQVSVEIEWELQKENSKRWNPEIQYTSNYNKSVNVDFTVDTNGVYSEPRPIGTRYLTRNL

SEQ ID NO: 2651 - protein, 735 aa, synthetic construct
  REGION 1..735: note = source = /note="Description of Artificial Sequence: Synthetic polypeptide"
MAADGYLPDWLEDTLSEGIRQWWKLKPGPPPPKPAERHKDDSRGLVLPGYKYLGPFNGLDKGEPVNEADAAALEHDKAYDRQLDSGDNPYLKYNHADAEFQERLKEDTSFGGNLGRAVFQAKKRVLEPLGLVEEPVKTAPGKKRPVEHSPVEPDSSSGTGKAGQQPARKRLNFGQTGDADSVPDPQPLGQPPAAPSGLGTNTMATGSGAPMADNNEGADGVGNSSGNWHCDSTWMGDRVITTSTRTWALPTYNNHLYKQISGQSGASNDNHYFGYSTPWGYFDFNRFHCHFSPRDWQRLINNNWGFRPKRLSFKLFNIQVKEVTQNDGTTTIANNLTSTVQVFTDSEYQLPYVLGSAHQGCLPPFPADVFMVPQYGYLTLNNGSQAVGRSSFYCLEYFPSQMLRTGNNFTFSYTFEDVPFHSSYAHSQSLDRLMNPLIDQYLYYLSKTNAPSGTTTMSRLQFSQAGASDIRDQSRNWLPGPCYRQQRVSKTAADNNNSDYSWTGATKYHLNGRDSLVNPGPAMASHKDDEEKYFPQSGVLIFGKQGSNKTNVDIEKVMITDEEEIRTTNPVATEQYGSVSTNLQSGNTQAATSDVNTQGVLPGMVWQDRDVYLQGPIWAKIPHTDGHFHPSPLMGGFGLKHPPPQILIKNTPVPANPSTTFSAAKFASFITQYSTGQVSVEIEWELQKENSKRWNPEIQYTSNYNKSVNVDFTVDTNGVYSEPRPIGTRYLTRNL

SEQ ID NO: 2652 - protein, 735 aa, synthetic construct
  REGION 1..735: note = source = /note="Description of Artificial Sequence: Synthetic polypeptide"
MAADGYLPDWLEDTLSEGIRQWWKLKPGPPPPKPAERHKDDSRGLVLPGYKYLGPFNGLDKGEPVNEADAAALEHDKAYDRQLDSGDNPYLKYNHADAEFQERLKEDTSFGGNLGRAVFQAKKRVLEPLGLVEEPVKTAPGKKRPVEHSPVEPDSSSGTGKAGQQPARKRLNFGQTGDADSVPDPQPLGQPPAAPSGLGTNTMATGSGAPMADNNEGADGVGNSSGNWHCDSTWMGDRVITTSTRTWALPTYNNHLYKQISSQSGASNDNHYFGYSTPWGYFDFNRFHCHFSPRDWQRLINNNWGFRPKRLSFKLFNIQVKEVTQNDGTTTIANNLTSTVQVFTDSEYRLPYVLGSAHQGCLPPFPADVFMVPQYGYLTLNNGSQAVGRSSFYCLEYFPSQMLRTGNNFTFSYTFEDVPFHSSYAHSQSLDRLMNPLIDQYLYYLSKTNAPSGTTTMSRLQFSQAGASDIRDQSRNWLPGPCYRQQRVSKTAADNNNSDYSWTGATKYHLNGRDSLVNPGPAMASHKDDEEKYFPQSGVLIFGKQGSNKTNVDIEKVMITDEEEIRTTNPVATEQYGSVSTNLQSGNTQAATSDVNTQGVLPGMVWQDRDVYLQGPIWAKIPHTDGHFHPSPLMGGFGLKHPPPQILIKNTPVPANPSTTFSAAKFASFITQYSTGQVSVEIEWELQKENSKRWNPEIQYTSNYNKSVNVDFTVDTNGVYSEPRPIGTRYLTRNL

SEQ ID NO: 2653 - protein, 735 aa, synthetic construct
  REGION 1..735: note = source = /note="Description of Artificial Sequence: Synthetic polypeptide"
MAADGYLPDWLEDTLSEGIRQWWKLKPGPPPPKPAERHKDDSRGLVLPGYKYLGPFNGLDKGEPVNEADAAALEHDKAYDRQLDSGDNPYLKYNHADAEFQERLKEDTSFGGNLGRAVFQAKKRVLEPLGLVEEPVKTAPGKKRPVEHSPVEPDSSSGTGKAGQQPARKRLNFGQTGDADSVPDPQPLGQPPAAPSGLGTNTMATGSGAPMADNNEGADGVGNSSGNWHCDSTWMGDRVITTSTRTWALPTYNNHLYKQISSQSGASNDNHYFGYSTPWGYFDFNRFHCHFSPRDWQRLINNNWGFRPKRLSFKLFNIQVKEVTQNDGTTTIANNLTSTVQVFTDSEYQLPYVLGSAHRGCLPPFPADVFMVPQYGYLTLNNGSQAVGRSSFYCLEYFPSQMLRTGNNFTFSYTFEDVPFHSSYAHSQSLDRLMNPLIDQYLYYLSKTNAPSGTTTMSRLQFSQAGASDIRDQSRNWLPGPCYRQQRVSKTAADNNNSDYSWTGATKYHLNGRDSLVNPGPAMASHKDDEEKYFPQSGVLIFGKQGSNKTNVDIEKVMITDEEEIRTTNPVATEQYGSVSTNLQSGNTQAATSDVNTQGVLPGMVWQDRDVYLQGPIWAKIPHTDGHFHPSPLMGGFGLKHPPPQILIKNTPVPANPSTTFSAAKFASFITQYSTGQVSVEIEWELQKENSKRWNPEIQYTSNYNKSVNVDFTVDTNGVYSEPRPIGTRYLTRNL

SEQ ID NO: 2654 - protein, 735 aa, synthetic construct
  REGION 1..735: note = source = /note="Description of Artificial Sequence: Synthetic polypeptide"
MAADGYLPDWLEDTLSEGIRQWWKLKPGPPPPKPAERHKDDSRGLVLPGYKYLGPFNGLDKGEPVNEADAAALEHDKAYDRQLDSGDNPYLKYNHADAEFQERLKEDTSFGGNLGRAVFQAKKRVLEPLGLVEEPVKTAPGKKRPVEHSPVEPDSSSGTGKAGQQPARKRLNFGQTGDADSVPDPQPLGQPPAAPSGLGTNTMATGSGAPMADNNEGADGVGNSSGNWHCDSTWMGDRVITTSTRTWALPTYNNHLYKQISSQSGASNDNHYFGYSTPWGYFDFNRFHCHFSPRDWQRLINNNWGFRPKRLSFKLFNIQVKEVTQNDGTTTIANNLTSTVQVFTDSEYQLPYVLGSAHQGCLPPFPADVFMVPQYGYLTLNNGSQAVGRSSFYCLEYFPSQMLRAGNNFTFSYTFEDVPFHSSYAHSQSLDRLMNPLIDQYLYYLSKTNAPSGTTTMSRLQFSQAGASDIRDQSRNWLPGPCYRQQRVSKTAADNNNSDYSWTGATKYHLNGRDSLVNPGPAMASHKDDEEKYFPQSGVLIFGKQGSNKTNVDIEKVMITDEEEIRTTNPVATEQYGSVSTNLQSGNTQAATSDVNTQGVLPGMVWQDRDVYLQGPIWAKIPHTDGHFHPSPLMGGFGLKHPPPQILIKNTPVPANPSTTFSAAKFASFITQYSTGQVSVEIEWELQKENSKRWNPEIQYTSNYNKSVNVDFTVDTNGVYSEPRPIGTRYLTRNL

SEQ ID NO: 2655 - protein, 735 aa, synthetic construct
  REGION 1..735: note = source = /note="Description of Artificial Sequence: Synthetic polypeptide"
MAADGYLPDWLEDTLSEGIRQWWKLKPGPPPPKPAERHKDDSRGLVLPGYKYLGPFNGLDKGEPVNEADAAALEHDKAYDRQLDSGDNPYLKYNHADAEFQERLKEDTSFGGNLGRAVFQAKKRVLEPLGLVEEPVKTAPGKKRPVEHSPVEPDSSSGTGKAGQQPARKRLNFGQTGDADSVPDPQPLGQPPAAPSGLGTNTMATGSGAPMADNNEGADGVGNSSGNWHCDSTWMGDRVITTSTRTWALPTYNNHLYKQISSQSGASNDNHYFGYSTPWGYFDFNRFHCHFSPRDWQRLINNNWGFRPKRLGFKLFNIQVKEVTQNDGTTTIANNLTSTVQVFTDSEYQLPYVLGSAHQGCLPPFPADVFMVPQYGYLTLNNGSQAVGRSSFYCLEYFPSQMLRTGNNFTFSYTFEDVPFHSSYAHSQSLDRLMNPLIDQYLYYLSKTNAPSGTTTMSRLQFSQAGASDIRDQSRNWLPGPCYRQQRVSKTAADNNNSDYSWTGATKYHLNGRDSLVNPGPAMASHKDDEEKYFPQSGVLIFGKQGSNKTNVDIEKVMITDEEEIRTTNPVATEQYGSVSTNLQSGNTQAATSDVNTQGVLPGMVWQDRDVYLQGPIWAKIPHTDGHFHPSPLMGGFGLKHPPPQILIKNTPVPANPSTTFSAAKFASFITQYSTGQVSVEIEWELQKENSKRWNPEIQYTSNYNKSVNVDFTVDTNGVYSEPRPIGTRYLTRNL

SEQ ID NO: 2656 - protein, 735 aa, synthetic construct
  REGION 1..735: note = source = /note="Description of Artificial Sequence: Synthetic polypeptide"
MAADGYLPDWLEDTLSEGIRQWWKLKPGPPPPKPAERHKDDSRGLVLPGYKYLGPFNGLDKGEPVNEADAAALEHDKAYDRQLDSGDNPYLKYNHADAEFQERLKEDTSFGGNLGRAVFQAKKRVLEPLGLVEEPVKTAPGKKRPVEHSPVEPDSSSGTGKAGQQPARKRLNFGQTGDADSVPDPQPLGQPPAAPSGLGTNTMATGSGAPMADNNEGADGVGNSSGNWHCDSTWMGDRVITTSTRTWALPTYNNHLYKQISSQSGVSNDNHYFGYSTPWGYFDFNRFHCHFSPRDWQRLINNNWGFRPKRLSFKLFNIQVKEVTQNDGTTTIANNLTSTVQVFTDSEYQLPYVLGSAHQGCLPPFPADVFMVPQYGYLTLNNGSQAVGRSSFYCLEYFPSQMLRTGNNFTFSYTFEDVPFHSSYAHSQSLDRLMNPLIDQYLYYLSKTNAPSGTTTMSRLQFSQAGASDIRDQSRNWLPGPCYRQQRVSKTAADNNNSDYSWTGATKYHLNGRDSLVNPGPAMASHKDDEEKYFPQSGVLIFGKQGSNKTNVDIEKVMITDEEEIRTTNPVATEQYGSVSTNLQSGNTQAATSDVNTQGVLPGMVWQDRDVYLQGPIWAKIPHTDGHFHPSPLMGGFGLKHPPPQILIKNTPVPANPSTTFSAAKFASFITQYSTGQVSVEIEWELQKENSKRWNPEIQYTSNYNKSVNVDFTVDTNGVYSEPRPIGTRYLTRNL

SEQ ID NO: 2657 - protein, 735 aa, synthetic construct
  REGION 1..735: note = source = /note="Description of Artificial Sequence: Synthetic polypeptide"
MAADGYLPDWLEDTLSEGIRQWWKLKPGPPPPKPAERHKDDSRGLVLPGYKYLGPFNGLDKGEPVNEADAAALEHDKAYDRQLDSGDNPYLKYNHADAEFQERLKEDTSFGGNLGRAVFQAKKRVLEPLGLVEEPVKTAPGKKRPVEHSPVEPDSSSGTGKAGQQPARKRLNFGQTGDADSVPDPQPLGQPPAAPSGLGTNTMATGSGAPMADNNEGADGVGNSSGNWHCDSTWMGDRVITTSTRTWALPTYNNHLYKQISSQSGASNDNHYFGYSTPWGYFDFNRFHCHFSPRDWQRLINNNWGFRPKRLSFKLFNIQVKEVTQNDGTTTIANNLTSTVQVFTDSEYQLPYVLGSAHQGCLPPFPADVFMVPQYGYLTLNNGSQAVGRSSFYCLEYFPSQMLRTGNNFTFSYTFEDVPFHSSYAHSQSLDRLMNPLIDQYLYYLSKTNAPSGTTTMSRLQFSQAGASDIRDQSRNWLPGPCYRQQRVSKTAADNNNSDYSWTGATKYHLNGRDSLVNPGPAMASHKDDEEKYFPQSGVLIFGKQGSNKTNVDIEKVMITDEEEIRTTNPMATEQYGSVSTNLQSGNTQAATSDVNTQGVLPGMVWQDRDVYLQGPIWAKIPHTDGHFHPSPLMGGFGLKHPPPQILIKNTPVPANPSTTFSAAKFASFITQYSTGQVSVEIEWELQKENSKRWNPEIQYTSNYNKSVNVDFTVDTNGVYSEPRPIGTRYLTRNL

SEQ ID NO: 2658 - protein, 735 aa, synthetic construct
  REGION 1..735: note = source = /note="Description of Artificial Sequence: Synthetic polypeptide"
MAADGYLPDWLEDTLSEGIRQWWKLKPGPPPPKPAERHKDDSRGLVLPGYKYLGPFNGLDKGEPVNEADAAALEHDKAYDRQLDSGDNPYLKYNHADAEFQERLKEDTSFGGNLGRAVFQAKKRVLEPLGLVEEPVKTAPGKKRPIEHSPVEPDSSSGTGKAGQQPARKRLNFGQTGDADSVPDPQPLGQPPAAPSGLGTNTMATGSGAPMADNNEGADGVGNSSGNWHCDSTWMGDRVITTSTRTWALPTYNNHLYKQISSQSGASNDNHYFGYSTPWGYFDFNRFHCHFSPRDWQRLINNNWGFRPKRLSFKLFNIQVKEVTQNDGTTTIANNLTSTVQVFTDSEYQLPYVLGSAHQGCLPPFPVDVFMVPQYGYLTLNNGSQAVGRSSFYCLEYFPSQMLRTGNNFTFSYTFEDVPFHSSYAHSQSLDRLMNPLIDQYLYYLSKTNAPSGTTTMSRLQFSQAGASDIRDQSRNWLPGPCYRQQRVSKTAADNNNSDYSWTGATKYHLNGRDSLVNPGPAMASHKDDEEKYFPQSGVLIFGKQGSNKTNVDIEKVMITDEEEIRTTNPVATEQYGSVSTNLQSGNTQAATSDVNTQGVLPGMVWQDRDVYLQGPIWAKIPHTDGHFHPSPLMGGFGLKHPPPQILIKNTPVPANPSTTFSAAKFASFITQYSTGQVSVEIEWELQKENSKRWNPEIQYTSNYNKSVNVDFTVDTNGVYSEPRPIGTRYLTRNL

SEQ ID NO: 2659 - protein, 735 aa, synthetic construct
  REGION 1..735: note = source = /note="Description of Artificial Sequence: Synthetic polypeptide"
MAADGYLPDWLEDTLSEGIRQWWKLKPGPPPPKPAERHKDDSRGLVLPGYKYLGPFNGLDKGEPVNEADAAALEHDKAYDRQLDSGDNPYLKYNHADAEFQERLKEDTSFGGNLGRAVFQAKKRVLEPLGLVEEPVKTAPGKKRPVEHSPVEPDSSSGTGKAGQQPARKRLNFGQTGDADSVPDPQPLGQPPAAPSGLGTNTMTTGSGAPMADNNEGADGVGNSSGNWHCDSTWMGDRVITTSTRTWALPTYNNHLYKQISSQSGASNDNHYFGYSTPWGYFDFNRFHCHFSPRDWQRLINNNWGFRPKRLSFKLFNIQVKEVTQNDGTTTIANNLTSTVQVFTDSEYQLPYVLGSAHQGCLPPFPADVFMVPQYGYLTLNNGSQAVGRSSFYCLEYFPSQMLRTGNNFTFSYTFEDVPFHSSYAHSQSLDRLMNPLIDQYLYYLSKTNAPSGTTTMSRLQFSQAGASDIRDQSRNWLPGPCYRQQRVSKTAADNNNSDYSWTGATKYHLNGRDSLVNPGPAMASHKDDEEKYFPQSGVLIFGKQGSNKTNVDIEKVMITDEEEIRTTNPVATEQYGSVSTNLQSGNTQAATSDVNTQGVLPGMVWQDRDVYLQGPIWAKIPHTDGHFHPSPLMGGFGLKHPPPQILIKNTPVPANPSTTFSAAKFASFITQYSTGQVSVEIEWELQKENSKRWNPEIQYTSNYNKSVNVDFTVDTNGVYSEPRPIGTRYLTRNL

SEQ ID NO: 2660 - protein, 735 aa, synthetic construct
  REGION 1..735: note = source = /note="Description of Artificial Sequence: Synthetic polypeptide"
MAADGYLPDWLEDTLSEGIRQWWKLKPGPPPPKPAERHKDDSRGLVLPGYKYLGPFNGLDKGEPVNEADAAALEHDKAYDRQLDSGDNPYLKYNHADAEFQERLKEDTSFGGNLGRAVFQAKKRVLEPLGLVEEPVKTAPGKKRSVEHSPVEPDSSSGTGKAGQQPARKRLNFGQTGDADSVPDPQPLGQPPAAPSGLGTNTMATGSGAPMADNNEGADGVGNSSGNWHCDSTWMGDRVITTSTRTWALPTYNNHLYKQISSQSGASNDNHYFGYSTPWGYFDFNRFHCHFSPRDWQRLINNNWGFRPKRLSFKLFNIQVKEVTQNDGTTTIANNLTSTVQVFTDSEYQLPYVLGSAHQGCLPPFPADVFMVPQYGYLTLNNGSQAVGRSSFYCLEYFPSQMLRTGNNFTFSYTFEDVPFHSSYAHSQSLDRLMNPLIDQYLYYLSKTNAPSGTTTMSRLQFSQAGASDIRDQSRNWLPGPCYRQQRVSKTAADNNNSDYSWTGATKYHLNGRDSLVNPGPAMASHKDDEEKYFPQSGVLIFGKQGSNKTNVDIEKVMITDEEEIRTTNPVATEQYGSVSTNLQSGNTQAATSDVNTQGVLPGMVWQDRDVYLQGPIWAKIPHTDGHFHPSPLMGGFGLKHPPPQILIKNTPVPANPSTTFSAAKFASFITQYSTGQVSVEIEWELQKENSKRWNPEIQYTSNYNKSVNVDFTVDTNGVYSEPRPIGTRYLTRNL

SEQ ID NO: 2661 - protein, 735 aa, synthetic construct
  REGION 1..735: note = source = /note="Description of Artificial Sequence: Synthetic polypeptide"
MAADGYLPDWLEDTLSEGIRQWWKLKPGPPPPKPAERHKDDSRGLVLPGYKYLGPFNGLDKGEPVNEADAAALEHDKAYDRQLDSGDNPYLKYNHADAEFQERLKEDTSFGGNLGRAVFQAKKRVLEPLGLVEEPVKTAPGKKRPVEHSPVEPDSSSGTGKAGQQPARKRLNFGQTGDADSVPDPQPLGQPPAAPSGLGTNTMATGSGAPMADNNEGADGVGNSSGNWHCDSTWMGDRVITTSTRTWALPTYNNHLYKQISSQSGASNDNHYFGYSTPWGYFDFNRFHCHFSPRDWQRLINNNWGFRPKRLSFKLFNIQVKEVTQNDGTTTIANNLTSTVQVFTDSEYQLPYVLGSAHQGCLPPFPADVFVVPQYGYLTLNNGSQAVGRSSFYCLEYFPSQMLRTGNNFTFSYTFEDVPFHSSYAHSQSLDRLMNPLIDQYLYYLSKTNAPSGTTTMSRLQFSQAGASDIRDQSRNWLPGPCYRQQRVSKTAADNNNSDYSWTGATKYHLNGRDSLVNPGPAMASHKDDEEKYFPQSGVLIFGKQGSNKTNVDIEKVMITDEEEIRTTNPVATEQYGSVSTNLQSGNTQAATSDVNTQGVLPGMVWQDRDVYLQGPIWAKIPHTDGHFHPSPLMGGFGLKHPPPQILIKNTPVPANPSTTFSAAKFASFITQYSTGQVGVEIEWELQKENSKRWNPEIQYTSNYNKSVNVDFTVDTNGVYSEPRPIGTRYLTRNL

SEQ ID NO: 2662 - protein, 735 aa, synthetic construct
  REGION 1..735: note = source = /note="Description of Artificial Sequence: Synthetic polypeptide"
MAADGYLPDWLEDTLSEGIRQWWKLKPGPPPPKPAERHKDDSRGLVLPGYKYLGPFNGLDKGEPVNEADAAALEHDKAYDRQLDSGDNPYLKYNHADAEFQERLKEDTSFGGNLGRAVFQAKKRVLEPLGLVEEPVKTAPGKKRPVEHSPVEPDSSSGTGKAGQQPARKRLNFGQTGDADSVPDPQPLGQPPAAPSGLGTNTMATGSGAPMADNNEGADGVGNSSGNWHCDSTWMGDRVITTSTRTWALPTYNNHLYKQISSQSGASNDNHYFGYSTPWGYFDFNRFHCHFSPRDWQRLINNNWGFRPKRLSFKLFNIQVKEVTQNDGTTTIANNLTSTVQVFTDSEYQLPYVLGSAHQGCLPPFPADVFMVPQYGYLTLNNGSQAVGRSSFYCLEYFPSQMLRTGNNFTFSYTFEDVPFHSSYAHSQSLDRLMNPLIDQYLYYLSKTNAPSGTTAMSRLQFSQAGASDIRDQSRNWLPGPCYRQQRVSKTAADNNNSDYSWTGATKYHLNGRDSLVNPGPAMASHKDDEEKYFPQSGVLIFGKQGSNKTNVDIEKVMITDEEEIRTTNPVATEQYGSVSTNLQSGNTQAATSDVNTQGVLPGMVWQDRDVYLQGPIWAKIPHTDGHFHPSPLMGGFGLKHPPPQILIKNTPVPANPSTTFSAAKFASFITQYSTGQVSVEIEWELQKENSKRWNPEIQYTSNYNKSVNVDFTVDTNGVYSEPRPIGTRYLTRNL

SEQ ID NO: 2663 - protein, 735 aa, synthetic construct
  REGION 1..735: note = source = /note="Description of Artificial Sequence: Synthetic polypeptide"
MAADGYLPDWLEDTLSEGIRQWWKLKPGPPPPKPAERHKDDSRGLVLPGYKYLGPFNGLDKGEPVNEADAAALEHDKAYDRQLDSGDNPYLKYNHADAEFQERLKEDTSFGGNLGRAVFQAKKRVLEPLGLVEEPVKTAPGKKRPVEHSPVEPDSSSGTGKAGQQPARKRLNFGQTGDADSVPDPQPLGQPPAAPSGLGTNTMATGSGAPMADNNEGADGVGNSSGNWHCDSTWMGDRVITTSTRTWALPTYNNHLYKQISSQSGASNDNHYFGYSTPWGYFDFNRFHCHFSPRDWQRLINNNWGFRPKRLSFKLFNIQVKEVTQNDGTTTIANNLTSTVQVFTDSEYQLPYVLGSAHQGCLPPFPADVFMVPQYGYLTLNNGSQAVGRSSFYCLEYFPSQMLRTGNNFTFSYTFEDVPFHSSYAHSQSLDRLMNPPIDQYLYYLSKTNAPSGTTTMSRLQFSQAGASDIRDQSRNWLPGPCYRQQRVSKTAADNNNSDYSWTGATKYHLNGRDSLVNPGPAMASHKDDEEKYFPQSGVLIFGKQGSNKTNVDIEKVMITDEEEIRTTNPVATEQYGSVSTNLQSGNTQAATSDVNTQGVLPGMVWQDRDVYLQGPIWAKIPHTDGHFHPSPLMGGFGLKHPPPQILIKNTPVPANPSTTFSAAKFASFITQYSTGQVSVEIEWELQKENSKRWNPEIQYTSNYNKSVNVDFTVDTNGVYSEPRPIGTRYLTRNL

SEQ ID NO: 2664 - protein, 735 aa, synthetic construct
  REGION 1..735: note = source = /note="Description of Artificial Sequence: Synthetic polypeptide"
MAADGYLPDWLEDTLSEGIRQWWKLKPGPPPPKPAERHKDDSRGLVLPGYKYLGPFNGLDKGEPVNEADAAALEHDKAYDRQLDSGDNPYLKYNHADAEFQERLKEDTSFGGNLGRAVFQAKKRVLEPLGLVEEPVKTAPGKKRPVEHSPVEPDSSSGTGKAGQQPARKRLNFGQTGDADSVPDPQPLGQPPAAPSGLGTNTMATGSGAPMADNNEGADGVGNSSGNWHCDSTWMGDRVITTSTRTWALPTYNNHLYKQISSQSGASNDNHYFGYSTPWGYFDFNRFHCHFSPRDWQRLINNNWGFRPKRLSFKLFNIQVKEVTQNDGTTTIANNLTSTVQVFTDSEYQLPYVLGSAHQGCLPPFPADVFMVPQYGYLTLNNGSQAVGRSSFYCLEYFPSQMLRTGNNFTFSYTFEDVPFHSSYAHGQSLDRLMNPLIDQYLYYLSKTNAPSGTTTMSRLQFSQAGASDIRDQSRNWLPGPCYRQQRVSKTAADNNNSDYSWTGATKYHLNGRDSLVNPGPAMASHKDDEEKYFPQSGVLIFGKQGSNKTNVDIEKVMITDEEEIRTTNPVATEQYGSVSTNLQSGNTQAATSDVNTQGVLPGMVWQDRDVYLQGPIWAKIPHTDGHFHPSPLMGGFGLKHPPPQILIKNTPVPANPSTTFSAAKFASFITQYSTGQVSVEIEWELQKENSKRWNPEIQYTSNYNKSVNVDFTVDTNGVYSEPRPIGTRYLTRNL

SEQ ID NO: 2665 - protein, 735 aa, synthetic construct
  REGION 1..735: note = source = /note="Description of Artificial Sequence: Synthetic polypeptide"
MAADGYLPDWLEDTLSEGIRQWWKLKPGPPPPKPAERHKDDSRGLVLPGYKYLGPFNGLDKGEPVNEADAAALEHDKAYDRQLDSGDNPYLKYNHADAEFQERLKEDTSFGGNLGRAVFQAKKRVLEPLGLVEEPVKTAPGKKRPVEHSPVEPDSSSGTGKAGQQPARKRLNFGQTGDADSVPDPQPLGQPPAAPSGLGTNTMATGSGAPMADNNEGADGVGNSSGNWHCDSTWMGDRVITTSTRTWALPTYNNHLYKQISSQSGASNDNHYFGYSTPWGYFDFNRFHCHFSPRDWQRLINNNWGFRPKRLSFKLFNIQVKEVTQNDGTTTIANNLTSTVQVFTDSEYQLPYVLGSAHQGCLPPFPADVFMVPQYGYLTLNNGSQAVGRSSFYCLEYFPSQMLRTGNNFTFSYTFEDVPFHSSYAHSQSLDRLMNPLIDQYLYYLSKTNAPSGTTTMSRPQFSQAGASDIRDQSRNWLPGPCYRQQRVSKTAADNNNSDYSWTGATKYHLNGRDSLVNPGPAMASHKDDEEKYFPQSGVLIFGKQGSNKTNVDIEKVMITDEEEIRTTNPVATEQYGSVSTNLQSGNTQAATSDVNTQGVLPGMVWQDRDVYLQGPIWAKIPHTDGHFHPSPLMGGFGLKHPPPQILIKNTPVPANPSTTFSAAKFASFITQYSTGQVSVEIEWELQKENSKRWNPEIQYTSNYNKSVNVDFTVDTNGVYSEPRPIGTRYLTRNL

SEQ ID NO: 2666 - protein, 735 aa, synthetic construct
  REGION 1..735: note = source = /note="Description of Artificial Sequence: Synthetic polypeptide"
MAADGYLPDWLEDTLSEGIRQWWKLKPGPPPPKPAERHKDDSRGLVLPGYKYLGPFNGLDKGEPVNEADAAALEHDKAYDRQLDSGDNPYLKYNHADAEFQERLKEDTSFGGNLGRAVFQAKKRVLEPLGLVEEPVKTAPGKKRPVEHSPVEPDSSSGTGKAGQQPARKRLNFGQTGDADSVPDPQPLGQPPAAPSGLGTNTMATGSGAPMADNNEGADGVGNSSGNWHCDSTWMGDRVITTSTRTWALPTYNNHLYKQISSQSGTSNDNHYFGYSTPWGYFDFNRFHCHFSPRDWQRLINNNWGFRPKRLSFKLFNIQVKEVTQNDGTTTIANNLTSTVQVFTDSEYQLPYVLGSAHQGCLPPFPADVFMVPQYGYLTLNNGSQAVGRSSFYCLEYFPSQMLRTGNNFTFSYTFEDVPFHSSYAHSQSLDRLMNPLIDQYLYYLSKTNAPSGTTTMSRLQFSQAGASDIRDQSRNWLPGPCYRQQRVSKTAADNNNSDYSWTGATKYHLNGRDSLVNPGPAMASHKDDEEKYFPQSGVLIFGKQGSNKTNVDIEKVMITDEEEIRTTNPVATEQYGSVSTNLQSGNTQAATSDVNTQGVLPGMVWQDRDVYLQGPIWAKIPHTDGHFHPSPLMGGFGLKHPPPQILIKNTPVPANPSTTFSAAKFASFITQYSTGQVSVEIEWELQKENSKRWNPEIQYTSNYNKSVNVDFTVDTNGVYSEPRPIGTRYLTRNL

SEQ ID NO: 2667 - protein, 735 aa, synthetic construct
  REGION 1..735: note = source = /note="Description of Artificial Sequence: Synthetic polypeptide"
MAADGYLPDWLEDTLSEGIRQWWKLKPGPPPPKPAERHKDDSRGLVLPGYKYLGPFNGLDKGEPVNEADAAALEHDKAYDRQLDSGDNPYLKYNHADAEFQERLKEDTSFGGNLGRAVFQAKKRVLEPLGLVEEPVKTAPGKKRPVEHSPVEPDSSSGTGKAGQQPARKRLNFGQTGDADSVPDPQPLGQPPAAPSGLGTNTMATGSGAPMADNNEGADGVGNSSGNWHCDSTWMGDRVITTSTRTWALPTYNNHLYKQISSQSGASNDNHYFGYSTPWGYFDFNRFHCHFSPRDWQRLINNNWGFRPKRLSFKLFNIQVKEVTQNDGTTTIANNLTSTVQVFTDSEYQLPYVLGSAHQGCLPPFPADVFMVPQYGYLTLNNGSQAVGRSSFYCLEYFPSQMLRTGNNFTFSYTFEDVPFHSSYAHSQSLDRLMNPLIDQYLYYLSKTNAPSGTTTMSRLQFSQAGASDIRDQSRNWLPGPCYRQQRVSKTAADNNNSDYSWTGATKYHLNGRDSLVNPGPAMASHKDDEEKYFPQSGVLIFGKQGSNKTNVDIEKVMITDEEEIRTTNPVATEQYGSVSTNLQSGNTQAATSDVNTQGVLPGMVWQDRDVYLQGPIWAKIPHTDGHFHPSPLMGGFGLKHPPPQILIKNTPVPANPSTTFSAAKFASFITQYSTGQVSVEIEWELQKENSKRWNPEIQYTSNYNKSVNVDFTVDTNGVYSEPHPIGTRYLTRNL

SEQ ID NO: 2668 - protein, 735 aa, synthetic construct
  REGION 1..735: note = source = /note="Description of Artificial Sequence: Synthetic polypeptide"
MAADGYLPDWLEDTLSEGIRQWWKFKPGPPPPKPAERHKDDSRGLVLPGYKYLGPFNGLDKGEPVNEADAAALEHDKAYDRQLDSGDNPYLKYNHADAEFQERLKEDTSFGGNLGRAVFQAKKRVLEPLGLVEEPVKTAPGKKRPVEHSPVEPDSSSGTGKAGQQPARKRLNFGQTGDADSVPDPQPLGQPPAAPSGLGTNTMATGSGAPMADNNEGADGVGNSSGNWHCDSTWMGDRVITTSTRTWALPTYNNHLYKQISSQSGASNDNHYFGYSTPWGYFDFNRFHCHFSPRDWQRLINNNWGFRPKRLSFKLFNIQVKEVTQNDGTTTIANNLTSTVQVFTDSEYQLPYVLGSAHQGCLPPFPADVFMVPQYGYLTLNNGSQAVGRSSFYCLEYFPSQMLRTGNNFTFSYTFEDVPFHSSYAHSQSLDRLMNPLIDQYLYYLSKTNAPSGTTTMSRLQFSQAGASDIRDQSRNWLPGPCYRQQRVSKTAADNNNSDYSWTGATKYHLNGRDSLVNPGPAMASHKDDEEKYFPQSGVLIFGKQGSNKTNVDIEKVMITDEEEIRTTNPVATEQYGSVSTNLQSGNTQAATSDVNTQGVLPGMVWQDRDVYLQGPIWAKIPHTDGHFHPSPLMGGFGLKHPPPQILIKNTPVPANPSTTFSAAKFASFITQYSTGQVSVEIEWELQKENSKRWNPEIQYTSNYNKSVNVDFTVDTNGVYSEPRPIGTRYLTRNL

SEQ ID NO: 2669 - protein, 735 aa, synthetic construct
  REGION 1..735: note = source = /note="Description of Artificial Sequence: Synthetic polypeptide"
MAADGYLPDWLEDTLSEGIRQWWKLKPGPPPPKPAERHKDDSRGLVLPGYKYLGPFNGLDKGEPVNEADAAALEHDKAYDRQLDSGDNPYLKYNHADAEFQERLKEDTSFGGNLGRAVFQAKKRVLEPLGLVEEPVKTAPGKKRPVEHSPVEPDSSSGTGKAGQQPARKRLNFGQTGDADSVPDPQPLGQPPAAPSGLGTNTMATGSGAPMADNNEGADGVGNSSGNWHCDSTWMGDRVITTSTRTWALPTYNNHLYKQISSQSGASNDNHYFGYSTPWGYFDFNRFHCHFSSRDWQRLINNNWGFRPKRLSFKLFNIQVKEVTQNDGTTTIANNLTSTVQVFTDSEYQLPYVLGSAHQGCLPPFPADVFMVPQYGYLTLNNGSQAVGRSSFYCLEYFPSQMLRTGNNFTFSYTFEDVPFHSSYAHSQSLDRLMNPLIDQYLYYLSKTNAPSGTTTMSRLQFSQAGASDIRDQSRNWLPGPCYRQQRVSKTAADNNNSDYSWTGATKYHLNGRDSLVNPGPAMASHKDDEEKYFPQSGVLIFGKQGSNKTNVDIEKVMITDEEEIRTTNPVATEQYGSVSTNLQSGNTQAATSDVNTQGVLPGMVWQDRDVYLQGPIWAKIPHTDGHFHPSPLMGGFGLKHPPPQILIKNTPVPANPSTTFSAAKFASFITQYSTGQVSVEIEWELQKENSKRWNPEIQYTSNYNKSVNVDFTVDTNGVYSEPRPIGTRYLTRNL

SEQ ID NO: 2670 - protein, 735 aa, synthetic construct
  REGION 1..735: note = source = /note="Description of Artificial Sequence: Synthetic polypeptide"
MAADGYLPDWLEDTLSEGIRQWWKLKPGPPPPKPAERHEDDSRGLVLPGYKYLGPFNGLDKGEPVNEADAAALEHDKAYDRQLDSGDNPYLKYNHADAEFQERLKEDTSFGGNLGRAVFQAKKRVLEPLGLVEEPVKTAPGKKRPVEHSPVEPDSSSGTGKAGQQPARKRLNFGQTGDADSVPDPQPLGQPPAAPSGLGTNTMATGSGAPMADNNEGADGVGNSSGNWHCDSTWMGDRVITTSTRTWALPTYNNHLYKQISSQSGASNDNHYFGYSTPWGYFDFNRFHCHFSPRDWQRLINNNWGFRPKRLSFKLFNIQVKEVTQNDGTTTIANNLTSTVQVFTDSEYQLPYVLGSAHQGCLPPFPADVFMVPQYGYLTLNNGSQAVGRSSFYCLEYFPSQMLRTGNNFTFSYTFEDVPFHSSYAHSQSLDRLMNPLIDQYLYYLSKTNAPSGTTTMSRLQFSQAGASDIRDQSRNWLPGPCYRQQRVSKTAADNNNSDYSWTGATKYHLNGRDSLVNPGPAMASHKDDEEKYFPQSGVLIFGKQGSNKTNVDIEKVMITDEEEIRTTNPVATEQYGSVSTNLQSGNTQAATSDVNTQGVLPGMVWQDRDVYLQGPIWAKIPHTDGHFHPSPLMGGFGLKHPPPQILIKNTPVPANPSTTFSAAKFASFITQYSTGQVSVEIEWELQKENSKRWNPEIQYTSNYNKSVNVDFTVDTNGVYSEPRPIGTRYLTRNL

SEQ ID NO: 2671 - protein, 734 aa, synthetic construct
  REGION 1..734: note = source = /note="Description of Artificial Sequence: Synthetic polypeptide"
MAADGYLPDWLEDTLSEGIRQWWKLKPGPPPPKPAERHKDDSRGLVLPGYKYLGPFNGLDKGEPVNEADAAALEHDKAYDRQLDSGDNPYLKYNHADAEFQERLKEDTSFGGNLGRAVFQAKKRVLEPLGLVEEPVKTAPGKKRPVEHSPVEPDSSSGTGKAGQQPARKRLNFGQTGDADSVPDPQPLGQPPAAPSGLGTNTMATGSGAPMADNNEGADGVGNSSGNWHCDSTWMGDRVITTSTRTWALPTYNNHLYKQISSQSGASNDNHYFGYSTPWGYFDFNRFHCHFSPRDWQRLINNNWGFRPKRLSFKLFNIQVKEVTQNDGTTTIANNLTSTVQVFTDSEYQLPYVLGSAHQGCLPPFPADVFMVPQYGYLTLNNGSQAVGRSSFYCLEYFPSQMLRTGNNFTFSYTFEDVPFHSSYAHSQSLDRLMNPLIDQYLYYLSKTNAPSGTTTMSRLQFSQAGASDIRDQSRNWLPGPCYRQQRVSKTAADNNSDYSWTGATKYHLNGRDSLVNPGPAMASHKDDEEKYFPQSGVLIFGKQGSNKTNVDIEKVMITDEEEIRTTNPVATEQYGSVSTNLQSGNTQAATSDVNTQGVLPGMVWQDRDVYLQGPIWAKIPHTDGHFHPSPLMGGFGLKHPPPQILIKNTPVPANPSTTFSAAKFASFITQYSTGQVSVEIEWELQKENSKRWNPEIQYTSNYNKSVNVDFTVDTNGVYSEPRPIGTRYLTRNL

SEQ ID NO: 2672 - protein, 735 aa, synthetic construct
  REGION 1..735: note = source = /note="Description of Artificial Sequence: Synthetic polypeptide"
MAADGYLPDWLEDTLSEGIRQWWKLKPGPPPPKPAEWHKDDSRGLVLPGYKYLGPFNGLDKGEPVNEADAAALEHDKAYDRQLDSGDNPYLKYNHADAEFQERLKEDTSFGGNLGRAVFQAKKRVLEPLGLVEEPVKTAPGKKRPVEHSPVEPDSSSGTGKAGQQPARKRLNFGQTGDADSVPDPQPLGQPPAAPSGLGTNTMATGSGAPMADNNEGADGVGNSSGNWHCDSTWMGDRVITTSTRTWALPTYNNHLYKQISSQSGASNDNHYFGYSTPWGYFDFNRFHCHFSPRDWQRLINNNWGFRPKRLSFKLFNIQVKEVTQNDGTTTIANNLTSTVQVFTDSEYQLPYVLGSAHQGCLPPFPADVFMVPQYGYLTLNNGSQAVGRSSFYCLEYFPSQMLRTGNNFTFSYTFEDVPFHSSYAHSQSLDRLMNPLIDQYLYYLSKTNAPSGTTTMSRLQFSQAGASDIRDQSRNWLPGPCYRQQRVSKTAADNNNSDYSWTGATKYHLNGRDSLVNPGPAMASHKDDEEKYFPQSGVLIFGKQGSNKTNVDIEKVMITDEEEIRTTNPVATEQYGSVSTNLQSGNTQAATSDVNTQGVLPGMVWQDRDVYLQGPIWAKIPHTDGHFHPSPLMGGFGLKHPPPQILIKNTPVPANPSTTFSAAKFASFITQYSTGQVSVEIEWELQKENSKRWNPEIQYTSNYNKSVNVDFTVDTNGVYSEPRPIGTRYLTRNL

SEQ ID NO: 2673 - protein, 735 aa, synthetic construct
  REGION 1..735: note = source = /note="Description of Artificial Sequence: Synthetic polypeptide"
MAADGYLPDWLEDTLSEGIRQWWKLKPGPPPPKPAERHKDDSRGLVLPGYKYLGPFNGLDKGEPVNEADAAALEHDKAYDRQLDSGDNPYLKYNHADAEFQERLKEDTSFGGNLGRAVFQAKKRVLEPLGLVEEPVKTAPGKKRPVEHSPVEPDSSSGTGKAGQQPARKRLNFGQTGDADSVPDPQPLGQPPAAPSGLGTNTMATGSGAPMADNNEGADGVGNSSGNWHCDSTWMGDRVITTSTRTWALPTYNNHLYKQISSQSGASNDNHYFGYSTPWGYFDFNRFHCHFSPRDWQRLINNNWGFRPKRLSFKLFNIQVKEVTQNDGTTTIANNLTSTVQVFTDSEYQLPYVLGSAHQGCLPPFPADVFMVPQYGYLTLNNGSQAVGRSSFYCLEYFPSQMLRTGNNFTFSYTFEDVPFHSSYAHSQSLDRLMNPLIDQYLYYLSKTNAPSGTTTMSRLQFSQAGASDIRDQSRNWLPGPCYRQQRVSKTAADNNNSDYSWTGATKYHLNGRDSLVNPGPAMASHKDDEEKYFPQSGVLIFGKQGSNKTNVDIEKVMITDEEEIRTTNPVATEQYGSVSTNLQSGNTQAATSDVNTQGVLPDMVWQDRDVYLQGPIWAKIPHTDGHFHPSPLMGGFGLKHPPPQILIKNTPVPANPSTTFSAAKFASFITQYSTGQVSVEIEWELQKENSKRWNPEIQYTSNYNKSVNVDFTVDTNGVYSEPRPIGTRYLTRNL

SEQ ID NO: 2674 - protein, 735 aa, synthetic construct
  REGION 1..735: note = source = /note="Description of Artificial Sequence: Synthetic polypeptide"
MAADGYLPDWLEDTLSEGIRQWWKLKPGPPPPKPAERHKDDSRGLVLPGYKYLGPFNGLDKGEPVNEADAAALEHDKAYDRQLDSGDNPYLKYNHADAEFQERLKEDTSFGDNLGRAVFQAKKRVLEPLGLVEEPVKTAPGKKRPVEHSPVEPDSSSGTGKAGQQPARKRLNFGQTGDADSVPDPQPLGQPPAAPSGLGTNTMATGSGAPMADNNEGADGVGNSSGNWHCDSTWMGDRVITTSTRTWALPTYNNHLYKQISSQSGASNDNHYFGYSTPWGYFDFNRFHCHFSPRDWQRLINNNWGFRPKRLSFKLFNIQVKEVTQNDGTTTIANNLTSTVQVFTDSEYQLPYVLGSAHQGCLPPFPADVFMVPQYGYLTLNNGSQAVGRSSFYCLEYFPSQMLRTGNNFTFSYTFEDVPFHSSYAHSQSLDRLMNPLIDQYLYYLSKTNAPSGTTTMSRLQFSQAGASDIRDQSRNWLPGPCYRQQRVSKTAADNNNSDYSWTGATKYHLNGRDSLVNPGPAMASHKDDEEKYFPQSGVLIFGKQGSNKTNVDIEKVMITDEEEIRTTNPVATEQYGSVSTNLQSGNTQAATSDVNTQGVLPGMVWQDRDVYLQGPIWAKIPHTDGHFHPSPLMGGFGLKHPPPQILIKNTPVPANPSTTFSAAKFASFITQYSTGQVSVEIEWELQKENSKRWNPEIQYTSNYNKSVNVDFTVDTNGVYSEPRPIGTRYLTRNL

SEQ ID NO: 2675 - protein, 735 aa, synthetic construct
  REGION 1..735: note = source = /note="Description of Artificial Sequence: Synthetic polypeptide"
MAADGYLPDWLEDTLSEGIRQWWKLKPGPPPPKPAERHKDDSRGLVLPGYKYLGPFNGLDKGEPVNEADAAALEHDKAYDRQLDSGDNPYLKYNHADAEFQERLKEDTSFGGNLGRAVFQAKKRVLEPLGLVEEPVKTAPGKKRPVEHSPVEPDSSSGTGKAGQQPARKRLNFGQTGDADSVPDPQPLGQPPAAPSGLGTNTMATGSGAPMADNNEGADGVGNSSGNWHCDSTWMGDRVITTSTRTWALPTYNNHLYKQISSQSGASNDNHYFGYSTPWGYFDFNRFHCHFSPRDWQRLINNNWGFRPKRLSFKLFNIQVKEVTQNDGTTTIANNLTSTVQVFTDSEYQLPYVLDSAHQGCLPPFPADVFMVPQYGYLTLNNGSQAVGRSSFYCLEYFPSQMLRTGNNFTFSYTFEDVPFHSSYAHSQSLDRLMNPLIDQYLYYLSKTNAPSGTTTMSRLQFSQAGASDIRDQSRNWLPGPCYRQQRVSKTAADNNNSDYSWTGATKYHLNGRDSLVNPGPAMASHKDDEEKYFPQSGVLIFGKQGSNKTNVDIEKVMITDEEEIRTTNPVATEQYGSVSTNLQSGNTQAATSDVNTQGVLPGMVWQDRDVYLQGPIWAKIPHTDGHFHPSPLMGGFGLKHPPPQILIKNTPVPANPSTTFSAAKFASFITQYSTGQVSVEIEWELQKENSKRWNPEIQYTSNYNKSVNVDFTVDTNGVYSEPRPIGTRYLTRNL

SEQ ID NO: 2676 - protein, 735 aa, synthetic construct
  REGION 1..735: note = source = /note="Description of Artificial Sequence: Synthetic polypeptide"
MAADGYLPDWLEDTLSEGIRQWWKLKPGPPPPKPAERHKDDSRGLVLPGYKYLGPFNGLDKGEPVNEADAAALEHDKAYDRQLDSGDNPYLKYNHADAEFQERLKEDTSFGGNLGRAVFQAKKRVLEPLGLVEEPVKTAPGKKRPVEHSPVEPDSSSGTGKAGQQPARKRLNFGQTGDADSVPDPQPLGQPPAAPSGLGTNTMATGSGAPMADNNEGADGVGNSSGNWHCDSTWMGDRVITTSTRTWALPTYNNHLYKQISSQSGASNDNHYFGYSTPWGYFDFNRFHCHFSPRDWQRLINNNWGFRPKRLSFKLFNIQVKEVTQNDGTTTIANNLTSTVQVFTDSEYQLPYVLGSAHQGCLPPFPADVFMVPQYGYLTLNNGSQAVGRSSFYCLEYFPSQMLRTGNNFTFSYTFEDVPFHSSYAHSQSLDRLMNPLIDQYLYYLSKTNAPSGTTTMSRLQFSQAGASDIRDQSRNWLPGPCYRQQRVSKTAADNNNSDYSWTGATKYHLNGRDSLVNPGPAMASHKDDEEKYFPQSGVLIFGKQGSNKTNVDIEKVMITDEEEIRTTNPVATEQYGSVSTNLQSGNTQAATSDVNTQGVLPGMVWQDRDVYLQGPIWAKIPHTDGHFHPSPLMGGFGLKHPPPQILIKNTPVPANPSTTFSATKFASFITQYSTGQVSVEIEWELQKENSKRWNPEIQYTSNYNKSVNVDFTVDTNGVYSEPRPIGTRYLTRNL

SEQ ID NO: 2677 - protein, 735 aa, synthetic construct
  REGION 1..735: note = source = /note="Description of Artificial Sequence: Synthetic polypeptide"
MAADGYLPDWLEDTLSEGIRQWWKLKPGPPPPKPAERHKDDSRGLVLPGYKYLGPFNGLDKGESVNEADAAALEHDKAYDRQLDSGDNPYLKYNHADAEFQERLKEDTSFGGNLGRAVFQAKKRVLEPLGLVEEPVKTAPGKKRPVEHSPVEPDSSSGTGKAGQQPARKRLNFGQTGDADSVPDPQPLGQPPAAPSGLGTNTMATGSGAPMADNNEGADGVGNSSGNWHCDSTWMGDRVITTSTRTWALPTYNNHLYKQISSQSGASNDNHYFGYSTPWGYFDFNRFHCHFSPRDWQRLINNNWGFRPKRLSFKLFNIQVKEVTQNDGTTTIANNLTSTVQVFTDSEYQLPYVLGSAHQGCLPPFPADVFMVPQYGYLTLNNGSQAVGRSSFYCLEYFPSQMLRTGNNFTFSYTFEDVPFHSSYAHSQSLDRLMNPLIDQYLYYLSKTNAPSGTTTMSRLQFSQAGASDIRDQSRNWLPGPCYRQQRVSKTAADNNNSDYSWTGATKYHLNGRDSLVNPGPAMASHKDDEEKYFPQSGVLIFGKQGSNKTNVDIEKVMITDEEEIRTTNPVATEQYGSVSTNLQSGNTQAATSDVNTQGVLPGMVWQDRDVYLQGPIWAKIPHTDGHFHPSPLMGGFGLKHPPPQILIKNTPVPANPSTTFSAAKFASFITQYSTGQVSVEIEWELQKENSKRWNPEIQYTSNYNKSVNVDFTVDTNGVYSEPRPIGTRYLTRNL

SEQ ID NO: 2678 - protein, 735 aa, synthetic construct
  REGION 1..735: note = source = /note="Description of Artificial Sequence: Synthetic polypeptide"
MAADGYLPDWLEDTLSEGIRQWWKLKPGPPPPKPAERHKDDSRGLVLPGYKYLGPFNGLDKGEPVNEADAAALEHDKAYDRQLDSGDNPYLKYNHADAEFQERLKEDTSFGGNLGRAVFQAKKRVLEPLGLVEEPVKTAPGKKRPVEHSPVEPDSSSGTGKAGQQPARKRLNFGQTGDADSVPDPQPLGQPPAAPSGLGTNTMATGSGAPMADNNEGADGVGNSSGNWHCDSTWMGDRVITTSTRTWALPTYNNHLYKQISSQSGASNDNHYFGYSTPWGYFDFNRFHCHFSPRDWQRLINNNWGFRPKRLSFKLFNIQVKEVTQNDGTTTIANNLTSTVQVFTDSEYQLPYVLGSVHQGCLPPFPADVFMVPQYGYLTLNNGSQAVGRSSFYCLEYFPSQMLRTGNNFTFSYTFEDVPFHSSYAHSQSLDRLMNPLIDQYLYYLSKTNAPSGTTTMSRLQFSQAGASDIRDQSRNWLPGPCYRQQRVSKTAADNNNSDYSWTGATKYHLNGRDSLVNPGPAMASHKDDEEKYFPQSGVLIFGKQGSNKTNVDIEKVMITDEEEIRTTNPVATEQYGSVSTNLQSGNTQAATSDVNTQGVLPGMVWQDRDVYLQGPIWAKIPHTDGHFHPSPLMGGFGLKHPPPQILIKNTPVPANPSTTFSAAKFASFITQYSTGQVSVEIEWELQKENSKRWNPEIQYTSNYNKSVNVDFTVDTNGVYSEPRPIGTRYLTRNL

SEQ ID NO: 2679 - protein, 735 aa, synthetic construct
  REGION 1..735: note = source = /note="Description of Artificial Sequence: Synthetic polypeptide"
MAADGYLPDWLEDTLSEGIRQWWKLKPGPPPPKPAERHKDDSRGLVLPGYKYLGPFNGLDKGEPVNEADAAALEHDKAYDRQLDSGDNPYLKYNHADAEFQERLKEDTSFGGNLGRAVFQAKKRVLEPLGLVEEPVKTAPGKKRPVEHSPVESDSSSGTGKAGQQPARKRLNFGQTGDADSVPDPQPLGQPPAAPSGLGTNTMATGSGAPMADNNEGADGVGNSSGNWHCDSTWMGDRVITTSTRTWALPTYNNHLYKQISSQSGASNDNHYFGYSTPWGYFDFNRFHCHFSPRDWQRLINNNWGFRPKRLSFKLFNIQVKEVTQNDGTTTIANNLTSTVQVFTDSEYQLPYVLGSAHQGCLPPFPADVFMVPQYGYLTLNNGSQAVGRSSFYCLEYFPSQMLRTGNNFTFSYTFEDVPFHSSYAHSQSLDRLMNPLIDQYLYYLSKTNAPSGTTTMSRLQFSQAGASDIRDQSRNWLPGPCYRQQRVSKTAADNNNSDYSWTGATKYHLNGRDSLVNPGPAMASHKDDEEKYFPQSGVLIFGKQGSNKTNVDIEKVMITDEEEIRTTNPVATEQYGSVSTNLQSGNTQAATSDVNTQGVLPGMVWQDRDVYLQGPIWAKIPHTDGHFHPSPLMGGFGLKHPPPQILIKNTPVPANPSTTFSAAKFASFITQYSTGQVSVEIEWELQKENSKRWNPEIQYTSNYNKSVNVDFTVDTNGVYSEPRPIGTRYLTRNL

SEQ ID NO: 2680 - protein, 735 aa, synthetic construct
  REGION 1..735: note = source = /note="Description of Artificial Sequence: Synthetic polypeptide"
MAADGYLPDWLEDTLSEGIRQWWKLKPGPPPPKPAERHKDDSRGLVLPGYKYLGPFNGLDKGEPVNEADAAALEHDKAYDRQLDSGDNPYLKYNHADAEFQERLKEDTSFGGNLGRAVFQAKKRVLEPLGLVEEPVKTAPGKKRPVEHSPVEPDSSSGTGKAGQQPARKRLNFGQTGDADSVPDPQPLGQPPAAPSGLGTNTMATGSGAPMADNNEGADGVGNSSGNWHCDSTWMGDRVITTSTRTWALPTYNNHLYKQISSQSGASNDNHYFGYSTPWGYFDFNRFHCHFSPRDWQRLINNNWGFRPKRLSFKLFNIQVKEVTQNDGTTTIANNLTSTVQVFTDSEYQLPYVLGSAHQGCLPPFPADVFMVPQYGYLTLNNGSQAVGRSSFYCLEYFPSQMLRTGNNFTFSYTFEDVPFHSSYAHSQSMDRLMNPLIDQYLYYLSKTNAPSGTTTMSRLQFSQAGASDIRDQSRNWLPGPCYRQQRVSKTAADNNNSDYSWTGATKYHLNGRDSLVNPGPAMASHKDDEEKYFPQSGVLIFGKQGSNKTNVDIEKVMITDEEEIRTTNPVATEQYGSVSTNLQSGNTQAATSDVNTQGVLPGMVWQDRDVYLQGPIWAKIPHTDGHFHPSPLMGGFGLKHPPPQILIKNTPVPANPSTTFSAAKFASFITQYSTGQVSVEIEWELQKENSKRWNPEIQYTSNYNKSVNVDFTVDTNGVYSEPRPIGTRYLTRNL

SEQ ID NO: 2681 - protein, 735 aa, synthetic construct
  REGION 1..735: note = source = /note="Description of Artificial Sequence: Synthetic polypeptide"
MAADGYLPDWLEDTLSEGIRQWWKLKPGPPPPKPAERHKDDSRGLVLPGYKYLGPFNGLDKGEPVNEADAAALEHDKAYDRQLDSGDNPYLKYNHADAEFQERLKEDTSFGGNLGRAVFQAKKRVLEPLGLVEEPVKTAPGKKRPVEHSPVEPDSSSGTGKAGQQPARKRLNFGQTGDADSVPDPQPLGQPPAAPSGLGTNTMATGSGAPMADNNEGADGVGNSSGNWHCDSTWMGDRVITTSTRTWALPTYNNHLYKQISSQSGASNDNHYFGYSTPWGYFDFNRFHCHFSPRDWQRLINNNWGFRPKRLSFKLFNIQVKEVTQNDGTTTIANNLTSTVQVFTDSEYQLPYVLGSAHQGCLPPFPADVFMVPQYGYLTLNNGSQAVGRSSFYCLEYFPSQMLRTGNNFTFSYTFEDVPFHSSYAHSQSLDRLMNPLIDQYLYYLSKTNAPSGTTTMSRLQFSQAGASDIRDQSRNWLPGPCYRQQRVSKTAADNNNSDYSWTGATKYHLNGRDSLVNPGPAMASHKDDEEKYFPQSGVLIFRKQGSNKTNVDIEKVMITDEEEIRTTNPVATEQYGSVSTNLQSGNTQAATSDVNTQGVLPGMVWQDRDVYLQGPIWAKIPHTDGHFHPSPLMGGFGLKHPPPQILIKNTPVPANPSTTFSAAKFASFITQYSTGQVSVEIEWELQKENSKRWNPEIQYTSNYNKSVNVDFTVDTNGVYSEPRPIGTRYLTRNL

SEQ ID NO: 2682 - protein, 735 aa, synthetic construct
  REGION 1..735: note = source = /note="Description of Artificial Sequence: Synthetic polypeptide"
MAADGYLPDWLEDTLSEGIRQWWKLKPGPPPPKPAERHKDDSRGLVLPGYKYLGPFNGLDKGEPVNEADTAALEHDKAYDRQLDSGDNPYLKYNHADAEFQERLKEDTSFGGNLGRAVFQAKKRVLEPLGLVEEPVKTAPGKKRPVEHSPVEPDSSSGTGKAGQQPARKRLNFGQTGDADSVPDPQPLGQPPAAPSGLGTNTMATGSGAPMADNNEGADGVGNSSGNWHCDSTWMGDRVITTSTRTWALPTYNNHLYKQISSQSGASNDNHYFGYSTPWGYFDFNRFHCHFSPRDWQRLINNNWGFRPKRLSFKLFNIQVKEVTQNDGTTTIANNLTSTVQVFTDSEYQLPYVLGSAHQGCLPPFPADVFMVPQYGYLTLNNGSQAVGRSSFYCLEYFPSQMLRTGNNFTFSYTFEDVPFHSSYAHSQSLDRLMNPLIDQYLYYLSKTNAPSGTTTMSRLQFSQAGASDIRDQSRNWLPGPCYRQQRVSKTAADNNNSDYSWTGATKYHLNGRDSLVNPGPAMASHKDDEEKYFPQSGVLIFGKQGSNKTNVDIEKVMITDEEEIRTTNPVATEQYGSVSTNLQSGNTQAATSDVNTQGVLPGMVWQDRDVYLQGPIWAKIPHTDGHFHPSPLMGGFGLKHPPPQILIKNTPVPANPSTTFSAAKFASFITQYSTGQVSVEIEWELQKENSKRWNPEIQYTSNYNKSVNVDFTVDTNGVYSEPRPIGTRYLTRNL

SEQ ID NO: 2683 - protein, 735 aa, synthetic construct
  REGION 1..735: note = source = /note="Description of Artificial Sequence: Synthetic polypeptide"
MAADGYLPDWLEDTLSEGIRQWWKLKPGPPPPKPAERHKDDSRGLVLPGYKYLGPFNGLDKGEPVNEADAAALEHDKAYDRQLDSGDNPYLKYNHADAEFQERLKEDTSFGGNLGRAVFQAKKRVLEPLGLVEEPVKTAPGKKRPVEHSPVEPDSSSGTGKAGQQPARKRLNFGQTGDADSVPDPQPLGQPPAAPSGLGTNTMATGSGTPMADNNEGADGVGNSSGNWHCDSTWMGDRVITTSTRTWALPTYNNHLYKQISSQSGASNDNHYFGYSTPWGYFDFNRFHCHFSPRDWQRLINNNWGFRPKRLSFKLFNIQVKEVTQNDGTTTIANNLTSTVQVFTDSEYQLPYVLGSAHQGCLPPFPADVFMVPQYGYLTLNNGSQAVGRSSFYCLEYFPSQMLRTGNNFTFSYTFEDVPFHSSYAHSQSLDRLMNPLIDQYLYYLSKTNAPSGTTTMSRLQFSQAGASDIRDQSRNWLPGPCYRQQRVSKTAADNNNSDYSWTGATKYHLNGRDSLVNPGPAMASHKDDEEKYFPQSGVLIFGKQGSNKTNVDIEKVMITDEEEIRTTNPVATEQYGSVSTNLQSGNTQAATSDVNTQGVLPGMVWQDRDVYLQGPIWAKIPHTDGHFHPSPLMGGFGLKHPPPQILIKNTPVPANPSTTFSAAKFASFITQYSTGQVSVEIEWELQKENSKRWNPEIQYTSNYNKSVNVDFTVDTNGVYSEPRPIGTRYLTRNL

SEQ ID NO: 2684 - protein, 735 aa, synthetic construct
  REGION 1..735: note = source = /note="Description of Artificial Sequence: Synthetic polypeptide"
MAADGYLPDWLEDTLSEGIRQWWKLKPGPPPPKPAERHKDDSRGLVLPGYKYLGPFNGLDKGEPVNEADAAALEHDKAYDRQLDSGDNPYLKYNHADAEFQERLKEDTSFGGNLGRAVFQAKKRVLEPLGLVEEPVKTAPGKKRPVEHSPVEPDSSSGTGKAGQQPARKRLNFGQTGDADSVPDPQPLGQPPAAPSGLGTNTMATGSGAPMADNNEGADGVGNSSGNWHCDSTWMGDRVITTSTRTWALSTYNNHLYKQISSQSGASNDNHYFGYSTPWGYFDFNRFHCHFSPRDWQRLINNNWGFRPKRLSFKLFNIQVKEVTQNDGTTTIANNLTSTVQVFTDSEYQLPYVLGSAHQGCLPPFPADVFMVPQYGYLTLNNGSQAVGRSSFYCLEYFPSQMLRTGNNFTFSYTFEDVPFHSSYAHSQSLDRLMNPLIDQYLYYLSKTNAPSGTTTMSRLQFSQAGASDIRDQSRNWLPGPCYRQQRVSKTAADNNNSDYSWTGATKYHLNGRDSLVNPGPAMASHKDDEEKYFPQSGVLIFGKQGSNKTNVDIEKVMITDEEEIRTTNPVATEQYGSVSTNLQSGNTQAATSDVNTQGVLPGMVWQDRDVYLQGPIWAKIPHTDGHFHPSPLMGGFGLKHPPPQILIKNTPVPANPSTTFSAAKFASFITQYSTGQVSVEIEWELQKENSKRWNPEIQYTSNYNKSVNVDFTVDTNGVYSEPRPIGTRYLTRNL

SEQ ID NO: 2685 - protein, 735 aa, synthetic construct
  REGION 1..735: note = source = /note="Description of Artificial Sequence: Synthetic polypeptide"
MAADGYLPDWLEDTLSEGIRQWWKLKPGPPPPKPAERHKDDSRGLVLPGYKYLGPFNGLDKGEPVNEADAAALEHDKAYDRQLDSGDNPYLKYNHADAEFQERLKEDTSFGGNLGRAVFQAKKRVLEPLGLVEEPVKTAPGKKRPVEHSPVEPDSSSGTGKAGQQPARKRLNFGQTGDADSVPDPQPLGQPPAAPSGLGTNTMATGSGAPMADNNEGADGVGNSSGNWHCDSTWMGDRVITTSTRTWALPTYNNHLYKQISSQSGASNDNHYFGYSTPWGYFDFNRFHCHFSPRDWQRLINNNWGFRPKRLSFKLFNIQVKEVTQNDGTTTIANNLTSTVQVFTDSEYQLPYVLGSAHQGCLPPFPADVFMVPQYGYLTLNNGSQAVGRSSFYCLEYFPSQMLRTGNNFTFSYTFEDVPFHSSYAHSQSLDRLMNPLIDQYLYYLSKTNAPSGTTTMSRLQFSQAGASDIRDQSRNWLPGPCYRQQRVSKTAVDNNNSDYSWTGATKYHLNGRDSLVNPGPAMASHKDDEEKYFPQSGVLIFGKQGSNKTNVDIEKVMITDEEEIRTTNPVATEQYGSVSTNLQSGNTQAATSDVNTQGVLPGMVWQDRDVYLQGPIWAKIPHTDGHFHPSPLMGGFGLKHPPPQILIKNTPVPANPSTTFSAAKFASFITQYSTGQVSVEIEWELQKENSKRWNPEIQYTSNYNKSVNVDFTVDTNGVYSEPRPIGTRYLTRNL

SEQ ID NO: 2686 - protein, 735 aa, synthetic construct
  REGION 1..735: note = source = /note="Description of Artificial Sequence: Synthetic polypeptide"
MAADGYLPDWLEDTLSEGIRQWWKLKPGPPPPKPAERHKDDSRGLVLPGYKYLGPFNGLDKGEPVNEADAAALEHDKAYDRQLDSGDNPYLKYNHADAEFQERLKEDTSFGGNLGRAVFQAKKRVLEPLGLVEEPVKTAPGKKRPVEHSPVEPDSSSGTGKAGQQPARKRLNFGQTGDADSVPDPQPLGQPPAAPSGLGTNTMATGSGAPMADNNEGADGVGNSSGNWHCDSTWMGDRVITTSTRTWALPTYNNHLYKQISSQSGASNDNHYFGYSTPWGYFDFNRFHCHFSPRDWQRLINNNWGFRPKRLSFKLFNIQVKEVTQNDGTTTIANNLTSTVQVFTDSEYQLPYVLGSAHQGCLPPFPADVFMVPQYGYLTLNNGSQAVGRSSFYCLEYFPSQILRTGNNFTFSYTFEDVPFHSSYAHSQSLDRLMNPLIDQYLYYLSKTNAPSGTTTMSRLQFSQAGASDIRDQSRNWLPGPCYRQQRVSKTAADNNNSDYSWTGATKYHLNGRDSLVNPGPAMASHKDDEEKYFPQSGVLIFGKQGSNKTNVDIEKVMITDEEEIRTTNPVATEQYGSVSTNLQSGNTQAATSDVNTQGVLPGMVWQDRDVYLQGPIWAKIPHTDGHFHPSPLMGGFGLKHPPPQILIKNTPVPANPSTTFSAAKFASFITQYSTGQVSVEIEWELQKENSKRWNPEIQYTSNYNKSVNVDFTVDTNGVYSEPRPIGTRYLTRNL

SEQ ID NO: 2687 - protein, 735 aa, synthetic construct
  REGION 1..735: note = source = /note="Description of Artificial Sequence: Synthetic polypeptide"
MAADGYLPDWLEDTLSEGIRQWWKLKPGPPPPKPAERHKDDSRGLVLPGYKYLGPFNGLDKGEPVNEADAAALEHDKAYDRQLDSGDNPYLKYNHADAEFQERLKEDTSFGGNLGRAVFQAKKRVLEPLGLVEEPVKTAPGKKRPVEHSPVEPDSSSGTGKVGQQPARKRLNFGQTGDADSVPDPQPLGQPPAAPSGLGTNTMATGSGAPMADNNEGADGVGNSSGNWHCDSTWMGDRVITTSTRTWALPTYNNHLYKQISSQSGASNDNHYFGYSTPWGYFDFNRFHCHFSPRDWQRLINNNWGFRPKRLSFKLFNIQVKEVTQNDGTTTIANNLTSTVQVFTDSEYQLPYVLGSAHQGCLPPFPADVFMVPQYGYLTLNNGSQAVGRSSFYCLEYFPSQMLRTGNNFTFSYTFEDVPFHSSYAHSQSLDRLMNPLIDQYLYYLSKTNAPSGTTTMSRLQFSQAGASDIRDQSRNWLPGPCYRQQRVSKTAADNNNSDYSWTGATKYHLNGRDSLVNPGPAMASHKDDEEKYFPQSGVLIFGKQGSNKTNVDIEKVMITDEEEIRTTNPVATEQYGSVSTNLQSGNTQAATSDVNTQGVLPGMVWQDRDVYLQGPIWAKIPHTDGHFHPSPLMGGFGLKHPPPQILIKNTPVPANPSTTFSAAKFASFITQYSTGQVSVEIEWELQKENSKRWNPEIQYTSNYNKSVNVDFTVDTNGVYSEPRPIGTRYLTRNL

SEQ ID NO: 2688 - protein, 735 aa, synthetic construct
  REGION 1..735: note = source = /note="Description of Artificial Sequence: Synthetic polypeptide"
MAADGYLPDWLEDTLSEGIRQWWKLKPGPPPPKPAERHKDDSRGLVLPGYKYLGPFNGLDKGEPVNEADAAALEHDKAYDRQLDSGDNPYLKYNHADAEFQERLKEDTSFGGNLGRAVFQAKKRVLEPLGLVEEPVKTAPGKKRPVEHSPVEPDSSSGTGKAGQQPARKRLNFGQTGDADSVPDPQPLGQPPAAPSGLGTNTMAAGSGAPMADNNEGADGVGNSSGNWHCDSTWMGDRVITTSTRTWALPTYNNHLYKQISSQSGASNDNHYFGYSTPWGYFDFNRFHCHFSPRDWQRLINNNWGFRPKRLSFKLFNIQVKEVTQNDGTTTIANNLTSTVQVFTDSEYQLPYVLGSAHQGCLPPFPADVFMVPQYGYLTLNNGSQAVGRSSFYCLEYFPSQMLRTGNNFTFSYTFEDVPFHSSYAHSQSLDRLMNPLIDQYLYYLSKTNAPSGTTTMSRLQFSQAGASDIRDQSRNWLPGPCYRQQRVSKTAADNNNSDYSWTGATKYHLNGRDSLVNPGPAMASHKDDEEKYFPQSGVLIFGKQGSNKTNVDIEKVMITDEEEIRTTNPVATEQYGSVSTNLQSGNTQAATSDVNTQGVLPGMVWQDRDVYLQGPIWAKIPHTDGHFHPSPLMGGFGLKHPPPQILIKNTPVPANPSTTFSAAKFASFITQYSTGQVSVEIEWELQKENSKRWNPEIQYTSNYNKSVNVDFTVDTNGVYSEPRPIGTRYLTRNL

SEQ ID NO: 2689 - protein, 735 aa, synthetic construct
  REGION 1..735: note = source = /note="Description of Artificial Sequence: Synthetic polypeptide"
MAADGYLPDWLEDTLSEGIRQWWKLKPGPPPPKPAERHKDDSRGLVLPGYKYLGPFNGLDKGEPVNEADAAALEHDKAYDRQLDSGDNPYLKYNHADAEFQERLKEDTSFGGNLGRAVFQAKKRVLEPLGLVEEPVKTAPGKKRPVEHSPVEPDSSSGTGKAGQQPARKRLNFGQTGDADSVPDPQPLGQPPAAPSGLGTNTMATGSGAPMADNNEGADGVGNSSGNWHCDSTWMGDRVITTSTRTWALPTYNNHLYKQISSQSGASNDNHYFGYSTPWGYFDFNRFHCHFSPRDWQRLINNNWGFRPKRLSFKLFNIQVKEVTQNDGTTTIANNLTSTVQVFTDSEYQLPYVLGSAHQGCLPPFPADVFMVPQYGYLTLNNGSQAVGRSSFYCLEYFPSQMLRTGNNFTFSYTFEDVPFHSSYAHSQSLDRLMNPLIDQYLYYLSKTNAPSGTTTMSRLQFSQAGASDIRDQSRNWLPGPCYRQQRVSKTAADNNNSDYSWTGATKYHLNGRDSLVNPGPAMASHKDDEEKYFPQSGVLIFGKQGSNKTNVDIEKVMITDEEEIRTTNPVATEQYGSVSTNLQSDNTQAATSDVNTQGVLPGMVWQDRDVYLQGPIWAKIPHTDGHFHPSPLMGGFGLKHPPPQILIKNTPVPANPSTTFSAAKFASFITQYSTGQVSVEIEWELQKENSKRWNPEIQYTSNYNKSVNVDFTVDTNGVYSEPRPIGTRYLTRNL

SEQ ID NO: 2690 - protein, 735 aa, synthetic construct
  REGION 1..735: note = source = /note="Description of Artificial Sequence: Synthetic polypeptide"
MAADGYLPDWLEDTLSEGIRQWWKLKPGPPPPKPAERHKDDSRGLVLPGYKYLGPFNGLDKGEPVNEADAAALEHDKAYDRQLDSGDNPYLKYNHADAEFQERLKEDTSFGGNLGRAVFQAKKRVLEPLGLVEEPVKTAPGKKRPVEHSPVEPDSSSGTGKAGQQPARKRLNFGQTGDADSVPDPQPLGQPPAAPSGLGTNTMATGSGAPMADNNEGADGVGNSSGNWHCDSTWMGDRVITTSTRTWALPTYNNHLYKQISSQSGASNDNHYFGYSTPWGYFDFNRFHCHFSPRDWQRLINNNWGFRPKRLSFKLFNIQVKEVTQNDGTTTIANNLTSTVQVFTDSEYQLPYVLGSAHQGCLPPFPADVFMVPQYGYLTLNNGSQAVGRSSFYCLEYFPSQMLRTGNNFTFSYTFEDVPFHSSYAHSQSLDRLMNPLIDQYLYYLSKTNAPSGTTTMSRLQFSQAGASDIRDQSRNWLPGPCYRQQRVSKTAADNNNSDYSWTGATKYHLNGRDSLVNPGPAMASHKDDEEKYFPQSGVLIFGKQGSNKTNVDIEKVMITDEEEIRTTNPVATEQYGSVSTNLQSGNTQAATSDVNTQGVLPGMVWQDRDVYLQGPIWAKIPHTDGHFHPSPLMGGFGLKHPPPQILIKNTPVPANPSTTFSAAKFASFITQYSTGQVSVEIEWELQKENSKRWNPEIQYTSNYNKSVNVDFTVDTNGVYSEPRPIGTRYLTRNL

SEQ ID NO: 2691 - protein, 735 aa, synthetic construct
  REGION 1..735: note = source = /note="Description of Artificial Sequence: Synthetic polypeptide"
MAADGYLPDWLEDTLSEGIRQWWKLKPGPPPPKPAERHKDDSRGLVLPGYKYLGPFNGLDKGEPVNEADAAALEHDKAYDRQLDSGDNPYLKYNHADAEFQERLKEDTSFGGNLGRAVFQAKKRVLEPLGLVEEPVKTAPGKKRPVEHSPVEPDSSSGTGKAGQQPARKRLNFGQTGDADSVPDPQPLGQPPAAPSGLGTNTMATGSGAPMADNNEGADGVGNSSGNWHCDSTWMGDRVITTSTRTWALPTYNNHLYKQISSQSGASNDNHYFGYSTPWGYFDFNRFHCHFSPRDWQRLINNNWGFRPKRLSFKLFNIQVKEVTQNDGTTTIANNLTSTVQVFTDSEYQLPYVLGSAHQGCLPPFPADVFMVPQYGYLTLNNGSQAVGRSSFYCLEYFPSQMLRTGNNFTFSYTFEDVPFHSSYAHSQSLDRLMNPLIDQYLYYLSKTNAPSGTTTMSRLQFSQAGASDIRDQSRNWLPGPCYRQQRVSKTAADNNNSDYSWTGATKYHLNGRDSLVNPGPAMASHKDDEEKYFPQSGVLIFGKQGSNKTNVDIEKVMITDEEEIRTTNPVATEQYGSVSTNLQSGNTQAATSDVNTQGVLPGMVWQDRDVYLQGPIWAKIPHTDGHFHPSPLMGGFGLKHPPPQILIKNTPVPANPSTTFSAAKFASFITQYSTGQVSVEIEWELQKENSKRWNPEIQYTSNYNKSVNVDFTVDTNGVYSEPRPIDTRYLTRNL

SEQ ID NO: 2692 - protein, 735 aa, synthetic construct
  REGION 1..735: note = source = /note="Description of Artificial Sequence: Synthetic polypeptide"
MAADGYLPDWLEDTLSEGIRQWWKLKPGPPPPKPAERHKDDSRGLVLPGYKYLGPFNGLDKGEPVNEADAAALEHDKAYDRQLDSGDNPYLKYNHADAEFQERLKEDTSFGGNLGRAVFQAKKRVLEPLGLVEEPVKTAPGKKRPVEHSPVEPDSSSGTGKAGQQPARKRLNFGQTGDTDSVPDPQPLGQPPAAPSGLGTNTMATGSGAPMADNNEGADGVGNSSGNWHCDSTWMGDRVITTSTRTWALPTYNNHLYKQISSQSGASNDNHYFGYSTPWGYFDFNRFHCHFSPRDWQRLINNNWGFRPKRLSFKLFNIQVKEVTQNDGTTTIANNLTSTVQVFTDSEYQLPYVLGSAHQGCLPPFPADVFMVPQYGYLTLNNGSQAVGRSSFYCLEYFPSQMLRTGNNFTFSYTFEDVPFHSSYAHSQSLDRLMNPLIDQYLYYLSKTNAPSGTTTMSRLQFSQAGASDIRDQSRNWLPGPCYRQQRVSKTAADNNNSDYSWTGATKYHLNGRDSLVNPGPAMASHKDDEEKYFPQSGVLIFGKQGSNKTNVDIEKVMITDEEEIRTTNPVATEQYGSVSTNLQSGNTQAATSDVNTQGVLPGMVWQDRDVYLQGPIWAKIPHTDGHFHPSPLMGGFGLKHPPPQILIKNTPVPANPSTTFSAAKFASFITQYSTGQVSVEIEWELQKENSKRWNPEIQYTSNYNKSVNVDFTVDTNGVYSEPRPIGTRYLTRNL

SEQ ID NO: 2693 - protein, 735 aa, synthetic construct
  REGION 1..735: note = source = /note="Description of Artificial Sequence: Synthetic polypeptide"
MAADGYLPDWLEDTLSEGIRQWWKLKPGPPPPKPAERHKDDSRGLVLPGYKYLGPFNGLDKGEPVNEADAAALEHDKAYDRQLDSGDNPYLKYNHADAEFQERLKEDTSFGGNLGRAVFQAKKRVLEPLGLVEEPVKTTPGKKRPVEHSPVEPDSSSGTGKAGQQPARKRLNFGQTGDADSVPDPQPLGQPPAAPSGLGTNTMATGSGAPMADNNEGADGVGNSSGNWHCDSTWMGDRVITTSTRTWALPTYNNHLYKQISSQSGASNDNHYFGYSTPWGYFDFNRFHCHFSPRDWQRLINNNWGFRPKRLSFKLFNIQVKEVTQNDGTTTIANNLTSTVQVFTDSEYQLPYVLGSAHQGCLPPFPADVFMVPQYGYLTLNNGSQAVGRSSFYCLEYFPSQMLRTGNNFTFSYTFEDVPFHSSYAHSQSLDRLMNPLIDQYLYYLSKTNAPSGTTTMSRLQFSQAGASDIRDQSRNWLPGPCYRQQRVSKTAADNNNSDYSWTGATKYHLNGRDSLVNPGPAMASHKDDEEKYFPQSGVLIFGKQGSNKTNVDIEKVMITDEEEIRTTNPVATEQYGSVSTNLQSGNTQAATSDVNTQGVLPGMVWQDRDVYLQGPIWAKIPHTDGHFHPSPLMGGFGLKHPPPQILIKNTPVPANPSTTFSAAKFASFITQYSTGQVSVEIEWELQKENSKRWNPEIQYTSNYNKSVNVDFTVDTNGVYSEPRPIGTRYLTRNL

SEQ ID NO: 2694 - protein, 735 aa, synthetic construct
  REGION 1..735: note = source = /note="Description of Artificial Sequence: Synthetic polypeptide"
MAADGYLPDWLEDTLSEGIRQWWKLKPGPPPPKPAERHKDDSRGLVLPGYKYLGPFNGLDKGEPVNEADAAALEHDKAYDRQLDSGDNPYLKYNHADAEFQERLKEDTSFGGNLGRAVFQAKKRVLEPLGLVEEPVKTAPGKKRPVEHSPVEPDSSSGTGKAGQQPARKRLNFGQTGDADSVPDPQPLGQSPAAPSGLGTNTMATGSGAPMADNNEGADGVGNSSGNWHCDSTWMGDRVITTSTRTWALPTYNNHLYKQISSQSGASNDNHYFGYSTPWGYFDFNRFHCHFSPRDWQRLINNNWGFRPKRLSFKLFNIQVKEVTQNDGTTTIANNLTSTVQVFTDSEYQLPYVLGSAHQGCLPPFPADVFMVPQYGYLTLNNGSQAVGRSSFYCLEYFPSQMLRTGNNFTFSYTFEDVPFHSSYAHSQSLDRLMNPLIDQYLYYLSKTNAPSGTTTMSRLQFSQAGASDIRDQSRNWLPGPCYRQQRVSKTAADNNNSDYSWTGATKYHLNGRDSLVNPGPAMASHKDDEEKYFPQSGVLIFGKQGSNKTNVDIEKVMITDEEEIRTTNPVATEQYGSVSTNLQSGNTQAATSDVNTQGVLPGMVWQDRDVYLQGPIWAKIPHTDGHFHPSPLMGGFGLKHPPPQILIKNTPVPANPSTTFSAAKFASFITQYSTGQVSVEIEWELQKENSKRWNPEIQYTSNYNKSVNVDFTVDTNGVYSEPRPIGTRYLTRNL

SEQ ID NO: 2695 - protein, 735 aa, synthetic construct
  REGION 1..735: note = source = /note="Description of Artificial Sequence: Synthetic polypeptide"
MAADGYLPDWLEDTLSEGIRQWWKLKPGPPPPKPAERHKDDSRGLVLPGYKYLGPFNGLDKGEPVNEADAAALEHDKAYDRQLDSGDNPYLKYNHADAEFQERLKEDTSFGGNLGRAVFQAKKRVLEPLGLVEEPVKTAPGKKRPVEHSPVEPDSSSGTGKAGQQPARKRLNFGQTGDADSVPDPQPLGQPPAAPSGLGTNTMATGSGAPMADNNEGADGVGNSSGNWHCDSTWMGDRVITTSTRTWALPTYNNHLYKQISSQSGASNDNHYFGYSTPWGYFDFNRFHCHFSPRDWQRLINNNWGFRPKRLSFKLFNIQVKEVTQNDGTTTIANNLTSTVQVFTDSEYQLPYVLGSAHQGCLPPFPADVFMVPQYGYLTLNNGSQAVGRSSFYCLEYFPSQMLRTGNNFTFSYTFEDVPFHSSYAHSQSLDRLMNPLIDQYLYYLSKTNAPSGTTTMSRLQFSQAGASDIRDQSRNWLPGPCYRQQRVSKTAADNNNSDYSWTGATKYHLNGRDSLVNPGPAMVSHKDDEEKYFPQSGVLIFGKQGSNKTNVDIEKVMITDEEEIRTTNPVATEQYGSVSTNLQSGNTQAATSDVNTQGVLPGMVWQDRDVYLQGPIWAKIPHTDGHFHPSPLMGGFGLKHPPPQILIKNTPVPANPSTTFSAAKFASFITQYSTGQVSVEIEWELQKENSKRWNPEIQYTSNYNKSVNVDFTVDTNGVYSEPRPIGTRYLTRNL

SEQ ID NO: 2696 - protein, 735 aa, synthetic construct
  REGION 1..735: note = source = /note="Description of Artificial Sequence: Synthetic polypeptide"
MAADGYLPDWLEDTLSEGIRQWWKLKPGPPPPKPAERHKDDSRGLVLPGYKYLGPFNGLDKGEPVNEADAAALEHDKAYDRQLDSGDNPYLKYNHADAEFQERLKEDTSFGGNLGRAVFQAKKRVLEPLGLVEEPVKTAPGKKRPVEHSPVEPDSSSGTGKAGQQPARKRLNFGQTGDADSVPDPQPLGQPPAAPSGLGTNTMATGSGAPMADNNEGADGVGNSSGNWHCDSTWMGDRVITTSTRTWALPTYNNHLYKQISSQSGASNDNHYFGYSTPWGYFDFNRFHCHFSPRDWQRLINNNWGFRPKRLSFKLFNIQVKEVTQNDGTTTIANNLTSTVQVFTDSEYQLPYVLGSAHQGCLPPFPADVFMVPQYGYLTLNNGSQAVGRSSFYCLEYFPSQMLRTGNNFTFSYTFEDVPFHSSYAHSQSLDRLMNPLIDQYLYYLSKTNAPSGTTTMSRLQFSQAGASDIRDQSRNWLPGPCYRQQRVSKTAADNNNSDYSWTGATKYHLNGRDSLVNPGPAMASHKDDEEKYFPQSGVLIFGKQGSNKTNVDIEKVMITDEEEIRTTNPVATEQYGSVSTNLQSGNTQAATSDVNTQGVLPGMVWQDRDVYLQGPIWAKIPHTDGHFHPSPLMGGFGLKHPPPQILIKNTPVPANPSTTFSAAKFASFITQYSMGQVSVEIEWELQKENSKRWNPEIQYTSNYNKSVNVDFTVDTNGVYSEPRPIGTRYLTRNL

SEQ ID NO: 2697 - protein, 735 aa, synthetic construct
  REGION 1..735: note = source = /note="Description of Artificial Sequence: Synthetic polypeptide"
MAADGYLPDWLEDTLSEGIRQWWKLKPGPPPPKPAERHKDDSRGLVLPGYKYLGPFNGLDKGEPVNEADAAALEHDKVYDRQLDSGDNPYLKYNHADAEFQERLKEDTSFGGNLGRAVFQAKKRVLEPLGLVEEPVKTAPGKKRPVEHSPVEPDSSSGTGKAGQQPARKRLNFGQTGDADSVPDPQPLGQPPAAPSGLGTNTMATGSGAPMADNNEGADGVGNSSGNWHCDSTWMGDRVITTSTRTWALPTYNNHLYKQISSQSGASNDNHYFGYSTPWGYFDFNRFHCHFSPRDWQRLINNNWGFRPKRLSFKLFNIQVKEVTQNDGTTTIANNLTSTVQVFTDSEYQLPYVLGSAHQGCLPPFPADVFMVPQYGYLTLNNGSQAVGRSSFYCLEYFPSQMLRTGNNFTFSYTFEDVPFHSSYAHSQSLDRLMNPLIDQYLYYLSKTNAPSGTTTMSRLQFSQAGASDIRDQSRNWLPGPCYRQQRVSKTAADNNNSDYSWTGATKYHLNGRDSLVNPGPAMASHKDDEEKYFPQSGVLIFGKQGSNKTNVDIEKVMITDEEEIRTTNPVATEQYGSVSTNLQSGNTQAATSDVNTQGVLPGMVWQDRDVYLQGPIWAKIPHTDGHFHPSPLMGGFGLKHPPPQILIKNTPVPANPSTTFSAAKFASFITQYSTGQVSVEIEWELQKENSKRWNPEIQYTSNYNKSVNVDFTVDTNGVYSEPRPIGTRYLTRNL

SEQ ID NO: 2698 - protein, 735 aa, synthetic construct
  REGION 1..735: note = source = /note="Description of Artificial Sequence: Synthetic polypeptide"
MAADGYLPDWLEDTLSEGIRQWWKLKPGPPPPKPAERHKDDSRGLVLPGYKYLGPFNGLDKGEPVNEADAAALEHDKAYDRQLDSGDNPYLKYNHADAEFQERLKEDTSFGGNLGRAVFQAKKRVLEPLGLVEEPVKTAPGKKRPVEHSPVEPDSSSGTGKAGQQPARKRLNFGQTGDADSVPDPQPLGQPPAAPSGLGTNTMATGSGAPMADNNEGADGVGNSSGNWHCDSTWMGDRVITTSTRTWALPTYNNHLYKQISSQSGASNDNHYFGYSTPWGYFDFNRFHCHFSPRDWQRLINNNWGFRPKRLSFKLFNIQVKEVTQNDGTTTIANNLTSTVQVFTDSEYQLPYVLGSAHQGCLPPFPADVFMVPQYGYLTLNNGSQAVGRSSFYCLEYFPSQMLRTGNNFTFSYTFEDVPFHSSYAHSQSLDRLMNPLIDQYLYYLSKTNAPSGTTTMSRLQFSQAGASDIRDQSRNWLPGPCYRQQRVSKTAADNNNSDYSWTGATKYHLNGRDSLVNPGPAMASHKDDEEKYFPQSGVLIFGKQGSNKTNVDIEKVMITDEEEIRTTNPVATEQYGSVSTNLQSGNTQAATSDVNTQGVLPGMVWQDRDVYLQGPIWAKIPHTDGHFHPSPLMGGFGLKHPPPQILIKNTPVPANPSTTFSAAKFASFITQYSTGQVSVEIEWELQKENNKRWNPEIQYTSNYNKSVNVDFTVDTNGVYSEPRPIGTRYLTRNL

SEQ ID NO: 2699 - protein, 735 aa, synthetic construct
  REGION 1..735: note = source = /note="Description of Artificial Sequence: Synthetic polypeptide"
MAADGYLPDWLEDTLSEGIRQWWKLKPGPPPPKPAERHKDDSRGLVLPGYKYLGPFNGLDKGEPVNEADAAALEHDKAYDRQLDSGDNPYLKYNHADAEFQERLKEDTSFGGNLGRAVFQAKKRVLEPLGLVEEPVKTAPGKKRPVEHSPVEPDSSSGTGKAGQQPTRKRLNFGQTGDADSVPDPQPLGQPPAAPSGLGTNTMATGSGAPMADNNEGADGVGNSSGNWHCDSTWMGDRVITTSTRTWALPTYNNHLYKQISSQSGASNDNHYFGYSTPWGYFDFNRFHCHFSPRDWQRLINNNWGFRPKRLSFKLFNIQVKEVTQNDGTTTIANNLTSTVQVFTDSEYQLPYVLGSAHQGCLPPFPADVFMVPQYGYLTLNNGSQAVGRSSFYCLEYFPSQMLRTGNNFTFSYTFEDVPFHSSYAHSQSLDRLMNPLIDQYLYYLSKTNAPSGTTTMSRLQFSQAGASDIRDQSRNWLPGPCYRQQRVSKTAADNNNSDYSWTGATKYHLNGRDSLVNPGPAMASHKDDEEKYFPQSGVLIFGKQGSNKTNVDIEKVMITDEEEIRTTNPVATEQYGSVSTNLQSGNTQAATSDVNTQGVLPGMVWQDRDVYLQGPIWAKIPHTDGHFHPSPLMGGFGLKHPPPQILIKNTPVPANPSTTFSAAKFASFITQYSTGQVSVEIEWELQKENSKRWNPEIQYTSNYNKSVNVDFTVDTNGVYSEPRPIGTRYLTRNL

SEQ ID NO: 2700 - protein, 735 aa, synthetic construct
  REGION 1..735: note = source = /note="Description of Artificial Sequence: Synthetic polypeptide"
MAADGYLPDWLEDTLSEGIRQWWKLKPGPPPPKPAERHKDDSRGLVLPGYKYLGPFNGLDKGEPVNEADAAALEHDKAYDRQLDSGDNPYLKYNHADAEFQERLKEDTSFGGNLGRAVFQAKKRVLEPLGLVEEPVKTAPGKKRPVEHSPVEPDSSSGTGKAGQQPARKRLNFGQTGDADSVPDPQPLGQPPAAPSGLGTNTMATGSGAPMADNNEGADGVGNSSGNWHCDSTWMGDRVITTSTRTWALPTYNNHLYKQISSQSGASNDNHYFGYSTPWGYFDFNRFHCHFSPRDWQRLINNNWGFRPKRLSFKLFNIQVKEVTQNDGTTTIANNLTSTVQVFTDSEYQLPYVLGSAHQGCLPPFPADVFMVPQYGYLTLNNGSQAVGRSSFYCLEYFPSQMLRTGNNFTFSYTFEDVPFHSSYAHSQSLDRLMNPLIDQYLYYLSKTNAPSGTTTMSRLQFSQAGASDIRDQSRNWLPGPCYRQQRVSKTAADNNNSDYSWTGATKYHLNGRDSLVNPGPAMASHKDDEEKYFPQSGVLIFGKQGSNKTNVDIERVMITDEEEIRTTNPVATEQYGSVSTNLQSGNTQAATSDVNTQGVLPGMVWQDRDVYLQGPIWAKIPHTDGHFHPSPLMGGFGLKHPPPQILIKNTPVPANPSTTFSAAKFASFITQYSTGQVSVEIEWELQKENSKRWNPEIQYTSNYNKSVNVDFTVDTNGVYSEPRPIGTRYLTRNL

SEQ ID NO: 2701 - protein, 735 aa, synthetic construct
  REGION 1..735: note = source = /note="Description of Artificial Sequence: Synthetic polypeptide"
MAADGYLPDWLEDTLSEGIRQWWKLKPGPPPPKPAERHKDDSRGLVLPGYKYLGPFNGLDKGEPVNEADAAALEHDKAYDRQLDSGDNPYLKYNHADAEFQERLKEDTSFGGNLGRAVFQAKKRVLEPLGLVEEPVKTAPGKKRPVEHSPVEPDSSSGTGKAGQQPVRKRLNFGQTGDADSVPDPQPLGQPPAAPSGLGTNTMATGSGAPMADNNEGADGVGNSSGNWHCDSTWMGDRVITTSTRTWALPTYNNHLYKQISSQSGASNDNHYFGYSTPWGYFDFNRFHCHFSPRDWQRLINNNWGFRPKRLSFKLFNIQVKEVTQNDGTTTIANNLTSTVQVFTDSEYQLPYVLGSAHQGCLPPFPADVFMVPQYGYLTLNNGSQAVGRSSFYCLEYFPSQMLRTGNNFTFSYTFEDVPFHSSYAHSQSLDRLMNPLIDQYLYYLSKTNAPSGTTTMSRLQFSQAGASDIRDQSRNWLPGPCYRQQRVSKTAADNNNSDYSWTGATKYHLNGRDSLVNPGPAMASHKDDEEKYFPQSGVLIFGKQGSNKTNVDIEKVMITDEEEIRTTNPVATEQYGSVSTNLQSGNTQAATSDVNTQGVLPGMVWQDRDVYLQGPIWAKIPHTDGHFHPSPLMGGFGLKHPPPQILIKNTPVPANPSTTFSAAKFASFITQYSTGQVSVEIEWELQKENSKRWNPEIQYTSNYNKSVNVDFTVDTNGVYSEPRPIGTRYLTRNL

SEQ ID NO: 2702 - protein, 735 aa, synthetic construct
  REGION 1..735: note = source = /note="Description of Artificial Sequence: Synthetic polypeptide"
MAADGYLPDWLEDTLSEGIRQWWKLKPGPPPPKPAERHKDDSRGLVLPGYKYLGPFNGLDKGEPVNEADAAALEHDKAYDRQLDSGDNPYLKYNHADAEFQERLKEDTSFGGNLGRAVFQAKKRVLEPLGLVEEPVKTAPGKKRPVEHSPVEPDSSSGTGKAGQQPARKRLNFGQTGDADSVPDPQPLGQPPAAPSGLGTNTMATGSGAPMADNNEGADGVGNSSGNWHCDSTWMGDRVITTSTRTWALPTYNNHLYKQISSQSGASNDNHYFGYSTPWGYFDFNRFHCHFSPRDWQRLINNNWGFRPKRLSFKLFNIQVKEVTQNDGTTTIANNLTSTVQVFTDSEYQLPYVLGSAHQGCLPPFPADVFMVPQYGYPTLNNGSQAVGRSSFYCLEYFPSQMLRTGNNFTFSYTFEDVPFHSSYAHSQSLDRLMNPLIDQYLYYLSKTNAPSGTTTMSRLQFSQAGASDIRDQSRNWLPGPCYRQQRVSKTAADNNNSDYSWTGATKYHLNGRDSLVNPGPAMASHKDDEEKYFPQSGVLIFGKQGSNKTNVDIEKVMITDEEEIRTTNPVATEQYGSVSTNLQSGNTQAATSDVNTQGVLPGMVWQDRDVYLQGPIWAKIPHTDGHFHPSPLMGGFGLKHPPPQILIKNTPVPANPSTTFSAAKFASFITQYSTGQVSVEIEWELQKENSKRWNPEIQYTSNYNKSVNVDFTVDTNGVYSEPRPIGTRYLTRNL

SEQ ID NO: 2703 - protein, 735 aa, synthetic construct
  REGION 1..735: note = source = /note="Description of Artificial Sequence: Synthetic polypeptide"
MAADGYLPDWLEDTLSEGIRQWWKLKPGPPPPKPAERHKDDSRGLVLPGYKYLGPFNGLDKGEPVNEADAAALEHDKAYDRQLDSGDNPYLKYNHADAEFQERLKEDTSFGGNLGRAVFQAKKRVLEPLGLVEEPVKTAPGKKRPVEHSPVEPDSSSGTGKAGQQPARKRLNFGQTGDADSVPDPQSLGQPPAAPSGLGTNTMATGSGAPMADNNEGADGVGNSSGNWHCDSTWMGDRVITTSTRTWALPTYNNHLYKQISSQSGASNDNHYFGYSTPWGYFDFNRFHCHFSPRDWQRLINNNWGFRPKRLSFKLFNIQVKEVTQNDGTTTIANNLTSTVQVFTDSEYQLPYVLGSAHQGCLPPFPADVFMVPQYGYLTLNNGSQAVGRSSFYCLEYFPSQMLRTGNNFTFSYTFEDVPFHSSYAHSQSLDRLMNPLIDQYLYYLSKTNAPSGTTTMSRLQFSQAGASDIRDQSRNWLPGPCYRQQRVSKTAADNNNSDYSWTGATKYHLNGRDSLVNPGPAMASHKDDEEKYFPQSGVLIFGKQGSNKTNVDIEKVMITDEEEIRTTNPVATEQYGSVSTNLQSGNTQAATSDVNTQGVLPGMVWQDRDVYLQGPIWAKIPHTDGHFHPSPLMGGFGLKHPPPQILIKNTPVPANPSTTFSAAKFASFITQYSTGQVSVEIEWELQKENSKRWNPEIQYTSNYNKSVNVDFTVDTNGVYSEPRPIGTRYLTRNL

SEQ ID NO: 2704 - protein, 735 aa, synthetic construct
  REGION 1..735: note = source = /note="Description of Artificial Sequence: Synthetic polypeptide"
MAADGYLPDWLEDTLSEGIRQWWKLKPGPPPPKPAERHKDDSRGLVLPGYKYLGPFNGLDKGEPVNEADAAALEHDKAYDRQLDSGDNPYLKYNHADAEFQERLKEDTSFGGNLGRAVFQAKKRVLEPLGLVEEPVKTAPGKKRPVEHSPVEPDSSSGTGKAGQQPARKRLNFGQTGDADSVPDPQPLGQPPAAPSGLGTNTMATGSGAPMADNNEGADGVGNSSGNWHCDSTWMGDRVITTSTRTWALPTYNNHLYKQISSQSGASNDNHYFGYSTPWGYFDFNRFHCHFSPRDWQRLINNNWGFRPKRLSFKLFNIQVKEVTQNGGTTTIANNLTSTVQVFTDSEYQLPYVLGSAHQGCLPPFPADVFMVPQYGYLTLNNGSQAVGRSSFYCLEYFPSQMLRTGNNFTFSYTFEDVPFHSSYAHSQSLDRLMNPLIDQYLYYLSKTNAPSGTTTMSRLQFSQAGASDIRDQSRNWLPGPCYRQQRVSKTAADNNNSDYSWTGATKYHLNGRDSLVNPGPAMASHKDDEEKYFPQSGVLIFGKQGSNKTNVDIEKVMITDEEEIRTTNPVATEQYGSVSTNLQSGNTQAATSDVNTQGVLPGMVWQDRDVYLQGPIWAKIPHTDGHFHPSPLMGGFGLKHPPPQILIKNTPVPANPSTTFSAAKFASFITQYSTGQVSVEIEWELQKENSKRWNPEIQYTSNYNKSVNVDFTVDTNGVYSEPRPIGTRYLTRNL

SEQ ID NO: 2705 - protein, 735 aa, synthetic construct
  REGION 1..735: note = source = /note="Description of Artificial Sequence: Synthetic polypeptide"
MAADGYLPDWLEDTLSEGIRQWWKLKPGPPPPKPAERHKDDSRGLVLPGYKYLGPFNGLDKGEPVNEADAAALEHDKAYDRQLDSGDNPYLKYNHADAEFQERLKEDTSFGGNLGRAVFQAKKRVLEPLGLVEEPVKTAPGKKRPVEHSPVEPDSSSGTGKAGQQPARKRLNFGQTGDADSVPDPQPLGQPPAAPSGLGTNTMATGSGAPMADNNEGADGVGNSSGNWHCDSTWMGDRVITTSTRTWALPTYNNHLYKQISSQSGASNDNHYFGYSTPWGYFDFNRFHCHFSPRDWQRLINNNWGFRPKRLSFKLFNIQVKEVTQNDGTTTIANNLTSTVQVFTDSEYQLPYVLGSAHQGCLPPFPADVFMVPQYGYLTLNNGSQAVGRSSFYCLEYFPSQMLRTGNNFTFSYTFEDVPFHSSYAHSQSLDRLMNPLIDQYLYYLSKTNAPSGTTTMSGLQFSQAGASDIRDQSRNWLPGPCYRQQRVSKTAADNNNSDYSWTGATKYHLNGRDSLVNPGPAMASHKDDEEKYFPQSGVLIFGKQGSNKTNVDIEKVMITDEEEIRTTNPVATEQYGSVSTNLQSGNTQAATSDVNTQGVLPGMVWQDRDVYLQGPIWAKIPHTDGHFHPSPLMGGFGLKHPPPQILIKNTPVPVNPSTTFSAAKFASFITQYSTGQVSVEIEWELQKENSKRWNPEIQYTSNYNKSVNVDFTVDTNGVYSEPRPIGTRYLTRNL

SEQ ID NO: 2706 - protein, 735 aa, synthetic construct
  REGION 1..735: note = source = /note="Description of Artificial Sequence: Synthetic polypeptide"
MAADGYLPDWLEDTLSEGIRQWWKLKPGPPPPKPAERHKDDSRGLVLPGYKYLGPFNGLDKGEPVNEADAAALEHDKAYDRQLDSGDNPYLKYNHADAEFQERLKEDTSFGGNLGRAVFQAKKRVLEPLGLVEEPVKTAPGKKRPVEHSPVEPDSSSGTGKAGQQPARKRLNFGQTGDADSVPDPQPLGQPPAAPSGLGTNTMATGSGAPMADNNEGADGVGNSSGNWHCDSTWMGDRVITTSTRTWALPTYNNHLYKQISSQSGASNDNHYFGYSTPWGYFDFNRFHCHFSPRDWQRLINNNWGFRPKRLSFKLFNIQVKEVTQNDGTTTIANNLTSTVQVFTDSEYQLPYVLGSAHQGCLPPFPADVFMVPQYGYLTLNNGSQAVGRSSFYCLEYFPSQMLRTGNNFTFSYTFEDVPFHSSYAHSQSLDRLMNPLIDQYLYYLSKTNAPSGTTTMSRLQFSQAGASDIRDQSRNWLPGPCYRQQRVSKTAADNNNSDYSWTGATKYHLNGRDSLVNPGPTMASHKDDEEKYFPQSGVLIFGKQGSNKTNVDIEKVMITDEEEIRTTNPVATEQYGSVSTNLQSGNTQAATSDVNTQGVLPGMVWQDRDVYLQGPIWAKIPHTDGHFHPSPLMGGFGLKHPPPQILIKNTPVPANPSTTFSAAKFASFITQYSTGQVSVEIEWELQKENSKRWNPEIQYTSNYNKSVNVDFTVDTNGVYSEPRPIGTRYLTRNL

SEQ ID NO: 2707 - protein, 735 aa, synthetic construct
  REGION 1..735: note = source = /note="Description of Artificial Sequence: Synthetic polypeptide"
MAADGYLPDWLEDTLSEGIRQWWKLKPGPPPPKPAERHKDDSRGLVLPGYKYLGPLNGLDKGEPVNEADAAALEHDKAYDRQLDSGDNPYLKYNHADAEFQERLKEDTSFGGNLGRAVFQAKKRVLEPLGLVEEPVKTAPGKKRPVEHSPVEPDSSSGTGKAGQQPARKRLNFGQTGDADSVPDPQPLGQPPAAPSGLGTNTMATGSGAPMADNNEGADGVGNSSGNWHCDSTWMGDRVITTSTRTWALPTYNNHLYKQISSQSGASNDNHYFGYSTPWGYFDFNRFHCHFSPRDWQRLINNNWGFRPKRLSFKLFNIQVKEVTQNDGTTTIANNLTSTVQVFTDSEYQLPYVLGSAHQGCLPPFPADVFMVPQYGYLTLNNGSQAVGRSSFYCLEYFPSQMLRTGNNFTFSYTFEDVPFHSSYAHSQSLDRLMNPLIDQYLYYLSKTNAPSGTTTMSRLQFSQAGASDIRDQSRNWLPGPCYRQQRVSKTAADNNNSDYSWTGATKYHLNGRDSLVNPGPAMASHKDDEEKYFPQSGVLIFGKQGSNKTNVDIEKVMITDEEEIRTTNPVATEQYGSVSTNLQSGNTQAATSDVNTQGVLPGMVWQDRDVYLQGPIWAKIPHTDGHFHPSPLMGGFGLKHPPPQILIKNTPVPANPSTTFSAAKFASFITQYSTGQVSVEIEWELQKENSKRWNPEIQYTSNYNKSVNVDFTVDTNGVYSEPRPIGTRYLTRNL

SEQ ID NO: 2708 - protein, 735 aa, synthetic construct
  REGION 1..735: note = source = /note="Description of Artificial Sequence: Synthetic polypeptide"
MAADGYLPDWLEDTLSEGIRQWWKLKPGPPPPKPAERHKDDSRGLVLPGYKYLGPFNGLDKGEPVNEADAAALEHDKAYDRQLDSGDNPYLKYNHADAEFQERLKEDTSFGGNLGRAVFQAKKRVLEPLGLVEEPVKTAPGKKRPVEHSPVEPDSSSGTGKAGQQPARKRLNFGQTGDADSVPDPQPLGQPPAAPSGLGTNTMATGSGAPMADNNEGADGVGNSSGNWHCDSTWMGDRVITTSTRTWALPTYNNHLYKQISSQSGASNDNHYFGYSTPWGYFDFNRFHCHFSPRDWQRLINNNWGFRPKRLSFKLFNIQVKEVTQNDGTTTIANNLTSTVQVFTDSEYQLPYVLGSAHQGCLPPFPADVFMVPQYGYLTLNNGSQAVGRSSFYCLEYFPSQMLRTGNNFTFSYTFEDVPFHSSYAHSQSLDRLMNPLIDQYLYYLSKTNAPSGTTTMSRLQFSQAGASDIRDQSRNWLPGPCYRQQRVSKTAADNNNSDYSWTGATKYHLNGRDSLVNPGPAMTSHKDDEEKYFPQSGVLIFGKQGSNKTNVDIEKVMITDEEEIRTTNPVATEQYGSVSTNLQSGNTQAATSDVNTQGVLPGMVWQDRDVYLQGPIWAKIPHTDGHFHPSPLMGGFGLKHPPPQILIKNTPVPANPSTTFSAAKFASFITQYSTGQVSVEIEWELQKENSKRWNPEIQYTSNYNKSVNVDFTVDTNGVYSEPRPIGTRYLTRNL

SEQ ID NO: 2709 - protein, 735 aa, synthetic construct
  REGION 1..735: note = source = /note="Description of Artificial Sequence: Synthetic polypeptide"
MAADGYLPDWLEDTLSEGIRQWWKLKPGPPPPKPAERHKDDSRGLVLPGYKYLGPFNGLDKGEPVNEADAAALEHDKAYDRQLDSGDNPYLKYNHADAEFQERLKEDTSFGGNLGRAVFQAKKRVLEPLGLVEEPVKTAPGKKRPVEHSPVEPDSSSGTGKAGQQPARKRLNFGQTGDADSVPDPQPLGQPPAAPSGLGTNTMATGSGAPMADNNEGADGVGNSSGNWHCDSTWMGDRVITTSTRTWALPTYNNHLYKQISSQSGASNDNHYFGYSTPWGYFDFNRFHCHFSPRDWQRLINNNWGFRPKRLSFKLFNIQVKEVTQNDGTTTIANNLTSTVQVFTDSEYQLPYVLGSAHQGCLPPFPADVFMVPQYGYLTLNNGSQAVGRSSFYCLEYFPSQMLRTGNNFTFSYTFEDVPFHSSYAHSQSLDRLMNPLIDQYLYYLSKTNAPSGTTTMSRLQFSQAGASDIRDQSRNWLPGPCYRQQRVSKTAADNNNSDYSWTGATKYHLNGRDSLVNPGPAMASHKDDEEKYFPQSGVLIFGKQGSNKTNVDIEKVMITDEEEIRTTNPVATEQYGSVSTNLQSGNTQAATSDVNTQGVLPGMVWQDRDVYLQGPIWTKIPHTDGHFHPSPLMGGFGLKHPPPQILIKNTPVPANPSTTFSAAKFASFITQYSTGQVSVEIEWELQKENSKRWNPEIQYTSNYNKSVNVDFTVDTNGVYSEPRPIGTRYLTRNL

SEQ ID NO: 2710 - protein, 735 aa, synthetic construct
  REGION 1..735: note = source = /note="Description of Artificial Sequence: Synthetic polypeptide"
MAADGYLPDWLEDTLSEGIRQWWKLKPGPPPPKPAERHKDDSRGLVLPGYKYLGPFNGLDKGEPVNEADAAALEHDKAYDRQLDSGDNPYLKYNHADAEFQERLKEDTSFGGNLGRAVFQAKKRVLEPLGLVEEPVKTAPGKKRPVEHSPVEPDSSSGTGKAGQQPARKRLNFGQTGDADSVPDPQPLGQPPVAPSGLGTNTMATGSGAPMADNNEGADGVGNSSGNWHCDSTWMGDRVITTSTRTWALPTYNNHLYKQISSQSGASNDNHYFGYSTPWGYFDFNRFHCHFSPRDWQRLINNNWGFRPKRLSFKLFNIQVKEVTQNDGTTTIANNLTSTVQVFTDSEYQLPYVLGSAHQGCLPPFPADVFMVPQYGYLTLNNGSQAVGRSSFYCLEYFPSQMLRTGNNFTFSYTFEDVPFHSSYAHSQSLDRLMNPLIDQYLYYLSKTNAPSGTTTMSRLQFSQAGASDIRDQSRNWLPGPCYRQQRVSKTAADNNNSDYSWTGATKYHLNGRDSLVNPGPAMASHKDDEEKYFPQSGVLIFGKQGSNKTNVDIEKVMITDEEEIRTTNPVATEQYGSVSTNLQSGNTQAATSDVNTQGVLPGMVWQDRDVYLQGPIWAKIPHTDGHFHPSPLMGGFGLKHPPPQILIKNTPVPANPSTTFSAAKFASFITQYSTGQVSVEIEWELQKENSKRWNPEIQYTSNYNKSVNVDFTVDTNGVYSEPRPIGTRYLTRNL

SEQ ID NO: 2711 - protein, 735 aa, synthetic construct
  REGION 1..735: note = source = /note="Description of Artificial Sequence: Synthetic polypeptide"
MAADGYLPDWLEDTLSEGIRQWWKLKPGPPPPKPAERHKDDSRGLVLPGYKYLGPFNGLDKGEPVNEADAAALEHDKAYDRQLDSGDNPYLKYNHADAEFQERLKEDTSFGGNLGRAVFQAKKRVLEPLGLVEEPVKTAPGKKRPVEHSPVEPDSSSGTGKAGQQPARKRLNFGQTGDADSVPDPQPLGQPPAAPSGLGTNTMATGSGAPMADNNEGADGVGNSSGNWHCDSTWMGDRVITTSTRTWALPTYNNHLYKQISSQSGASNDNHYFGYSTPWGYFDFNRFHCHFSPRDWQRLINNNWGFRPKRLSFKLFNIQVKEVTQNDGTTTIANNLTSTVQVFTDSEYQLPYVLGSAHQGCLPPFPADVFMVPQYGYLTLNNGSQAVGRSSFYCLEYFPSQMLRTGNNFTFSYTFEDVPFHSSYAHSQSLDRLMNPLIDQYLYYLSKTNAPSGTTTMSRLQFSQAGASDIRDQSRNWLPGPCYRQQRVSKTAADNNNSDYSWTGATKYHLNGRDSLVNPGPAMASHKDDEEKYFPQSGVLIFGKQGSNKTNVDIEKVMITDEEEIRTTNPVATEQYGSVSTNLQSGNTQAATSDVNTQGVLPGMVWQDRDVYLQGPIWAKIPHTDGHFHPSPLMGGFGLKHPPPQILIKNTPVPANPSTTFSAAKFASFITQYSTGQVSVEIEWEPQKENSKRWNPEIQYTSNYNKSVNVDFTVDTNGVYSEPRPIGTRYLTRNL

SEQ ID NO: 2712 - protein, 735 aa, synthetic construct
  REGION 1..735: note = source = /note="Description of Artificial Sequence: Synthetic polypeptide"
MAADGYLPDWLEDTLSEGIRQWWKLKPGPPPPKPAERHKDDSRGLVLPGYKYLGPFNGLDKGEPVNEADAAALEHDKAYDRQLDSGDNPYLKYNHADAEFQERLKEDTSFGGNLGRAVFQAKKRVLEPLGLVEEPVKTAPGKKRPVEHSPVEPDSSSGTGKAGQQPARKRLNFGQTGDADSVPDPQPLGQPPAAPSGLGTNTMATGSGAPMADNNEGADGVGNSSGNWHCDSTWMGDRVITTSTRTWALPTYNNHLYKQISSQSGASNDNHYFGYSTPWGYFDFNRFHCHFSPRDWQRLINNNWGFRPKRLSFKLFNIQVKEVTQNDGTTTIANNLTSTVQVFTDSEYQLPYVLGSAHQGCLPPFPADVFMVPQYGYLTLNNGSQAVGRSSFYCLEYFPSQMLRTGNNFTFSYTFEDVPFHSSYAHSQSLDRLMNPLIDQYLYYLSKTNAPSGTTTMSRLQFSQAGASDIRDQSRNWLPGPCYRQQRVSKTVADNNNSDYSWTGATKYHLNGRDSLVNPGPAMASHKDDEEKYFPQSGVLIFGKQGSNKTNVDIEKVMITDEEEIRTTNPVATEQYGSVSTNLQSGNTQAATSDVNTQGVLPGMVWQDRDVYLQGPIWAKIPHTDGHFHPSPLMGGFGLKHPPPQILIKNTPVPANPSTTFSAAKFASFITQYSTGQVSVEIEWELQKENSKRWNPEIQYTSNYNKSVNVDFTVDTNGVYSEPRPIGTRYLTRNL

SEQ ID NO: 2713 - protein, 735 aa, synthetic construct
  REGION 1..735: note = source = /note="Description of Artificial Sequence: Synthetic polypeptide"
MAADGYLPDWLEDTLSEGIRQWWKLKPGPPPPKPAERHKDDSRGLVLPGYKYLGPFNGLDKGEPVNEADAAALEHDKAYDRQLDSGDNPYLKYNHADAEFQERLKEDTSFGGNLGRAVFQAKKRVLEPLGLVEEPVKTAPGKKRPVEHSPVEPDSSSGTGKAGQQPARKRLNFGQTGDADSVPDPQPLGQPPAAPSGLGTNTMATGSGAPMADNNEGADGVGNSSGNWHCDSTWMGDRVITTSTRTWALPTYNNHLYKQISSQSGASNDNHYFGYSTPWGYFDFNRFHCHFSPRDWQRLINNNWGFRPKRLSFKLFNIQVKEVTQNDGTTTIANNLTSTVQVFTDSEYQLPYVLGSAHQGCLPPFPADVFMVPQYGYLTLNNGSQAVGRSSFYCLEYFPSQMLRTGNNFTFSYTFEDVPFHSSYAHSQSLDRLMNPLIDQYPYYLSKTNAPSGTTTMSRLQFSQAGASDIRDQSRNWLPGPCYRQQRVSKTAADNNNSDYSWTGATKYHLNGRDSLVNPGPAMASHKDDEEKYFPQSGVLIFGKQGSNKTNVDIEKVMITDEEEIRTTNPVATEQYGSVSTNLQSGNTQAATSDVNTQGVLPGMVWQDRDVYLQGPIWAKIPHTDGHFHPSPLMGGFGLKHPPPQILIKNTPVPANPSTTFSAAKFASFITQYSTGQVSVEIEWELQKENSKRWNPEIQYTSNYNKSVNVDFTVDTNGVYSEPRPIGTRYLTRNL

SEQ ID NO: 2714 - protein, 735 aa, synthetic construct
  REGION 1..735: note = source = /note="Description of Artificial Sequence: Synthetic polypeptide"
MAADGYLPDWLEDTLSEGIRQWWKLKPGPPPPKPAERHKDDSRGLVLPGYKYLGPFNGLDKGEPVNEADAAALEHDKAYDRQLDSGDNPYLKYNHTDAEFQERLKEDTSFGGNLGRAVFQAKKRVLEPLGLVEEPVKTAPGKKRPVEHSPVEPDSSSGTGKAGQQPARKRLNFGQTGDADSVPDPQPLGQPPAAPSGLGTNTMATGSGAPMADNNEGADGVGNSSGNWHCDSTWMGDRVITTSTRTWALPTYNNHLYKQISSQSGASNDNHYFGYSTPWGYFDFNRFHCHFSPRDWQRLINNNWGFRPKRLSFKLFNIQVKEVTQNDGTTTIANNLTSTVQVFTDSEYQLPYVLGSAHQGCLPPFPADVFMVPQYGYLTLNNGSQAVGRSSFYCLEYFPSQMLRTGNNFTFSYTFEDVPFHSSYAHSQSLDRLMNPLIDQYLYYLSKTNAPSGTTTMSRLQFSQAGASDIRDQSRNWLPGPCYRQQRVSKTAADNNNSDYSWTGATKYHLNGRDSLVNPGPAMASHKDDEEKYFPQSGVLIFGKQGSNKTNVDIEKVMITDEEEIRTTNPVATEQYGSVSTNLQSGNTQAATSDVNTQGVLPGMVWQDRDVYLQGPIWAKIPHTDGHFHPSPLMGGFGLKHPPPQILIKNTPVPANPSTTFSAAKFASFITQYSTGQVSVEIEWELQKENSKRWNPEIQYTSNYNKSVNVDFTVDTNGVYSEPRPIGTRYLTRNL

SEQ ID NO: 2715 - protein, 735 aa, synthetic construct
  REGION 1..735: note = source = /note="Description of Artificial Sequence: Synthetic polypeptide"
MAADGYLPDWLEDTLSEGIRQWWKLKPGPPPPKPAERHKDDSRGLVLPGYKYLGPFNGLDKGGPVNEADAAALEHDKAYDRQLDSGDNPYLKYNHADAEFQERLKEDTSFGGNLGRAVFQAKKRVLEPLGLVEEPVKTAPGKKRPVEHSPVEPDSSSGTGKAGQQPARKRLNFGQTGDADSVPDPQPLGQPPAAPSGLGTNTMATGSGAPMADNNEGADGVGNSSGNWHCDSTWMGDRVITTSTRTWALPTYNNHLYKQISSQSGASNDNHYFGYSTPWGYFDFNRFHCHFSPRDWQRLINNNWGFRPKRLSFKLFNIQVKEVTQNDGTTTIANNLTSTVQVFTDSEYQLPYVLGSAHQGCLPPFPADVFMVPQYGYLTLNNGSQAVGRSSFYCLEYFPSQMLRTGNNFTFSYTFEDVPFHSSYAHSQSLDRLMNPLIDQYLYYLSKTNAPSGTTTMSRLQFSQAGASDIRDQSRNWLPGPCYRQQRVSKTAADNNNSDYSWTGATKYHLNGRDSLVNPGPAMASHKDDEEKYFPQSGVLIFGKQGSNKTNVDIEKVMITDEEEIRTTNPVATEQYGSVSTNLQSGNTQAATSDVNTQGVLPGMVWQDRDVYLQGPIWAKIPHTDGHFHPSPLMGGFGLKHPPPQILIKNTPVPANPSTTFSAAKFASFITQYSTGQVSVEIEWELQKENSKRWNPEIQYTSNYNKSVNVDFTVDTNGVYSEPRPIGTRYLTRNL

SEQ ID NO: 2716 - protein, 735 aa, synthetic construct
  REGION 1..735: note = source = /note="Description of Artificial Sequence: Synthetic polypeptide"
MAADGYLPDWLEDTLSEGIRQWWKLKPGPPPPKPAERHKDDSRGLVLPGYKYLGPFNGLDKGEPVNEADAAALEHDKAYDRQLDSGDNPYLKYNHADAEFQERLKEDTSFGGNLGRAVFQAKKRVLEPLGLVEEPVKTAPGKKRPVEHSPVEPDSSSGTGKAGQQPARKRLNFGQTGDADSVPDPQPLGQPPAAPSGLGTNTMATGSGAPMADNNEGADGVGNSSGNWHCDSTWMGDRVITTSTRTWTLPTYNNHLYKQISSQSGASNDNHYFGYSTPWGYFDFNRFHCHFSPRDWQRLINNNWGFRPKRLSFKLFNIQVKEVTQNDGTTTIANNLTSTVQVFTDSEYQLPYVLGSAHQGCLPPFPADVFMVPQYGYLTLNNGSQAVGRSSFYCLEYFPSQMLRTGNNFTFSYTFEDVPFHSSYAHSQSLDRLMNPLIDQYLYYLSKTNAPSGTTTMSRLQFSQAGASDIRDQSRNWLPGPCYRQQRVSKTAADNNNSDYSWTGATKYHLNGRDSLVNPGPAMASHKDDEEKYFPQSGVLIFGKQGSNKTNVDIEKVMITDEEEIRTTNPVATEQYGSVSTNLQSGNTQAATSDVNTQGVLPGMVWQDRDVYLQGPIWAKIPHTDGHFHPSPLMGGFGLKHPPPQILIKNTPVPANPSTTFSAAKFASFITQYSTGQVSVEIEWELQKENSKRWNPEIQYTSNYNKSVNVDFTVDTNGVYSEPRPIGTRYLTRNL

SEQ ID NO: 2717 - protein, 735 aa, synthetic construct
  REGION 1..735: note = source = /note="Description of Artificial Sequence: Synthetic polypeptide"
MAADGYLPDWLEDTLSEGIRQWWKLKPGPPPPKPAERHKDDSRGLVLPGYKYLGPFNGLDKGEPVNEADAAVLEHDKAYDRQLDSGDNPYLKYNHADAEFQERLKEDTSFGGNLGRAVFQAKKRVLEPLGLVEEPVKTAPGKKRPVEHSPVEPDSSSGTGKAGQQPARKRLNFGQTGDADSVPDPQPLGQPPAAPSGLGTNTMATGSGAPMADNNEGADGVGNSSGNWHCDSTWMGDRVITTSTRTWALPTYNNHLYKQISSQSGASNDNHYFGYSTPWGYFDFNRFHCHFSPRDWQRLINNNWGFRPKRLSFKLFNIQVKEVTQNDGTTTIANNLTSTVQVFTDSEYQLPYVLGSAHQGCLPPFPADVFMVPQYGYLTLNNGSQAVGRSSFYCLEYFPSQMLRTGNNFTFSYTFEDVPFHSSYAHSQSLDRLMNPLIDQYLYYLSKTNAPSGTTTMSRLQFSQAGASDIRDQSRNWLPGPCYRQQRVSKTAADNNNSDYSWTGATKYHLNGRDSLVNPGPAMASHKDDEEKYFPQSGVLIFGKQGSNKTNVDIEKVMITDEEEIRTTNPVATEQYGSVSTNLQSGNTQAATSDVNTQGVLPGMVWQDRDVYLQGPIWAKIPHTDGHFHPSPLMGGFGLKHPPPQILIKNTPVPANPSTTFSAAKFASFITQYSTGQVSVEIEWELQKENSKRWNPEIQYTSNYNKSVNVDFTVDTNGVYSEPRPIGTRYLTRNL

SEQ ID NO: 2718 - protein, 735 aa, synthetic construct
  REGION 1..735: note = source = /note="Description of Artificial Sequence: Synthetic polypeptide"
MAADGYLPDWLEDTLSEGIRQWWKLKPGPPPPKPAERHKDDSRGLVLPGYKYLGPFNGLDKGEPVNEADAAALEHDKAYDRQLDSGDNPYLKYNHADAEFQERLKEDTSFGGNLGRAVFQAKKRVLEPLGLVEEPVKTAPGKKRPVEHSPVEPDSSSGTGKAGQQPARKRLNFGQTGDADSVPDPQPLGQPPAAPSGLGTNTMATGSGAPMADNNEGADGVGNSSGNWHCDSTWMGDRVITTSTHTWALPTYNNHLYKQISSQSGASNDNHYFGYSTPWGYFDFNRFHCHFSPRDWQRLINNNWGFRPKRLSFKLFNIQVKEVTQNDGTTTIANNLTSTVQVFTDSEYQLPYVLGSAHQGCLPPFPADVFMVPQYGYLTLNNGSQAVGRSSFYCLEYFPSQMLRTGNNFTFSYTFEDVPFHSSYAHSQSLDRLMNPLIDQYLYYLSKTNAPSGTTTMSRLQFSQAGASDIRDQSRNWLPGPCYRQQRVSKTAADNNNSDYSWTGATKYHLNGRDSLVNPGPAMASHKDDEEKYFPQSGVLIFGKQGSNKTNVDIEKVMITDEEEIRTTNPVATEQYGSVSTNLQSGNTQAATSDVNTQGVLPGMVWQDRDVYLQGPIWAKIPHTDGHFHPSPLMGGFGLKHPPPQILIKNTPVPANPSTTFSAAKFASFITQYSTGQVSVEIEWELQKENSKRWNPEIQYTSNYNKSVNVDFTVDTNGVYSEPRPIGTRYLTRNL

SEQ ID NO: 2719 - protein, 735 aa, synthetic construct
  REGION 1..735: note = source = /note="Description of Artificial Sequence: Synthetic polypeptide"
MAADGYLPDWLEDTLSEGIRQWWKLKPGPPPPKPAERHKDDSRGLVLPGYKYLGPFNGLDKGEPVNEADAAALEHDKAYDRQLDSGDNPYLKYNHADAEFQERLKEDTSFGGNLGRAVFQAKKRVLEPLGLVEEPVKTAPGKKRPVEHSPVEPDSSSGTGKAGQQPARKRLNFGQTGDADSVPDPQPLGQPPAAPSGLGTNTMATGSGAPMADNNEGADGVGNSSGNWHCDSTWMGDRVITTSTRTWALPTYNNHLYKQISSQSGASNDNHYFGYSTPWGYFDFNRFHCHFSPRDWQRLINNNWGFRPKRLSFKLFNIQVKEVTQNDGTTTIANNLTSTVQVFTDSEYQLPYVLGSAHQGCLPPFPADVFMVPQYGYLTLNNGSQAVGRSSFYCLEYFPSQMLRTGNNFTFSYTFEDVPFHSSYAHSQSLDRLMNPLIDQYLYYLSKTNAPSGTTTMSRLQFSQAGASGIRDQSRNWLPGPCYRQQRVSKTAADNNNSDYSWTGATKYHLNGRDSLVNPGPAMASHKDDEEKYFPQSGVLIFGKQGSNKTNVDIEKVMITDEEEIRTTNPVATEQYGSVSTNLQSGNTQAATSDVNTQGVLPGMVWQDRDVYLQGPIWAKIPHTDGHFHPSPLMGGFGLKHPPPQILIKNTPVPANPSTTFSAAKFASFITQYSTGQVSVEIEWELQKENSKRWNPEIQYTSNYNKSVNVDFTVDTNGVYSEPRPIGTRYLTRNL

SEQ ID NO: 2720 - protein, 735 aa, synthetic construct
  REGION 1..735: note = source = /note="Description of Artificial Sequence: Synthetic polypeptide"
MAADGYLPDWLEDTLSEGIRQWWKLKPGPPPPKPAERHKDDSRGLVLPGYKYLGPFNGLDKGEPVNEADAAALEHDKAYDRQLDSGDNPYLKYNHADAEFQERLKEDTSFGGNLGRVVFQAKKRVLEPLGLVEEPVKTAPGKKRPVEHSPVEPDSSSGTGKAGQQPARKRLNFGQTGDADSVPDPQPLGQPPAAPSGLGTNTMATGSGAPMADNNEGADGVGNSSGNWHCDSTWMGDRVITTSTRTWALPTYNNHLYKQISSQSGASNDNHYFGYSTPWGYFDFNRFHCHFSPRDWQRLINNNWGFRPKRLSFKLFNIQVKEVTQNDGTTTIANNLTSTVQVFTDSEYQLPYVLGSAHQGCLPPFPADVFMVPQYGYLTLNNGSQAVGRSSFYCLEYFPSQMLRTGNNFTFSYTFEDVPFHSSYAHSQSLDRLMNPLIDQYLYYLSKTNAPSGTTTMSRLQFSQAGASDIRDQSRNWLPGPCYRQQRVSKTAADNNNSDYSWTGATKYHLNGRDSLVNPGPAMASHKDDEEKYFPQSGVLIFGKQGSNKTNVDIEKVMITDEEEIRTTNPVATEQYGSVSTNLQSGNTQAATSDVNTQGVLPGMVWQDRDVYLQGPIWAKIPHTDGHFHPSPLMGGFGLKHPPPQILIKNTPVPANPSTTFSAAKFASFITQYSTGQVSVEIEWELQKENSKRWNPEIQYTSNYNKSVNVDFTVDTNGVYSEPRPIGTRYLTRNL

SEQ ID NO: 2721 - protein, 735 aa, synthetic construct
  REGION 1..735: note = source = /note="Description of Artificial Sequence: Synthetic polypeptide"
MAADGYLPDWLEDTLSEGIRQWWKLKPGPPPPKPAERHKDDSRGLVLPGYKYLGPFNGLDKGEPVNEADAAALEHDKAYDRQLDSGDNPYLKYNHADAEFQERLKEDTSFGGNLGRAVFQAKKRVLEPLGLVEEPVKTAPGKKRPVEHSPVEPDSSSGTGKAGQQPARKRLNFGQTGDADSVPDPQPLGQPPAAPSGLGTNTMATGSGAPMADNNEGADGVGNSSGNWHCDSTWMGDRVITTSTRTWALPTYNNHLYKQISSQSGASNDNHYFGYSTPWGYFDFNRFHCHFSPRDWQRLINNNWGFRPKRLSFKLFNIQVKEVTQNDGTTTIANNLTSTVQVFTDSEYQLPYILGSAHQGCLPPFPADVFMVPQYGYLTLNNGSQAVGRSSFYCLEYFPSQMLRTGNNFTFSYTFEDVPFHSSYAHSQSLDRLMNPLIDQYLYYLSKTNAPSGTTTMSRLQFSQAGASDIRDQSRNWLPGPCYRQQRVSKTAADNNNSDYSWTGATKYHLNGRDSLVNPGPAMASHKDDEEKYFPQSGVLIFGKQGSNKTNVDIEKVMITDEEEIRTTNPVATEQYGSVSTNLQSGNTQAATSDVNTQGVLPGMVWQDRDVYLQGPIWAKIPHTDGHFHPSPLMGGFGLKHPPPQILIKNTPVPANPSTTFSAAKFASFITQYSTGQVSVEIEWELQKENSKRWNPEIQYTSNYNKSVNVDFTVDTNGVYSEPRPIGTRYLTRNL

SEQ ID NO: 2722 - protein, 735 aa, synthetic construct
  REGION 1..735: note = source = /note="Description of Artificial Sequence: Synthetic polypeptide"
MAADGYLPDWLEDTLSEGIRQWWKLKPGPPPPKPAERHKDDSRGLVLPGYKYLGPFNGLDKGEPVNEADAAALEHDKAYDRQLDSGDNPYLKYNHADAEFQERLKEDTSFGGNLGRAVFQAKKRVLEPLGLVEEPVKTAPGKKRPVEHSPVEPDSSSGTGKAGQQPARKRLNFGQTGDADSVPDPQPLGQPPAAPSGLGTNTMATGSGAPMADNNEGVDGVGNSSGNWHCDSTWMGDRVITTSTRTWALPTYNNHLYKQISSQSGASNDNHYFGYSTPWGYFDFNRFHCHFSPRDWQRLINNNWGFRPKRLSFKLFNIQVKEVTQNDGTTTIANNLTSTVQVFTDSEYQLPYVLGSAHQGCLPPFPADVFMVPQYGYLTLNNGSQAVGRSSFYCLEYFPSQMLRTGNNFTFSYTFEDVPFHSSYAHSQSLDRLMNPLIDQYLYYLSKTNAPSGTTTMSRLQFSQAGASDIRDQSRNWLPGPCYRQQRVSKTAADNNNSDYSWTGATKYHLNGRDSLVNPGPAMASHKDDEEKYFPQSGVLIFGKQGSNKTNVDIEKVMITDEEEIRTTNPVATEQYGSVSTNLQSGNTQAATSDVNTQGVLPGMVWQDRDVYLQGPIWAKIPHTDGHFHPSPLMGGFGLKHPPPQILIKNTPVPANPSTTFSAAKFASFITQYSTGQVSVEIEWELQKENSKRWNPEIQYTSNYNKSVNVDFTVDTNGVYSEPRPIGTRYLTRNL

SEQ ID NO: 2723 - protein, 735 aa, synthetic construct
  REGION 1..735: note = source = /note="Description of Artificial Sequence: Synthetic polypeptide"
MAADGYLPDWLEDTLSEGIRQWWKLKPGPPPPKPAERHKDDSRGLVLPGYKYLGPFNGLDKGEPVNEADAAALEHDKAYDRQLDSGDNPYLKYNHADAEFQERLKEDTSFGGNLGRAVFQAKKRVLEPLGLVEEPVKTAPGKKRPVEHSPVEPDSSSGTGKAGQQPARKRLNFGQTGDADSVPDPQPLGQPPAAPSGLGTNTMATGSGAPMADNNEGADGVGNSSGNWHCDSTWMGDRVITTSTRTWALPTYNNHLYKQISSQSGASNDNHYFGYSTPWGYFDFNRFHCHFSPRDWQRLINNNWGFRPKRLSFKLFNIQVKEVTQNDGTTTIANNLTSTVQVFTDSEYQLPYVLGSAHQGCLPPFPADVFMVPQYGYLTLNNGSQAVGRSSFYCLEYFPSQMLRTGNNFTFSYTFEDVPFHSSYAHSQSLDRLMNPLIDQYLYYLSKTNAPSGTTTMSRLQFSQAGASDIRDQSRNWLPGPCYRQQRVSKTAADNNNSDYSWTGATKYHLNGRGSLVNPGPAMASHKDDEEKYFPQSGVLIFGKQGSNKTNVDIEKVMITDEEEIRTTNPVATEQYGSVSTNLQSGNTQAATSDVNTQGVLPGMVWQDRDVYLQGPIWAKIPHTDGHFHPSPLMGGFGLKHPPPQILIKNTPVPANPSTTFSAAKFASFITQYSTGQVSVEIEWELQKENSKRWNPEIQYTSNYNKSVNVDFTVDTNGVYSEPRPIGTRYLTRNL

SEQ ID NO: 2724 - protein, 735 aa, synthetic construct
  REGION 1..735: note = source = /note="Description of Artificial Sequence: Synthetic polypeptide"
MAADGYLPDWLEDTLSEGIRQWWKLKPGPPPPKPAERHKDDSRGLVLPGYKYLGPFNGLDKGEPVNEADAAALEHDKAYDRQLDSGDNPYLKYNHADAEFQERLKEDTSFGGNLGRAVFQAKKRVLEPLGLVEEPVKTAPGKKRPVEHSPVEPDSSSGTGKAGQQPARKRLNFGQTGDADSVPDPQPLGQPPAAPSGLGTNTMATGSGAPMADNNEGADGVGNSSGNWHCDSTWMGDRVITTSTRTWALPTYNNHLYKQISSQSGASNDNHYFGYSTPWGYFDFNRFHCHFSPRDWQRLINNNWGFRPKRLSFKLFNIQVKEVTQNDGTTTIANNLTSTVQVFTDSEYQLPYVLGSAHQGCLPPFPADVFMVPQYGYLTLNNGSQAVGRSSFYCLEYFPSQMLRTGNNFTFSYTFEDVPFHSSYAHSQSLDRLMNPLIDQYLYYLSKTNAPSGTTTMSRLQFSQAGASDIRDQSRNWLPGPCYRQQRVSKTAADNNNSDYSWTGATKYHLNGRDSLVNPGPAMASHKDDEEKYFPQSGVLIFGKQGSNKTNVDIEKVMITDEEEIRTTNPVATEQYGSVSTNLQSGNTQAATPDVNTQGVLPGMVWQDRDVYLQGPIWAKIPHTDGHFHPSPLMGGFGLKHPPPQILIKNTPVPANPSTTFSAAKFASFITQYSTGQVSVEIEWELQKENSKRWNPEIQYTSNYNKSVNVDFTVDTNGVYSEPRPIGTRYLTRNL

SEQ ID NO: 2725 - protein, 735 aa, synthetic construct
  REGION 1..735: note = source = /note="Description of Artificial Sequence: Synthetic polypeptide"
MAADGYLPDWLEDTLSEGIRQWWKLKPGPPPPKPAERHKDDSRGLVLPGYKYLGPFNGLDKGEPVNEADAAALEHDKAYDRQLDSGDNPYLKYNHADAEFQERLKEDTSFGGNLGRAVFQAKKRVLEPLGLVEEPVKTAPGKKRPVEHSPVEPDSSSGTGKAGQQPARKRLNFGQTGDADSVPDPQPLGQPPAAPSGLGTNTMATGSGAPMADNNEGADGVGNSSGNWHCDSTWMGDRVITTSTRTWALPTYNNHLYKQISSQSGASNDNHYFGYSTPWGYFDFNRFHCHFSPRDWQRLINNNWGFRPKRLSFKLFNIQVKEVTQNDGTTTIANNLTSTVQVFTDSEYQLPYVLGSAHQGCLPPFPADVFMVPQYGYLTLNNGSQAVGRSSFYCLEYFPSQMLRTGNNFTFSYTFEDVPFHSSYAHSQSLDRLMNPLIDQYLYYLSKTNAPSGTTTMSRLQFSQAGASDIRDQSRNWLPGPCYRQQRVSKTAADNNNSDYSWTGATKYHLNGRDSLVNPGPAMASHKDDEEKYFPQSGVLIFGKQGSNKTNVDIEKVMITDEEEIRTTNPVATEQYGSVSTNLQSGNTQAATSDVNTQGVLPGMVWQDRDVYLQGPIWAKIPHTDGHFHPSPLMGGFGLKHPPPQILIKNTPVPANPSTTFSVAKFASFITQYSTGQVSVEIEWELQKENSKRWNPEIQYTSNYNKSVNVDFTVDTNGVYSEPRPIGTRYLTRNL

SEQ ID NO: 2726 - protein, 735 aa, synthetic construct
  REGION 1..735: note = source = /note="Description of Artificial Sequence: Synthetic polypeptide"
MAADGYLPDWLEDTLSEGIRQWWKLKPGPPPPKPAERHKDDSRGLVLPGYKYLGPFNGLDKGEPVNEADAAALEHDKAYDRQLDSGDNPYLKYNHADAEFQERLKEDTSFGGNLGRAVFQAKKRVLEPLGLVEEPVKTAPGKKRPVEHSPVEPDSSSGTGKAGQQPARKRLNFGQTGDADSVPDPQPLGQPPAAPSGLGTNTMATGSGAPMADNNEGADGVGNSSGNWHCDSTWMGDRVITTSTRTWALPTYNNHLYKQISSQSGASNDNHYFGYSTPWGYFDFNRFHCHFSPRDWQRLINNNWGFRPKRLSFKLFNIQVKEVTQNDGTTTIANNLTSTVQVFTDSEYQLPYVLGSAHQGCLPPFPADVFMVPQYGYLTLNNGSQAVGRSSFYCLEYFPSQMLRTGNNFTFSYTFEDVPFRSSYAHSQSLDRLMNPLIDQYLYYLSKTNAPSGTTTMSRLQFSQAGASDIRDQSRNWLPGPCYRQQRVSKTAADNNNSDYSWTGATKYHLNGRDSLVNPGPAMASHKDDEEKYFPQSGVLIFGKQGSNKTNVDIEKVMITDEEEIRTTNPVATEQYGSVSTNLQSGNTQAATSDVNTQGVLPGMVWQDRDVYLQGPIWAKIPHTDGHFHPSPLMGGFGLKHPPPQILIKNTPVPANPSTTFSAAKFASFITQYSTGQVSVEIEWELQKENSKRWNPEIQYTSNYNKSVNVDFTVDTNGVYSEPRPIGTRYLTRNL

SEQ ID NO: 2727 - protein, 735 aa, synthetic construct
  REGION 1..735: note = source = /note="Description of Artificial Sequence: Synthetic polypeptide"
MAADGYLPDWLEDTLSEGIRQWWKLKPGPPPPKPAERHKDDSRGLVLPGYKYLGPFNGLDKGEPVNEADAAALEHDKAYDRQLDSGDNPYLKYNHADAEFQERLKEDTSFGGNLGRAVFQAKKRVLEPLGLVEEPVKTAPGKKRPVEHSPVEPDSSSGTGKADQQPARKRLNFGQTGDADSVPDPQPLGQPPAAPSGLGTNTMATGSGAPMADNNEGADGVGNSSGNWHCDSTWMGDRVITTSTRTWALPTYNNHLYKQISSQSGASNDNHYFGYSTPWGYFDFNRFHCHFSPRDWQRLINNNWGFRPKRLSFKLFNIQVKEVTQNDGTTTIANNLTSTVQVFTDSEYQLPYVLGSAHQGCLPPFPADVFMVPQYGYLTLNNGSQAVGRSSFYCLEYFPSQMLRTGNNFTFSYTFEDVPFHSSYAHSQSLDRLMNPLIDQYLYYLSKTNAPSGTTTMSRLQFSQAGASDIRDQSRNWLPGPCYRQQRVSKTAADNNNSDYSWTGATKYHLNGRDSLVNPGPAMASHKDDEEKYFPQSGVLIFGKQGSNKTNVDIEKVMITDEEEIRTTNPVATEQYGSVSTNLQSGNTQAATSDVNTQGVLPGMVWQDRDVYLQGPIWAKIPHTDGHFHPSPLMGGFGLKHPPPQILIKNTPVPANPSTTFSAAKFASFITQYSTGQVSVEIEWELQKENSKRWNPEIQYTSNYNKSVNVDFTVDTNGVYSEPRPIGTRYLTRNL

SEQ ID NO: 2728 - protein, 735 aa, synthetic construct
  REGION 1..735: note = source = /note="Description of Artificial Sequence: Synthetic polypeptide"
MAADGYLPDWLEDTLSEGIRQWWKLKPGPPPPKPAERHKDDSRGLVLPGYKYLGPFNGLDKGEPVNEADAAALEHDKAYDRQLDSGDNPYLKYNHADAEFQERLKEDTSFGGNLGRAVFQAKKRVLEPLGLVEEPVKTAPGKKRPVEHSPVEPDSSSGTGKAGQQPARKRLNFGQTGDADSVPDPQPLGQPPAAPSGLGTNTMATGSGAPMADNNEGADGVGNSSGNWHCDSTWMGDRVITTSTRTWALPTYNNHLYKQISSQSGASNDNHYFGYSTPWGYFDFNRFHCHFSPRDWQRLINNNWGFRPKRLSFKLFNIQVKEVTQNDGTTTIANNLTNTVQVFTDSEYQLPYVLGSAHQGCLPPFPADVFMVPQYGYLTLNNGSQAVGRSSFYCLEYFPSQMLRTGNNFTFSYTFEDVPFHSSYAHSQSLDRLMNPLIDQYLYYLSKTNAPSGTTTMSRLQFSQAGASDIRDQSRNWLPGPCYRQQRVSKTAADNNNSDYSWTGATKYHLNGRDSLVNPGPAMASHKDDEEKYFPQSGVLIFGKQGSNKTNVDIEKVMITDEEEIRTTNPVATEQYGSVSTNLQSGNTQAATSDVNTQGVLPGMVWQDRDVYLQGPIWAKIPHTDGHFHPSPLMGGFGLKHPPPQILIKNTPVPANPSTTFSAAKFASFITQYSTGQVSVEIEWELQKENSKRWNPEIQYTSNYNKSVNVDFTVDTNGVYSEPRPIGTRYLTRNL

SEQ ID NO: 2729 - protein, 735 aa, synthetic construct
  REGION 1..735: note = source = /note="Description of Artificial Sequence: Synthetic polypeptide"
MAADGYLPDWLEDTLSEGIRQWWKLKPGPPPPKPAERHKDDSRGLVLPGYKYLGPFNGLDKGEPVNEADAAALEHDKAYDRQLDSGDNPYLKYNHADAEFQERLKEDTSFGGNLGRAVFQAKKRVLEPLGLVEEPVKTAPGKKRPVEHSPVEPDSSSGTGKAGQQPARKRLNFGQTGDADSVPDPQPLGQPPAAPSGLGTNTMATGSGAPMADNNEGADGVGNSSGNWHCDSTWMGDRVITTSTRTWALPTYNNHLYKQISSQSGASNDNHYFGYNTPWGYFDFNRFHCHFSPRDWQRLINNNWGFRPKRLSFKLFNIQVKEVTQNDGTTTIANNLTSTVQVFTDSEYQLPYVLGSAHQGCLPPFPADVFMVPQYGYLTLNNGSQAVGRSSFYCLEYFPSQMLRTGNNFTFSYTFEDVPFHSSYAHSQSLDRLMNPLIDQYLYYLSKTNAPSGTTTMSRLQFSQAGASDIRDQSRNWLPGPCYRQQRVSKTAADNNNSDYSWTGATKYHLNGRDSLVNPGPAMASHKDDEEKYFPQSGVLIFGKQGSNKTNVDIEKVMITDEEEIRTTNPVATEQYGSVSTNLQSGNTQAATSDVNTQGVLPGMVWQDRDVYLQGPIWAKIPHTDGHFHPSPLMGGFGLKHPPPQILIKNTPVPANPSTTFSAAKFASFITQYSTGQVSVEIEWELQKENSKRWNPEIQYTSNYNKSVNVDFTVDTNGVYSEPRPIGTRYLTRNL

SEQ ID NO: 2730 - protein, 735 aa, synthetic construct
  REGION 1..735: note = source = /note="Description of Artificial Sequence: Synthetic polypeptide"
MAADGYLPDWLEDTLSEGIRQWWKLKPGPPPPKPAERHKDDSRGLVLPGYKYLGPFNGLDKGEPVNEADAAALEHDKAYDRQLDSGDNPYLKYNHADAEFQERLKEDTSFGGNLGRAVFQAKKRVLEPLGLVEEPVKTAPGKKRPVEHSPVEPDSSSGTGKAGQQPARKRLNFGQTGGADSVPDPQPLGQPPAAPSGLGTNTMATGSGAPMADNNEGADGVGNSSGNWHCDSTWMGDRVITTSTRTWALPTYNNHLYKQISSQSGASNDNHYFGYSTPWGYFDFNRFHCHFSPRDWQRLINNNWGFRPKRLSFKLFNIQVKEVTQNDGTTTIANNLTSTVQVFTDSEYQLPYVLGSAHQGCLPPFPADVFMVPQYGYLTLNNGSQAVGRSSFYCLEYFPSQMLRTGNNFTFSYTFEDVPFHSSYAHSQSLDRLMNPLIDQYLYYLSKTNAPSGTTTMSRLQFSQAGASDIRDQSRNWLPGPCYRQQRVSKTAADNNNSDYSWTGATKYHLNGRDSLVNPGPAMASHKDDEEKYFPQSGVLIFGKQGSNKTNVDIEKVMITDEEEIRTTNPVATEQYGSVSTNLQSGNTQAATSDVNTQGVLPGMVWQDRDVYLQGPIWAKIPHTDGHFHPSPLMGGFGLKHPPPQILIKNTPVPANPSTTFSAAKFASFITQYSTGQVSVEIEWELQKENSKRWNPEIQYTSNYNKSVNVDFTVDTNGVYSEPRPIGTRYLTRNL

SEQ ID NO: 2731 - protein, 735 aa, synthetic construct
  REGION 1..735: note = source = /note="Description of Artificial Sequence: Synthetic polypeptide"
MAADGYLPDWLEDTLSEGIRQWWKLKPGPPPPRPAERHQDDSRGLVLPGYKYLGPFNGLDKGEPVNEADAAALEHDKAYDRQLDSGDNPYLKYNHADAEFQERLKEDTSFGGNLGRAVFQAKKRVLEPLGLVEEPVKTAPGKKRPVEHSPAEPDSSSGTGKAGQQPARKRLNFGQTGDADSVPDPQPLGQPPAAPTSLGSTTMATGSGAPMADNNEGADGVGNSSGNWHCDSQWLGDRVITTSTRTWALPTYNNHLYKQISSQSGASNDNHYFGYSTPWGYFDFNRFHCHFSPRDWQRLINNNWGFRPKRLNFKLFNIQVKEVTQNDGTTTIANNLTSTVQVFTDSEYQLPYVLGSAHQGCLPPFPADVFMVPQYGYLTLNNGSQAVGRSSLYCLEYFPSQMLRTGNNFTFSYTFEDVPFHSSYAHSQSLDRLMNPLIDQYLYYLNRTQSNSGTLQQSRLLFSQAGPTSMSLQAKNWLPGPCYRQQRLSKQANDNNNSNFPWTAATKYHLNGRDSLVNPGPAMASHKDDEEKFFPMHGTLIFGKQGTNANDADLEHVMITDEEEIRTTNPVATEQYGNVSNNLQNSNTGPTTENVNHQGALPGMVWQDRDVYLQGPIWAKIPHTDGHFHPSPLMGGFGLKHPPPQIMIKNTPVPANPPTNFSAAKFASFITQYSTGQVSVEIEWELQKENSKRWNPEIQYTSNYNKSVNVDFTVDANGVYSEPRPIGTRYLTRNL

SEQ ID NO: 2732 - protein, 735 aa, synthetic construct
  REGION 1..735: note = source = /note="Description of Artificial Sequence: Synthetic polypeptide"
MAADGYLPDWLEDTLSEGIRQWWKLKPGPPPPRPAERHQDDSRGLVLPGYKYLGPFNGLDKGEPVNEADAAALEHDKAYDRQLDSGDNPYLKYNHADAEFQERLKEDTSFGGNLGRAVFQAKKRVLEPLGLVEEPVKTAPGKKRPVEHSPAEPDSSSGTGKAGQQPARKRLNFGQTGDADSVPDPQPLGQPPAAPTSLGSTTMATGSGAPMADNNEGADGVGNSSGNWHCDPQWLGDRVITTSTRTWALPTYNNHLYKQISSQSGASNDNHYFGYSTPWGYFDFNRFHCHFSPRDWQRLINNNWGFRPKRLNFKLFNIQVKEVTQNDGTTTIANNLTSTVQVFTDSEYQLPYVLGSAHQGCLPPFPADVFMVPQYGYLTLNNGSQAVGRSSFYCLEYFPSQMLRTGNNFTFSYTFEDVPFHSSYAHSQSLDRLMNPLIDQYLYYLNRTQSNSGTLQQSRLLFSQAGPTSMSLQAKNWLPGPCYRQQRLSKQANDNNNSNFPWTAATKYHLNGRDSLVNPGPAMASHKDDEEKFFPMHGTLIFGKQGTNANDADLEHVMITDEEEIRTTNPVATEQYGNVSNNLQNSNTGPTTENVNHQGALPGMVWQDRDVYLQGPIWAKIPHTDGHFHPSPLMGGFGLKHPPPQIMIKNTPVPANPPTNFSAAKFASFITQYSTGQVSVEIEWELQKENSKRWNPEIQYTSNYNKSVNVDFTVDANGVYSEPRPIGTRYLTRNL

SEQ ID NO: 2733 - protein, 735 aa, synthetic construct
  REGION 1..735: note = source = /note="Description of Artificial Sequence: Synthetic polypeptide"
MAADGYLPDWLEDTLSEGIRQWWKLKPGPPPPRPAERHQDDSRGLVLPGYKYLGPFNGLDKGEPVNEADAAALEHDKAYDRQLDSGDNPYLKYNHADAEFQERLKEDTSFGGNLGRAVSQAKKRVLEPLGLVEEPVKTAPGKKRPVEHSPAEPDSSSGTGKAGQQPARKRLNFGQTGDADSVPDPQPLGQPPAAPTSLGSTTMATGSGAPMADNNEGADGVGNSSGNWHCDSQWLGDRVITTSTRTWALPTYNNHLYKQISSQSGASNDNHYFGYSTPWGYFDFNRFHCHFSPRDWQRLINNNWGFRPKRLNFKLFNIQVKEVTQNDGTTTIANNLTSTVQVFTDSEYQLPYVLGSAHQGCLPPFPADVFMVPQYGYLTLNNGSQAVGRSSFYCLEYFPSQMLRTGNNFTFSYTFEDVPFHSSYAHSQSLDRLMNPLIDQYLYYLNRTQSNSGTLQQSRLLFSQAGPTSMSLQAKNWLPGPCYRQQRLSKQANDNNNSNFPWTAATKYHLNGRDSLVNPGPAMASHKDDEEKFFPMHGTLIFGKQGTNANDADLEHVMITDEEEIRTTNPVATEQYGNVSNNLQNSNTGPTTENVNHQGALPGMVWQDRDVYLQGPIWAKIPHTDGHFHPSPLMGGFGLKHPPPQIMIKNTPVPANPPTNFSAAKFASFITQYSTGQVSVEIEWELQKENSKRWNPEIQYTSNYNKSVNVDFTVDANGVYSEPRPIGTRYLTRNL

SEQ ID NO: 2734 - protein, 735 aa, synthetic construct
  REGION 1..735: note = source = /note="Description of Artificial Sequence: Synthetic polypeptide"
MAADGYLPDWLEDTLSEGIRQWWKLKPGPPPPRPAERHQDDSRGLVLPGYKYLGPFNGLDKGEPVNEADAAALEHDKAYDRQLDSGDNPYLKYNHADAEFQERLKEDTSFGGNLGRAVFQAKKRVLEPLGLVEEPVKTAPGKKRPVEHSPAEPDSSSGTGKAGQQPARKRLNFGQTGDADSVPDPQPLGQPPAAPTSLGSTTMATGSGAPMADNNEGADGVGNSSGNWHCDSQWLGDRVITTSTRTWALPTYNNHLYKQISSQSGASNDNHYFGYSTPWGYFDFNRFHCHFSPRDWQRLINNNWGFRPKRLNFKLFNIQVKEVTQNDGTTTIANNLTSTVQVFTDSEYQLPYVLGSAHQGCLPPFPADVFMVPQYGYLTLNNGSQAVGRSSFYCLEYFPSQMLRTGNNFTFSYTFEDVPFHSSYAHSQSLDRLMSPLIDQYLYYLNRTQSNSGTLQQSRLLFSQAGPTSMSLQAKNWLPGPCYRQQRLSKQANDNNNSNFPWTAATKYHLNGRDSLVNPGPAMASHKDDEEKFFPMHGTLIFGKQGTNANDADLEHVMITDEEEIRTTNPVATEQYGNVSNNLQNSNTGPTTENVNHQGALPGMVWQDRDVYLQGPIWAKIPHTDGHFHPSPLMGGFGLKHPPPQIMIKNTPVPANPPTNFSAAKFASFITQYSTGQVSVEIEWELQKENSKRWNPEIQYTSNYNKSVNVDFTVDANGVYSEPRPIGTRYLTRNL

SEQ ID NO: 2735 - protein, 735 aa, synthetic construct
  REGION 1..735: note = source = /note="Description of Artificial Sequence: Synthetic polypeptide"
MAADGYLPDWLEDTLSEGIRQWWKLKPGPPPPRPAERHQDDSRGLVLPGYKYLGPFNGLDKGEPVNEADAAALEHDKAYDRQLDSGDNPYLKYNHADAEFQERLKEDTSFGGNLGRAVFQAKKRVLEPLGLVEEPVKTAPGKKRPVEHSPAEPDSSSGTGKAGQQPARKRLNFGQTGDADSVPDPQPLGQPPAAPTSLGSTTMATGSGAPMAGNNEGADGVGNSSGNWHCDSQWLGDRVITTSTRTWALPTYNNHLYKQISSQSGASNDNHYFGYSTPWGYFDFNRFHCHFSPRDWQRLINNNWGFRPKRLNFKLFNIQVKEVTQNDGTTTIANNLTSTVQVFTDSEYQLPYVLGSAHQGCLPPFPADVFMVPQYGYLTLNNGSQAVGRSSFYCLEYFPSQMLRTGNNFTFSYTFEDVPFHSSYAHSQSLDRLMNPLIDQYLYYLNRTQSNSGTLQQSRLLFSQAGPTSMSLQAKNWLPGPCYRQQRLSKQANDNNNSNFPWTAATKYHLNGRDSLVNPGPAMASHKDDEEKFFPMHGTLIFGKQGTNANDADLEHVMITDEEEIRTTNPVATEQYGNVSNNLQNSNTGPTTENVNHQGALPGMVWQDRDVYLQGPIWAKIPHTDGHFHPSPLMGGFGLKHPPPQIMIKNTPVPANPPTNFSAAKFASFITQYSTGQVSVEIEWELQKENSKRWNPEIQYTSNYNKSVNVDFTVDANGVYSEPRPIGTRYLTRNL

SEQ ID NO: 2736 - protein, 735 aa, synthetic construct
  REGION 1..735: note = source = /note="Description of Artificial Sequence: Synthetic polypeptide"
MAADGYLPDWLEDTLSEGIRQWWKLKPGPPPPRPAERHQDDSRGLVLPGYKYLGPFNGLDKGEPVNEADAAALEHDKAYDRQLDSGDNPYLKYNHADAEFQERLKEDTSFGGNLGRAVFQAKKRVLEPLGLVEEPVKTAPGKKRPVEHSPAEPDSSSGTGKAGQQPARKRLNFGQTGDADSVPDPQPLGQPPAAPTSLGSTTMATGSGAPMADSNEGADGVGNSSGNWHCDSQWLGDRVITTSTRTWALPTYNNHLYKQISSQSGASNDNHYFGYSTPWGYFDFNRFHCHFSPRDWQRLINNNWGFRPKRLNFKLFNIQVKEVTQNDGTTTIANNLTSTVQVFTDSEYQLPYVLGSAHQGCLPPFPADVFMVPQYGYLTLNNGSQAVGRSSFYCLEYFPSQMLRTGNNFTFSYTFEDVPFHSSYAHSQSLDRLMNPLIDQYLYYLNRTQSNSGTLQQSRLLFSQAGPTSMSLQAKNWLPGPCYRQQRLSKQANDNNNSNFPWTAATKYHLNGRDSLVNPGPAMASHKDDEEKFFPMHGTLIFGKQGTNANDADLEHVMITDEEEIRTTNPVATEQYGNVSNNLQNSNTGPTTENVNHQGALPGMVWQDRDVYLQGPIWAKIPHTDGHFHPSPLMGGFGLKHPPPQIMIKNTPVPANPPTNFSAAKFASFITQYSTGQVSVEIEWELQKENSKRWNPEIQYTSNYNKSVNVDFTVDANGVYSEPRPIGTRYLTRNL

SEQ ID NO: 2737 - protein, 735 aa, synthetic construct
  REGION 1..735: note = source = /note="Description of Artificial Sequence: Synthetic polypeptide"
MAADGYLPDWLEDTLSEGIRQWWKLKPGPPPPRPAERHQDDSRGLVLPGYKYLGPFNGLDKGEPVNEADAAALEHDKAYDRQLDSGDNPYLKYNHADAEFQERLKEDTSFGGNLGRAVFQAKKRVLEPLGLVEEPVKTAPGKKRPVEHSPAEPDSSSGTGKAGQQPARKRLNFGQTGDADSVPDPQPLGQPPAAPTSLGSTTMATGSGAPMADNNEGADGVGNSSGNWHCDSQWLGDRVITTSTRTWALPTYNNHHYKQISSQSGASNDNHYFGYSTPWGYFDFNRFHCHFSPRDWQRLINNNWGFRPKRLNFKLFNIQVKEVTQNDGTTTIANNLTSTVQVFTDSEYQLPYVLGSAHQGCLPPFPADVFMVPQYGYLTLNNGSQAVGRSSFYCLEYFPSQMLRTGNNFTFSYTFEDVPFHSSYAHSQSLDRLMNPLIDQYLYYLNRTQSNSGTLQQSRLLFSQAGPTSMSLQAKNWLPGPCYRQQRLSKQANDNNNSNFPWTAATKYHLNGRDSLVNPGPAMASHKDDEEKFFPMHGTLIFGKQGTNANDADLEHVMITDEEEIRTTNPVATEQYGNVSNNLQNSNTGPTTENVNHQGALPGMVWQDRDVYLQGPIWAKIPHTDGHFHPSPLMGGFGLKHPPPQIMIKNTPVPANPPTNFSAAKFASFITQYSTGQVSVEIEWELQKENSKRWNPEIQYTSNYNKSVNVDFTVDANGVYSEPRPIGTRYLTRNL

SEQ ID NO: 2738 - protein, 735 aa, synthetic construct
  REGION 1..735: note = source = /note="Description of Artificial Sequence: Synthetic polypeptide"
MAADGYLPDWLEDTLSEGIRQWWKLKPGPPPPRPAERHQDDSRGLVLPGYKYLGPFNGLDKGEPVNEADAAALEHDKAYDRQLDSGDNPYLKYNHADAEFQERLKEDTSFGGNLGRAVFQAKKRVLEPLGLVEEPVKTAPGKKRPVEHSPAEPDSSSGTGKAGQQPARKRLNFGQTGDADSVPDPQPLGQPPAAPTSLGSTTMATGSGAPMADNNEGADGVGNSSGNWHCDSQWLGDRVITTSTRTWALPTYNNHLYKQISSQSGASNDNHYFGYSTPWGYFDFNRFHCHFSPRDWQRLINNNWGFRPKRLNFKLFNIQVKEVTQNDGTTTIANNLTSTVRVFTDSEYQLPYVLGSAHQGCLPPFPADVFMVPQYGYLTLNNGSQAVGRSSFYCLEYFPSQMLRTGNNFTFSYTFEDVPFHSSYAHSQSLDRLMNPLIDQYLYYLNRTQSNSGTLQQSRLLFSQAGPTSMSLQAKNWLPGPCYRQQRLSKQANDNNNSNFPWTAATKYHLNGRDSLVNPGPAMASHKDDEEKFFPMHGTLIFGKQGTNANDADLEHVMITDEEEIRTTNPVATEQYGNVSNNLQNSNTGPTTENVNHQGALPGMVWQDRDVYLQGPIWAKIPHTDGHFHPSPLMGGFGLKHPPPQIMIKNTPVPANPPTNFSAAKFASFITQYSTGQVSVEIERELQKENSKRWNPEIQYTSNYNKSVNVDFTVDANGVYSEPRPIGTRYLTRNL

SEQ ID NO: 2739 - protein, 735 aa, synthetic construct
  REGION 1..735: note = source = /note="Description of Artificial Sequence: Synthetic polypeptide"
MAADGYLPDWLEDTLSEGIRQWWKLKPGPPPPRPAERHQDDSRGLVLPGYKYLGPFNGLDKGEPVNEADAAALEHDKAYDRQLDSGDNPYLKYNHADAEFQERLKEDTSFGGNLGRAVFQAKKRVLEPLGLVEEPVKTAPGKKRPVEHSPAEPDSSSGTGKAGQQPARKRLNFGQTGDADSVPDPQPLGQPPAAPTSLGSTTMATGSGAPMADNNEGADGVGNSSGNWHCDSQWLGDRVITTSTRTWALPTYNNHLYKQISSQSGASNDNHYFGYSTPWGYFDFNRFHCHFSPRDWQRLINNNWGFRPKRLNFKLFNIQVKEVTQNDGTTTIANNLTSTVQVFTDSEYQLPYVLGSAHQGCLPPFPADVFMVPQYGYLTLNNGSQAVGRSSFYCLEYFPSQMLRTGNNFTFSYTFEDVPSHSSYAHSQSLDRLMNPLIDQYLYYLNRTQSNSGTLQQSRLLFSQAGPTSMSLQAKNWLPGPCYRQQRLSKQANDNNNSNFPWTAATKYHLNGRDSLVNPGPAMASHKDDEEKFFPMHGTLIFGKQGTNANDADLEHVMITDEEEIRTTNPVATEQYGNVSNNLQNSNTGPTTENVNHQGALPGMVWQDRDVYLQGPIWAKIPHTDGHFHPSPLMGGFGLKHPPPQIMIKNTPVPANPPTNFSAAKFASFITQYSTGQVSVEIEWELQKENSKRWNPEIQYTSNYNKSVNVDFTVDANGVYSEPRPIGTRYLTRNL

SEQ ID NO: 2740 - protein, 735 aa, synthetic construct
  REGION 1..735: note = source = /note="Description of Artificial Sequence: Synthetic polypeptide"
MAADGYLPDWLEDTLSEGIRQWWKLKPGPPPPRPAERHQDDSRGLVLPGYKYLGPFNGLDKGEPVNEADAAALEHDKAYDRQLDSGDNPYLKYNHADAEFQERLKEDTSFGGNLGRAVFQAKKRVLEPLGLVEEPVKTAPGKKRPVEHSPAEPDSSSGTGKAGQRPARKRLNFGQTGDADSVPDPQPLGQPPAAPTSLGSTTMATGSGAPMADNNEGADGVGNSSGNWHCDSQWLGDRVITTSTRTWALPTYNNHLYKQISSQSGASNDNHYFGYSTPWGYFDFNRFHCHFSPRDWQRLINNNWGFRPKRLNFKLFNIQVKEVTQNDGTTTIANNLTSTVQVFTDSEYQLPYVLGSAHQGCLPPFPADVFMVPQYGYLTLNNGSQAVGRSSFYCLEYFPSQMLRTGNNFTFSYTFEDVPFHSSYAHSQSLDRLMNPLIDQYLYYLNRTQSNSGTLQQSRLLFSQAGPTSMSLQAKNWLPGPCYRQQRLSKQANDNNNSNFPWTAATKYHLNGRDSLVNPGPAMASHKDDEEKFFPMHGTLIFGKQGTNANDADLEHVMITDEEEIRTTNPVATEQYGNVSNNLQNSNTGPTTENVNHQGALPGMVWQDRDVYLQGPIWAKIPHTDGHFHPSPLMGGFGLKHPPPQIMIKNTPVPANPPTNFSAAKFASFITQYSTGQVSVEIEWELQKENSKRWNPEIQYTSNYNKSVNVDFTVDANGVYSEPRPIGTRYLTRNL

SEQ ID NO: 2741 - protein, 735 aa, synthetic construct
  REGION 1..735: note = source = /note="Description of Artificial Sequence: Synthetic polypeptide"
MAADGYLPDWLEDTLSEGIRQWWKLKPGPPPPKPAERHKDDSRGLVLPGYKYLGPFNGLDKGEPVNEADAAALEHDKAYDRQLDSGDNPYLKYNHADAEFQERLKEDTSFGGNLARAVFQAKKRVLEPLGLVEEPVKTAPGKKRPVEHSPAEPDSSSGTGKSGQQPARKRLNFGQTGDADSVPDPQPLGQPPAAPSGLGTNTMASGSGAPMADNNEGADGVGNSSGNWHCDSTWMGDRVITTSTRTWALPTYNNHLYKQISSQSGAANDNHYFGYSTPWGYFDFNRFHCHFSPRDWQRLINNNWGFRPKRLNFKLFNIQVKEVTQNDGTTTIANNLTSTVQVFTDSEYQLPYVLGSAHQGCLPPFPADVFMVPQYGYLTLNNGSQAVGRSSFYCLEYFPSQMLRTGNNFTFSYTFEDVPFHSSYAHSQSLDRLMNPLIDQYLYYLNRTQSNSGTLQQSRLLFSQAGPTSMSLQAKNWLPGPCYRQQRLSKQANDNNNSNFPWTAATKYHLNGRDSLVNPGPAMASHKDDEEKFFPMHGTLIFGKQGTNANDADLEHVMITDEEEIRTTNPVATEQYGNVSNNLQNSNTGPTTENVNHQGALPGMVWQDRDVYLQGPIWAKIPHTDGHFHPSPLMGGFGLKHPPPQIMIKNTPVPANPPTNFSAAKFASFITQYSTGQVSVEIEWELQKENSKRWNPEIQYTSNYNKSVNVDFTVDANGVYSEPRPIGTRYLTRNL

SEQ ID NO: 2742 - protein, 735 aa, synthetic construct
  REGION 1..735: note = source = /note="Description of Artificial Sequence: Synthetic polypeptide"
MAADGYLPDWLEDTLSEGIRQWWKLKPGPPPPRPAERHQDDSRGLVLPGYKYLGPFNGLDKGEPVNEADAAALEHDKAYDRQLDSGDNPYLKYNHADAEFQERLKEDTSFGGNLGRAVFQAKKRVLEPLGLVEEPVKTAPGKKRPVEHSPAEPDSSSGTGKAGQQPARKRLNFGQTGDADSVPDPRPLGQPPAAPTSLGSTTMATGSGAPMADNNEGADGVGNSSGNWHCDSQWLGDRVITTSTRTWALPTYNNHLYKQISSQSGASNDNHYFGYSTPWGYFDFNRFHCHFSPRDWQRLINNNWGFRPKRLNFKLFNIQVKEVTQNDGTTTIANNLTSTVQVFTDSEYQLPYVLGSAHQGCLPPFPADVFMVPQYGYLTLNNGSQAVGRSSFYCLEYFPSQMLRTGNNFTFSYTFEDVPFHSSYAHSQSLDRLMNPLIDQYLYYLNRTQSNSGTLQQSRLLFSQAGPTSMSLQAKNWLPGPCYRQQRLSKQANDNNNSNFPWTAATKYHLNGRDSLVNPGPAMASHKDDEEKFFPMHGTLIFGKQGTNANDADLEHVMITDEEEIRTTNPVATEQYGNVSNNLQNSNTGPTTENVNHQGALPGMVWQDRDVYLQGPIWAKIPHTDGHFHPSPLMGGFGLKHPPPQIMIKNTPVPANPPTNFSAAKFASFITQYSTGQVSVEIEWELQKENSKRWNPEIQYTSNYNKSVNVDFTVDANGVYSEPRPIGTRYLTRNL

SEQ ID NO: 2743 - protein, 735 aa, synthetic construct
  REGION 1..735: note = source = /note="Description of Artificial Sequence: Synthetic polypeptide"
MAADGYLPDWLEDTLSEGIRQWWKLKPGPPPPKPAERHKDDSRGLVLPGYKYLGPFNGLDKGEPVNEADAAALEHDKAYDRQLDSGDNPYLKYNHADAEFQERLKEDTSFGGNLARAVFQAKKRVLEPLGLVEEPVKTAPGKKRPVEHSPAEPDSSSGTGKSGQQPARKRLNFGQTGDADSVPDPQPLGQPPAAPTSLGSTTMATGSGAPMADNNEGADGVGNSSGNWHCDSQWLGDRVITTSTRTWALPTYNNHLYKQISSQSGASNDNHYFGYSTPWGYFDFNRFHCHFSPRDWQRLINNNWGFRPKRLNFKLFNIQVKEVTQNDGTTTIANNLTSTVQVFTDSEYQLPYVLGSAHQGCLPPFPADVFMVPQYGYLTLNNGSQAVGRSSFYCLEYFPSQMLRTGNNFTFSYTFEDVPFHSSYAHSQSLDRLMNPLIDQYLYYLNRTQSNSGTLQQSRLLFSQAGPTSMSLQAKNWLPGPCYRQQRLSKQANDNNNSNFPWTAATKYHLNGRDSLVNPGPAMASHKDDEEKFFPMHGTLIFGKQGTNANDADLEHVMITDEEEIRTTNPVATEQYGNVSNNLQNSNTGPTTENVNHQGALPGMVWQDRDVYLQGPIWAKIPHTDGHFHPSPLMGGFGLKHPPPQIMIKNTPVPANPPTNFSAAKFASFITQYSTGQVSVEIEWELQKENSKRWNPEIQYTSNYNKSVNVDFTVDANGVYSEPRPIGTRYLTRNL

SEQ ID NO: 2744 - protein, 735 aa, synthetic construct
  REGION 1..735: note = source = /note="Description of Artificial Sequence: Synthetic polypeptide"
MAADGYLPDWLEDTLSEGIRQWWKLKPGPPPPRPAERHQDDSRGLVLPGYKYLGPFNGLDKGEPVNEADAAALEHDKAYDRQLDSGDNPYLKYNHADAEFQERLKEDTSFGGNLGRAVFQAKKRVLEPLGLVEEPVKTAPGKKRPVEHSPAEPDSSSGTGKAGQQPARKRLNFGQTGDADSVPDPQPLGQPPAAPTSLGSTTMATGSGAPMADNNEGADGVGNSSGNWHCDSQWLGDRVITTSTRTWALPTYNNHLYKQISSQSGASNDNHYFGYSTPWGYFDFNRFHCHFSPRDWQRLINNNWGFRPKRLNFKLFNIQVKEVTQNDGTTTIANNLTSTVRVFTDSEYQLPYVLGSAHQGCLPPFPADVFMVPQYGYLTLNNGSQAVGRSSFYCLEYFPSQMLRTGNNFTFSYTFEDVPFHSSYAHSQSLDRLMNPLIDQYLYYLNRTQSNSGTLQQSRLLFSQAGPTSMSLQAKNWLPGPCYRQQRLSKQANDNNNSNFPWTAATKYHLNGRDSLVNPGPAMASHKDDEEKFFPMHGTLIFGKQGTNANDADLEHVMITDEEEIRTTNPVATEQYGNVSNNLQNSNTGPTTENVNHQGALPGMVWQDRDVYLQGPIWAKIPHTDGHFHPSPLMGGFGLKHPPPQIMIKNTPVPANPPTNFSAAKFASFITQYSTGQVSVEIERELQKENSKRWNPEIQYTSNYNKSVNVDFTVGANGVYSEPRPIGTRYLTRNL

SEQ ID NO: 2745 - protein, 735 aa, synthetic construct
  REGION 1..735: note = source = /note="Description of Artificial Sequence: Synthetic polypeptide"
MAADGYLPDWLEDTLSEGIRQWWKLKPGPPPPKPAERHKDDSRGLVLPGYKYLGPFNGLDKGEPVNEADAAALEHDKAYDRQLDSGDNPYLKYNHADAEFQERLKEDTSFGGNLARAVFQAKKRVLEPLGLVEEPVKTAPGKKRPVEHSPAEPDSSSGTGKSGQQPARKRLNFGQTGDADSVPDPQPLGQPPAAPSGLGTNTMASGSGAPMADNNEGADGVGNSSGNWHCDSQWLGDRVITTSTRTWALPTYNNHLYKQISSQSGASNDNHYFGYSTPWGYFDFNRFHCHFSPRDWQRLINNNWGFRPKRLNFKLFNIQVKEVTQNDGTTTIANNLTSTVQVFTDSEYQLPYVLGSAHQGCLPPFPADVFMVPQYGYLTLNNGSQAVGRSSFYCLEYFPSQMLRTGNNFTFSYTFEDVPFHSSYAHSQSLDRLMNPLIDQYLYYLNRTQSNSGTLQQSRLLFSQAGPTSMSLQAKNWLPGPCYRQQRLSKQANDNNNSNFPWTAATKYHLNGRDSLVNPGPAMASHKDDEEKFFPMHGTLIFGKQGTNANDADLEHVMITDEEEIRTTNPVATEQYGNVSNNLQNSNTGPTTENVNHQGALPGMVWQDRDVYLQGPIWAKIPHTDGHFHPSPLMGGFGLKHPPPQIMIKNTPVPANPPTNFSAAKFASFITQYSTGQVSVEIEWELQKENSKRWNPEIQYTSNYNKSVNVDFTVDANGVYSEPRPIGTRYLTRNL

SEQ ID NO: 2746 - protein, 735 aa, synthetic construct
  REGION 1..735: note = source = /note="Description of Artificial Sequence: Synthetic polypeptide"
MAADGYLPDWLEDTLSEGIRQWWKLKPGPPPPRPAERHQDDSRGLVLPGYKYLGPFNGLDKGEPVNEADAAALEHDKAYDRQLDSGDNPYLKYNHADAEFQERLKEDTSFGGNLGRAVFQAKKRVLEPLGLVEEPVKTAPGKKRPVEHSPAEPDSSSGTGKAGQQPARKRLNFGQTGDADSVPDPQPLGQPPAAPTSLGSTTMATGSGAPMADNNEGADGVGNSSGNWHCDSQWLGDRVITTSTRTWALPTYNNHLYKQISSQSGASNDNHYFGYSTPWGYFDFNRFHCHFSPRDWQRLINNNWGFRPKRLNFKLFNIQVKEVTQNDGTTTIANNLTSTVQVFTDSEYQLPYVLGSAHQGCLPPFPADVFMVPQYGYLTLNNGSQAVGRSSFYCLEYFPSQMLRTGNNFTFSYTFEDVPFHSSYAHSQSLDRLMNPLIDQYLYYLNRTQSNSGTLQQSRLLFSQAGPTSMSLQAKNWLPGPCYRQQRLSKQANDNNNSNFPWTAATKYHLNGRDSLVNPGPAMASHKDDEEKFFPMHGTLIFGKQGTNANDADLEHVMITDEEEIRTTNPVATEQYGNVSNNLQNSNTGPTTENVNHQGALPGMVWQDRDVYLQGPIWAKIPHTDGHFHPSPLMGGFGLKHPPPQILIKNTPVPANPSTTFSAAKFASFITQYSTGQVSVEIEWELQKENSKRWNPEIQYTSNYNKSVNVDFTVDTNGVYSEPRPIGTRYLTRNL

SEQ ID NO: 2747 - protein, 735 aa, synthetic construct
  REGION 1..735: note = source = /note="Description of Artificial Sequence: Synthetic polypeptide"
MAADGYLPDWLEDTLSEGIRQWWKLKPGPPPPRPAERHQDDSRGLVLPGYKYLGPFNGLDKGEPVNEADAAALEHDKAYDRQLDSGDNPYLKYNHADAEFQERLKEDTSFGGNLGRAVFQAKKRVLEPLGLVEEPVKTAPGKKRPVEHSPAEPDSSSGTGKAGQQPARKRLNFGQTGDADSVPDPQPLGQPPAAPTSLGSTTMATGSGAPMADNNEGADGVGNSSGNWHCDSQWLGDRVITTSTRTWALPTYNNHLYKQISSQSGASNDNHYFGYSTPWGYFDFNRFHCHFSPRDWQRLINNNWGFRPKRLNFKLFNIQVKEVTQNDGTTTIANNLTSTVQVFTDSEYQLPYVLGSAHQGCLPPFPADVFMVPQYGYLTLNNGSQAVGRSSFYCLEYFPSQMLRTGNNFTFSYTFEDVPFHSSYAHSQSLDRLMNPLIDQYLYYLNRTQSNSGTLQQSRLLFSQAGPTSMSLQAKNWLPGPCYRQQRLSKQANDNNNSNFPWTAATKYHLNGRDSSVNPGPAMASHKDDEEKFFSMHGTLIFGKQGTNANDADLEHVMITDEEEIRTTNPVATEQYGNVSNNLQNSNTGPTTENVNHQGALPGMVWQDRDVYLQGPIWAKIPHTDGHFHPSPLMGGFGLKHPPPQIMIKNTPVPANPPTNFSAAKFASFITQYSTGQVSVEIEWELQKENSKRWNPEIQYTSNYNKSVNVDFTVDANGVYSEPRPIGTRYLTRNL

SEQ ID NO: 2748 - protein, 735 aa, synthetic construct
  REGION 1..735: note = source = /note="Description of Artificial Sequence: Synthetic polypeptide"
MAADGYLPDWLEDTLSEGIRQWWKLKPGPPPPRPAERHQDDSRGLVLPGYKYLGPFNGLDKGEPVNEADAAALEHDKAYDRQLDSGDNPYLKYNHADAEFQERLKEDTSFGGNLGRAVFQAKKRVLEPLGLVEEPVKTAPGKKRPVEHSPAEPDSSSGTGKAGQQPARKRLNFGQTGDADSVPDPQPLGQPPAAPTSLGSTTMATGSGAPMADNNEGADGVGNSSGNWHCDSQWLGDRVITTSTRTWALPTYNNHLYKQISSQSGASNDNHYFGYSTPWGYFDFNRFHCHFSPRDWQRLINNNWGFRPKRLNFKLFNIQVKEVTQNDGTTTIANNLTSTVQVFTDSEYQLPYVLGSAHQGCLPPFPAGVFMVPQYGYLTLNNGSQAVGRSSFYCLEYFPSQMLRTGNNFTFSYTFEDVPFHSSYAHSQSLDRLMNPLIDQYLYYLNRTQSNSGTLQQSRLLFSQAGPTSMSLQAKNWLPGPCCRQQRLSKQANDNNNSNFPWTAATKYHLNGRDSLVNPGPAMASHKDDEEKFFPMHGTLIFGKQGTNANDADLEHVMITDEEEIRTTNPVATEQYGNVSNNLQNSNTGPTTENVNHQGALPGMVWQDRDVYLQGPIWAKIPHTDGHFHPSPLMGGFGLKHPPPQIMIKNTPVPANPPTNFSAAKFASFITQYSTGQVSVEIEWELQKENSKRWNPEIQYTSNYNKSVNVDFTVDANGVYSEPRPIGTRYLTRNL

SEQ ID NO: 2749 - protein, 735 aa, synthetic construct
  REGION 1..735: note = source = /note="Description of Artificial Sequence: Synthetic polypeptide"
MAADGYLPDWLEDTLSEGIRQWWKLKPGPPPPRPAERHQDDSRGLVLPGYKYLGPFNGLDKGEPVNEADAAALEHDKAYDRQLDSGDNPYLKYNHADAEFQERLKEDTSFGGNLGRAVFQAKKRVLEPLGLVEEPVKTAPGKKRPVEHSPAEPDSSSGTGKAGQQPARKRLNFGQTGDADSVPDPQPPGQPPAAPTSLGSTTMATGSGAPMADNNEGADGVGNSSGNWHCDSQWLGDRVITTSTRTWALPTYNNHLYKQISSQSGASNDNHYFGYSTPWGYFDFNRFHCHFSPRDWQRLINNNWGFRPKRLNFKLFNIQVKEVTQNDGTTTIANNLTSTVQVFTDSEYQLPYVLGSAHQGCLPPFPADVFMVPQYGYLTLNNGSQAVGRSSFYCLEYFPSQMLRTGNNFTFSYTFEDVPFHSSYAHSQSLDRLMNPLIDQYLYYLNRTQSNSGTLQQSRLLFSQAGPTSMSLQAKNWLPGPCYRQQRLSKQANDNNNSNFPWTAATKYHLNGRDSLVNPGPAMASHKDDEEKFFPMHGTLIFGKQGTNANDADLEHVMITDEEEIRTTNPVATEQYGNVSNNLQNSNTGPTTENVNHQGALPGMVWQDRDVYLQGPIWAKIPHTDGHFHPSPLMGGFGLKHPPPQIMIKNTPVPANPPTNFSAAKFASFITQYSTGQVSVEIEWELQKENSKRWNPEIQYTSNYNKSVNVDFTVDANGVYSEPRPIGTRYLTRNL

SEQ ID NO: 2750 - protein, 735 aa, synthetic construct
  REGION 1..735: note = source = /note="Description of Artificial Sequence: Synthetic polypeptide"
MAADGYLPDWLEDTLSEGIRQWWKLKPGPPPPRPAERHQDDSRGLVLPGYKYLGPFNGLDKGEPVNEADAAALEHDKAYDRQLDSGDNPYLKYNHADAEFQERLKEDTSFGGNLGRAVFQAKKRVLEPLGLVEEPVKTAPGKKRPVEHSPAEPDSSSGTGKAGQQPARKRLNFGQTGDADSVPDPQPLGQPPAAPTSLGSTTMATGSGAPMADNNEGADGVGNSSGNWHCDSQWLGDRVITTSTRTWALPTYNNHHYKQISSQSGASNDNHYFGYSTPWGYFDFNRFHCHFSPRDWQRLINNNWGFRPKRLNFKLFNIQVKEVTQNDGTTTIANNLTSTVQVFTDSEYQLPYVLGSAHQGCLPPFPADVFMVPQYGYLTLNNGSQAVGRSSFYCLEYFPSQMLRTGNNFTFSYTFEDVPFHSSYAHSQSLDRLMNPLIDQYLYYLNRTQSNSGTLQQSRLLFSQAGPTSMSLQAKNWLPGPCYRQQRLSKQANDNNNSNFPWTAATKYHLNGRDSLVNPGPAMASHKDDEEKFFPMHGTLIFGKQGTNANDADLEHVMITDEEEIRTTNPVATEQYGNVSNNLQNSNTGPTTEDVNHQGALPGMVWQDRDVYLQGPIWAKIPHTDGHFHPSPLMGGFGLKHPPPQIMIKNTPVPANPPTNFSAAKFASFITQYSTGQVSVEIEWELQKENSKRWNPEIQYTSNYNKSVNVDFTVDANGVYSEPRPIGTRYLTRNL

SEQ ID NO: 2751 - protein, 735 aa, synthetic construct
  REGION 1..735: note = source = /note="Description of Artificial Sequence: Synthetic polypeptide"
MAADGYLPDWLEDTLSEGIRQWWKLKPGPPPPRPAERHQDDSRGLVLPGYKYLGPFNGLDKGEPVNEADAAALEHDKAYDRQLDSGDNPYLKYNHADAEFQERLKEDTSFGGNLGRAVFQAKKRVLEPLGLVEEPVKTAPGKKRPVEHSPAEPDSSSGTGKAGQQPARKRLNFGQTGDADSVPDPRPLGQPPAAPTSLGSTTMATGSGAPMADNNEGADGVGNSSGNWHCDSQWLGDRVITTSTRTWALPTYNNHLYKQISSQSGASNDNHYFGYSTPWGYFDFNRFHCHFSPRDWQRLINNNWGFRPKRLNFKLFNIQVKEVTQNDGTTTIANNLTSTVQVFTDSEYQLPYVLGSAHQGCLPPFPADVFMVPQYGYLTLNNGSQAVGRSSFYCLEYFPSQMLRTGNNFTFSYTFEDVPFHSSYAHSQSLDRLMNPLIDQYLYYLNRTQSNSGTLQQSRLLFSQAGPTSMSLQAKNWLPGPCYRQQRLSKQANDNNNSNFPWTAATKYHLNGRDSLVNPGPAMASHKDDEEKFFPMHGTLIFGKQGTNANDADLEHVMITDEEEIRTTDPVATEQYGNVSNNLQNSNTGPTTENVNHQGALPGMVWQDRDVYLQGPIWAKIPHTDGHFHPSPLMGGFGLKHPPPQIMIKNTPVPANPPTNFSAAKFASFITQYSTGQVSVEIEWELQKENSKRWNPEIQYTSNYNKSVNVDFTVDANGVYSEPRPIGTRYLTRNL

SEQ ID NO: 2752 - protein, 735 aa, synthetic construct
  REGION 1..735: note = source = /note="Description of Artificial Sequence: Synthetic polypeptide"
MAADGYLPDWLEDTLSEGIRQWWKLKPGPPPPRPAERHQDDSRGLVLPGYKYLGPFNGLDKGEPVNEADAAALEHDKAYDRQLDSGDNPYLKYNHADAEFQERLKEDTSFGGNLGRAVFQAKKRVLEPLGLVEEPVKTAPGKKRPVEHSPAEPDSSSGTGKAGQQPARKRLNFGQTGDADSVPDPQPLGQPPAAPTSLGSTTMATGSGAPMADNNEGADGVGNSSGNWHCDSQWLGDRVITTSTRTWALPTYNNHLYKQISSQSGASNDNHYFGYSTPWGYFDFNRFHCHFSPRDWQRLINNNWGFRPKRLNFKLFNIQVKEVTQNDGTTTIANNLTSTVQVFTDSEYQLPYVLGSAHQGCLPPFPADVFMVPQYGYLTLNNGSQAVGRSSFYCLEYFPSQMLRTGNNFTFSYTFEDVPFHSSYAHSQSLDRLMNPLIDQYLYYLNRTQSNSGTLQQSRLLFSQAGPTSMSLQAKNWLPGPCYRQQRLSKQANDNNNSNFPWTAATKYHLNGRDSLVNPGPAMASHKDDEEKFFPMHGTLIFGKQGTNANDADLEHVMITDEEEIRTTNPVATEQYGNVSNNLQNSNTGPTTGNVNHQGALPGMVWQDRDVYLQGPIWAKIPHTDGHFHPSPLMGGFGLKHPPPQIMIKNTPVPANPPTNFSAAKFASFITQYSTGQVSVEIEWELQKENSKRWNPEIQYTSNYNKSVNVDFTVDANGVYSEPRPIGTRYLTRNL

SEQ ID NO: 2753 - protein, 735 aa, synthetic construct
  REGION 1..735: note = source = /note="Description of Artificial Sequence: Synthetic polypeptide"
MAADGYLPDWLEDTLSEGIRQWWKLKPGPPPPRPAERHQDDSRGLVLPGYKYLGPFNGLDKGEPVNEADAAALEHDKAYDRQLDSGDNPYLKYNHADAEFQERLKEDTSFGGNLGRAVFQAKKRVLEPLGLVEEPVKTAPGKKRPVEHSPAEPDSSSGTGKAGQQPARKRLNFGQTGDADSVPDPQPLGQPPAAPTSLGSTTMATGSGAPMADNNEGADGVGNSSGDWHCDSQWLGDRVITTSTRTWALPTYNNHLYKQISSQSGASNDNHYFGYSTPWGYFDFNRFHCHFSPRDWQRLINNNWGFRPKRLNFKLFNIQVKEVTQNDGTTTIANNLTSTVQVFTDSEYQLPYVLGSAHQGCLPPFPADVFMVPQYGYLTLNNGSQAVGRSSFYCLEYFPSQMLRTGNNFTFSYTFEDVPFHSSYAHSQSLDRLMNPLIDQYLYYLNRTQSNSGTLQQSRLLFSQAGPTSMSLQAKNWLPGPCYRQQRLSKQANDNNNSNFPWTAATKYHLNGRDSLVNPGPAMASHKDDEEKFFPMHGTLIFGKQGTNANDADLEHVMITDEEEIRTTNPVATEQYGNVSNSLQNSNTGPTTENVNHQGALPGMVWQDRDVYLQGPIWAKIPHTDGHFHPSPLMGGFGLKHPPPQIMIKNTPVPANPPTNFSAAKFASFITQYSTGQVSVEIEWELQKENSKRWNPEIQYTSNYNKSVNVDFTVDANGVYSEPRPIGTRYLTRNL

SEQ ID NO: 2754 - protein, 735 aa, synthetic construct
  REGION 1..735: note = source = /note="Description of Artificial Sequence: Synthetic polypeptide"
MAADGYLPDWLEDILSEGIRQWWKLKPGPPPPKPAERHKDDSRGLVLPGYKYLGPFNGLDKGEPVNEADAAALEHDKAYDRQLDSGDNPYLKYNHADAEFQERLKEDTSFGGNLGRAVFQAKKRVLEPLGLVEEPVKTTPGKKRPVEQSPAEPDSSSGTGKAGNQPARKRLNFGQTGDADSVPDPQPLGQPPAAPSGLGSTTMATGSGAPMADNNEGADGVGNSSGNWHCDSQWLGDRVITTSTRTWALPTYNNHLYKQISSQSGASNDNHYFGYSTPWGYFDFNRFHCHFSPRDWQRLINNNWGFRPKRLNFKLFNIQVKEVTQNDGTTTIANNLTSTVQVFTDSEYQLPYVLGSAHQGCLPPFPADVFMVPQYGYLTLNNGSQAVGRSSFYCLEYFPSQMLRTGNNFTFSYTFEDVPFHSSYAHSQSLDRLMNPLIDQYLYYLNKTQSNSGTLQQSRLLFSQAGPTSMSLQAKNWLPGPCYRQQRLSKQANDNNNSNFPWTAATKYHLNGRDSLVNPGPAMASHKDDEEKFFPMHGTLIFGKQGTNANDADLDNVMITDEEEIRTTNPVATEQYGTVSNNLQNSNTGPTTGTVNHQGALPGMVWQDRDVYLQGPIWAKIPHTDGHFHPSPLMGGFGLKHPPPQIMIKNTPVPANPPTNFSSAKFASFITQYSTGQVSVEIEWELQKENSKRWNPEIQYTSNYNKSVNVDFTVDTNGVYSEPRPIGTRYLTRNL

SEQ ID NO: 2755 - protein, 735 aa, synthetic construct
  REGION 1..735: note = source = /note="Description of Artificial Sequence: Synthetic polypeptide"
MAADGYLPDWLEDILSEGIRQWWKLKPGPPPPKPAERHKDDSRGLVLPGYKYLGPFNGLDKGEPVNEADAAALEHDKAYDRQLDSGDNPYLKYNHADAEFQERLKEDTSFGGNLGRAVFQAKKRVLEPLGLVEEPVKTAPGKKRPVEQSPAEPDSSSGTGKAGNQPARKRLNFGQTGDADSVPDPQPLGQPPAAPSGLGSTTMATGSGAPMADNNEGADGVGNSSGNWHCDSQWLGDRVITTSTRTWALPTYNNHLYKQISSQSGASNDNHYFGYSTPWGYFDFNRFHCHFSPRDWQRLINNNWGFRPKRLNFKLFNIQVKEVTQNDGTTTIANNLTSTVQVFTDSEYQLPYVLGSAHQGCLPPFPADVFMVPQYGYLTLNNGSQAVGRSSFYCLEYFPSQMLRTGNNFTFSYTFEDVPFHSSYAHSQSLDRLMNPLIDQYLYYLNKTQSNSGTLQQSRLLFSQAGPTSMSLQAKNWLPGPCYRQQRLSKQANDNNNSNFPWTAATKYHLNGRDSLVNPGPAMASHKDDEEKFFPMHGTLIFGKQGTNANDADLDNVMITDEEEIRTTNPVATEQYGTVSNNLQNSNTGPTTGTVNHQGALPGMVWQDRDVYLQGPIWAKIPHTDGHFHPSPLMGGFGLKHPPPQIMIKNTPVPANPPTNFSSAKFASFITQYSTGQVSVEIEWELQKENSKRWNPEIQYTSNYNKSVNVDFTVDTNGVYSEPRPIGTRYLTRNL

SEQ ID NO: 2756 - protein, 735 aa, synthetic construct
  REGION 1..735: note = source = /note="Description of Artificial Sequence: Synthetic polypeptide"
MAADGYLPDWLEDILSEGIRQWWKLKPGPPPPKPAERHKDDSRGLVLPGYKYLGPFNGLDKGEPVNEADAAALEHDKAYDRQLDSGDNPYLKYNHADAEFQERLKEDTSFGGNLGRAVFQAKKRVLEPLGLVEEPVKTAPGKKRPVEQSPAEPDSSSGTGKAGNQPARKRLNFGQTGDADSVPDPQPLGQPPAAPSGLGSTTMATGSGAPMADNNEGADGVGNSSGNWHCDSQWLGDRVITTSTRTWALPTYNNHLYKQISSQSGASNDNHYFGYSTPWGYFDFNRFHCHFSPRDWQRLINNNWGFRPKRLNFKLFNIQVKEVTQNDGTTTIANNLTSTVQVFTDSEYQLPYVLGSAHQGCLPPFPADVFMVPQYGYLTLNNGSQAVGRSSFYCLEYFPSQMLRTGNNFTFSYTFEDVPFHSGYAHSQSLDRLMNPLIDQYLYYLNKTQSNSGTLQQSRLLFSQAGPTSMSLQAKNWLPGPCYRQQRLSKQANDNNNSNFPWTAATKYHLNGRDSLVNPGPAMASHKDDEEKFFPMHGTLIFGKQGTNANDADLDNVMITDEEEIRTTNPVATEQYGTVSNNLQNSNTGPTTGTVNHQGALPGMVWQDRDVYLQGPIWAKIPHTDGHFHPSPLMGGFGLKHPPPQIMIKNTPVPANPPTNFSSAKFASFITQYSTGQVSVEIEWELQKENSKRWNPEIQYTSNYNKSVNVDFTVDTNGVYSEPRPIGTRYLTRNL

SEQ ID NO: 2757 - protein, 734 aa, synthetic construct
  REGION 1..734: note = source = /note="Description of Artificial Sequence: Synthetic polypeptide"
MAADGYLPDWLEDILSEGIRQWWKLKPGPPPKPAERHKDDSRGLVLPGYKYLGPFNGLDKGEPVNEADAAALEHDKAYDRQLDSGDNPYLKYNHADAEFQERLKEDTSFGGNLGRAVFQAKKRVLEPLGLVEEPVKTAPGKKRPVEQSPAEPDSSSGTGKAGNQPARKRLNFGQTGDADSVPDPQPLGQPPAAPSGLGSTTMATGSGAPMADNNEGADGVGNSSGNWHCDSQWLGDRVITTSTRTWALPTYNNHLYKQISSQSGASNDNHYFGYSTPWGYFDFNRFHCHFSPRDWQRLINNNWGFRPKRLNFKLFNIQVKEVTQNDGTTTIANNLTSTVQVFTDSEYQLPYVLGSAHQGCLPPFPADVFMVPQYGYLTLNNGSQAVGRSSFYCLEYFPSQMLRTGNNFTFSYTFEDVPFHSSYAHSQSLDRLMNPLIDQYLYYLNKTQSNSGTLQQSRLLFSQAGPTSMSLQAKNWLPGPCYRQQRLSKQANDNNNSNFPWTAATKYHLNGRDSLVNPGPAMASHKDDEEKFFPMHGTLIFGKQGTNANDADLDNVMITDEEEIRTTNPVATEQYGTVSNNLQNSNTGPTTGTVNHQGALPGMVWQDRDVYLQGPIWAKIPHTDGHFHPSPLMGGFGLKHPPPQIMIKNTPVPANPPTNFSSAKFASFITQYSTGQVSVEIEWELQKENSKRWNPEIQYTSNYNKSVNVDFTVDTNGVYSEPRPIGTRYLTRNL

SEQ ID NO: 2758 - protein, 735 aa, synthetic construct
  REGION 1..735: note = source = /note="Description of Artificial Sequence: Synthetic polypeptide"
MAADGYLPDWLEDTLSEGIRQWWKLKPGPPPPRPAERHQDDSRGLVLPGYKYLGPFNGLDKGEPVNEADAAALEHDKAYDRQLDSGDNPYLKYNHADAEFQERLKEDTSFGGNLGRAVFQAKKRVLEPLGLVEEPVKTAPGKKRPVEHSPAEPDSSSGTGKAGQQPARKRLNFGQTGDADSVPDPQPLGQPPAAPTSLGSTTMATGSGAPMADNNEGADGVGNSSGNWHCDSQWLGDRVITTSTRTWALPTYNNHLYKQISSQSGASNDNHYFGYSTPWGYFDFNRFHCHFSPRDWQRLINNNWGFRPKRLNFKLFNIQVKEVTQNDGTTTIANNLTSTVQVFTDSEYQLPYVLGSAHQGCLPPFPADVFMVPQYGYLTLNNGSQAVGHSSSYCLEYFPSQMLRTGNNFTFSYTFEDVPFHSSYAHSQSLDRLMNPLIDQYLYYLNRTQSNSGTLQQSRLLFSQAGPTSMSLQAKNWLPGPCYRQQRLSKQANDNNNSNFPWTAATKYHLNGRDSLVNPGPAMASHKDDEEKFFPMHGTLIFGKQGTNANDADLEHVMITDEEEIRTTNPVATEQYGNVSNNLQNSNTGPTTENVNHQGALPGMVWQDRDVYLQGPIWAKIPHTDGHFHPSPLMGGFGLKHPPPQIMIKNTPVPANPPTNFSAAKFASFITQYSTGQVSVEIEWELQKENSKRWNPEIQYTSNYNKSVNVDFTVDTNGVYSEPRPIGTRYLTRNL

SEQ ID NO: 2759 - protein, 735 aa, synthetic construct
  REGION 1..735: note = source = /note="Description of Artificial Sequence: Synthetic polypeptide"
MAADGYLPDWLEDTLSEGIRQWWKLKPGPPPPKPAERHQDDSRGLVLPGHKYLGPFNGLDKGEPVNEADAAALEHDKAYDRQLDSGDNPYLKYNHADAEFQERLKEDTSFGGNLGRAVFQAKKRVLEPLGLVEEPVKTAPGKKRPVEHSPAEPDSSSGTGKAGQQPARKRLNFGQTGDADSVPDPQPLGQPPAAPTSLGSTTMATGSGAPMADNNEGADGVGNSSGNWHCDSQWLGDRVITTSTRTWALPTYNNHLYKQISSQSGASNDNHYFGYSTPWGYFDFNRFHCHFSPRDWQRLINNNWGFRPKRLNFKLFNIQVKEVTQNDGTTTIANNLTSTVQVFTDSEYQLPYVLGSAHQGCLPPFPADVFMVPQYGYLTLNNGSQAVGRSSFYCLEYFPSQMLRTGNNFTFSYTFEDVPFHSSYAHSQSLDRLMNPLIDQYLYYLNRTQSNSGTLQQSRLLFSQAGPTSMSLQAKNWLPGPCYRQQRLSKQANDNNNSNFPWTAATKYHLNGRDSLVNPGPAMASHKDDEEKFFPMHGTLIFGKQGTNANDADLEHVMITDEEEIRTTNPVATEQYGNVSNNLQNSNTGPTTENVNHQGALPGMVWQDRDVYLQGPIWAKIPHTDGHFHPSPLMGGFGLKHPPPQIMIKNTPVPANPPTNFSAAKFASFITQYSTGQVSVEIEWELQKENSKRWNPEIQYTSNYNKSVNVDFTVDANGVYSEPRPIGTRYLTRNL

SEQ ID NO: 2760 - protein, 735 aa, synthetic construct
  REGION 1..735: note = source = /note="Description of Artificial Sequence: Synthetic polypeptide"
MAADGYLPDWLEDTLSEGIRQWWKLKPGPPPPKPAERHKDDSRGLVLPGYKYLGPFNGLDKGEPVNEADAAALEHDKAYDRQLDSGDNPYLKYNHADAEFQERLKEDTSFGGNLGRAVFQAKKRVLEPLGLVEEPVKTAPGKKRPVEHSPAEPDSSSGTGKAGQQPARKRLNFGQTGDADSVPDPQPLGQPPAAPTSLGSTTMATGSGAPMADNNEGADGVGNSSGNWHCDSQWLGDRVITTSTRTWALPTYNNHLYKQISSQSGASNDNHYFGYSTPWGYFDFNRFHCHFSPRDWQRLINNNWGFRPKRLNFKLFNIQVKEVTQNDGTTTIANNLTSTVQVFTDSEYQLPYVLGSAHQGCLPPFPADVFMVPQYGYLTLNNGSQAVGRSSFYCLEYFPSQMLRTGNNFTFSYTFEDVPFHSSYAHSQSLDRLMNPLIDQYLYYLNRTQSNSGTLQQSRLLFSQAGPTSMSLQAKNWLPGPCYRQQRLSKQANDNNNSNFPWTAATKYHLNGRDSLVNPGPAMASHKDDEEKFFPMHGTLIFGKQGTNANDADLEHVMITDEEEIRTTNPVATEQYGNVSNNLQNSNTGPTTENVNHQGALPGMVWQDRDVYLQGPIWAKIPHTDGHFHPSPLMGGFGLKHPPPQIMIKNTPVPANPPTNFSAAKFASFITQYSTGQVSVEIEWELQKENSKRWNPEIQYTSNYNKSVNVDFTVDANGVYSEPRPIGTRYLTRNL

SEQ ID NO: 2761 - protein, 735 aa, synthetic construct
  REGION 1..735: note = source = /note="Description of Artificial Sequence: Synthetic polypeptide"
MAADGYLPDWLEDTLSEGIRQWWKLKPGPPPPRPAERHQDDSRGLVLPGYKYLGPFNGLDKGEPVNEADAAALEHDKAYDRQLDSGDNPYLKYNHADAEFQERLKEDTSFGGNLGRAVFQAKKRVLEPLGLVEEPVKTAPGKKRPVEHSPAEPDSSSGTGKAGQQPARKRLNFGQTGDADSVPDPQPLGQPPAAPTSLGSTTMATGSGAPMADNNEGADGVGNSSGNWHCDSQWLGDRVITTSTRTWALPTYNNHLYKQISSQSGASNDNHYFGYSTPWGYFDFNRFHCHFSPRDWQRLINNNWGFRPKRLNFKLFNIQVKEVTQNDGTTTIANNLTSTVQVFTDSEYQLPYVLGSAHQGCLPPFPADVFMVPQYGYLTLNNGSQAVGRSSSYCLEYFPSQMLRTGNNFTFSYTFEDVPFHSSYAHSQSLDRLMNPLIDQYLYYLNRTQSNSGTLQQSRLLFSQAGPTSMSLQAKNWLPGPCYRQQRLSKQANDNNNSNFPWTAATKYHLNGRDSLVNPGPAMASHKDDEEKFFPMHGTLIFGKQGTNANDADLEHVMITDEEEIRTTNPVATEQYGNVSNNLQNSNTGPTTENVNHQGALPGMVWQDRDVYLQGPIWAKIPHTDGHFHPSPLMGGFGLKHPPPQIMIKNTPVPANPPTNFSAAKFASFITQYSTGQVSVEIEWELQKENSKRWNPEIQYTSNYNKSVNVDFTVDANGVYSEPRPIGTRYLTRNL

SEQ ID NO: 2762 - protein, 735 aa, synthetic construct
  REGION 1..735: note = source = /note="Description of Artificial Sequence: Synthetic polypeptide"
MAADGYLPDWLEDTLSEGIRQWWKLKPGPPPPRPAERHQDDSRGLVLPGYKYLGPFNGLDKGEPVNEADAAALEHDKAYDRQLDSGDNPYLKYNHADAEFQERLKEDTSFGGNLGRAVFQAKKRVLEPLGLVEEPVKTAPGKKRPVEHSPAEPDSSSGTGKAGQQPARKRLNFGQTGDADSVPDPQPLGQPPAAPTSLGSTTMATGSGAPMADNNEGADGVGNSSGNWHCDSQWLGDRVITTSTRTWALPTYNNHLYKQISSQSGASNDNHYFGYSTPWGYFDFNRFHCHFSPRDWQRLINNNWGFRPKRLNFKLFNIQVKEVTQNDGTTTIANNLTSTVQVFTDSEYQLPYVLGSAHQGCLPPFPADVFMVPQYGYLTLNNGSQAVGRSSFYCLEYFPSQMLRTGNNFTFSYTFEDVPFHSSYAHSQSLDRLMNPLIDQYLYYPNRTQSNSGTLQQSRLLFSQAGPTSMSLQAKNWLPGPCYRQQRLSKQANDNNNSNFPWTAATKYHLNGRDSLVNPGPAMASHKDDEEKFFPMHGTLIFGKQGTNANDADLEHVMITDEEEIRTTNPVATEQYGNVSNNLQNSNTGPTTENVNHQGALPGMVWQDRDVYLQGPIWAKIPHTDGHFHPSPLMGGFGLKHPPPQIMIKNTPVPANPPTNFSAAKFASFITQYSTGQVSVEIEWELQKENSKRWNPEIQYTSNYNKSVNVDFTVDANGVYSEPRPIGTRYLTRNL

SEQ ID NO: 2763 - protein, 735 aa, synthetic construct
  REGION 1..735: note = source = /note="Description of Artificial Sequence: Synthetic polypeptide"
MAADGYLPDWLEDTLSEGIRQWWKLKPGPPPPRPAERHQDDSRGLVLPGYKYLGPFNGLDKGEPVNEADAAALEHDKAYDRQLDSGDNPYLKYNHADAEFQERLKEDTSFGGNLGRAVFQAKKRVLEPLGLVEEPVKTAPGKKRPVEHSPAEPDSSSGTGKAGQQPARKRLNFGQTGDADSVPDPQPLGQPPAAPTSLGSTTMATGSGAPMADNNEGADGVGNSSGNWHCDSQWLGDRVITTSTRTWALPTYNNHLYKQISSQSGASNDNHYFGYSTPWGYFDFNRFHCHFSPRDWQRLINNNWGFRPKRLNFKLFNIQVKEVTQNDGTTTIANNLTSTVQVFTDSEYQLPYVLGSAHQGCLPPFPADVFMVPQYGYLTLNNGSQAVGRSSFYCLEYFPSQMLRTGNNFTFSYTFEDVPFHSSYAHSQSLDRLMNPLIDQYLYYLNKTQSNSGTLQQSRLLFSQAGPTSMSLQAKNWLPGPCYRQQRLSKQANDNNNSNFPWTAATKYHLNGRDSLVNPGPAMASHKDDEEKFFPMHGTLIFGKQGTNANDADLDNVMITDEEEIRTTNPVATEQYGTVSNNLQNSNTGPTTGTVNHQGALPGMVWQDRDVYLQGPIWAKIPHTDGHFHPSPLMGGFGLKHPPPQIMIKNTPVPANPPTNFSSAKFASFITQYSTGQVSVEIEWELQKENSKRWNPEIQYTSNYNKSVNVDFTVDTNGVYSEPRPIGTRYLTRNL

SEQ ID NO: 2764 - protein, 735 aa, synthetic construct
  REGION 1..735: note = source = /note="Description of Artificial Sequence: Synthetic polypeptide"
MAADGYLPDWLEDTLSEGIRQWWKLKPGPPPPKPAERHQDDSRGLVLPGHKYLGPFNGLDKGEPVNEADAAALEHDKAYDRQLDSGDNPYLKYNHADAEFQERLKEDTSFGGNLGRAVFQAKKRVLEPLGLVEEPVKTAPGKKRPVEHSPAEPDSSSGTGKAGQQPARKRLNFGQTGDADSVPDPQPLGQPPAAPTSLGSTTMATGSGAPMADNNEGADGVGNSSGNWHCDSQWLGDRVITTSTRTWALPTYNNHLYKQISSQSGASNDNHYFGYSTPWGYFDFNRFHCHFSPRDWQRLINNNWGFRPKRLNFKLFNIQVKEVTQNDGTTTIANNLTSTVQVFTDSEYQLPYVLGSAHQGCLPPFPADVFMVPQYGYLTLNNGSQAVGHSSSYCLEYFPSQMLRTGNNFTFSYTFEDVPFHSSYAHSQSLDRLMNPLIDQYLYYLNRTQSNSGTLQQSRLLFSQAGPTSMSLQAKNWLPGPCYRQQRLSKQANDNNNSNFPWTAATKYHLNGRDSLVNPGPAMASHKDDEEKFFPMHGTLIFGKQGTNANDADLEHVMITDEEEIRTTNPVATEQYGNVSNNLQNSNTGPTTENVNHQGALPGMVWQDRDVYLQGPIWAKIPHTDGHFHPSPLMGGFGLKHPPPQIMIKNTPVPANPPTNFSAAKFASFITQYSTGQVSVEIEWELQKENSKRWNPEIQYTSNYNKSVNVDFTVDTNGVYSEPRPIGTRYLTRNL

SEQ ID NO: 2765 - protein, 735 aa, synthetic construct
  REGION 1..735: note = source = /note="Description of Artificial Sequence: Synthetic polypeptide"
MAADGYLPDWLEDTLSEGIRQWWKLKPGPPPPRPAERHQDDSRGLVLPGYKYLGPFNGLDKGEPVNEVDAAALEHDKAYDRQLDSGDNPYLKYNHADAEFQERLKEDTSFGGNLGRAVFQAKKRVLEPLGLVEEPVKTAPGKKRPVEHSPAEPDSSSGTGKAGQQPARKRLNFGQTGDADSVPDPQPLGQPPAAPTSLGSTTMATGSGAPMADNNEGADGVGNSSGNWHCDSQWLGDRVITTSTRTWALPTYNNHLYKQISSQSGASNDNHYFGYSTPWGYFDFNRFHCHFSPRDWQRLINNNWGFRPKRLNFKLFNIQVKEVTQSDGTTTIANNLTSTVQVFTDSEYQLPYVLGSAHQGCLPPFPADVFMVPQYGYLTLNNGSQAVGRSSFYCLEYFPSQMLRTGNNFTFSYTFEDVPFHSSYAHSQSLDRLMNPLIDQYLYYLNRTQSNSGTLQQSRLLFSQAGPTSMSLQAKNWLPGPCYRQQRLSKQANDNNNSNFPWTAATKYHLNGRDSLVNPGPAMASHKDDEEKFFPMHGTLIFGKQGTNANDADLEHVMITDEEEIRTTNPVATEQYGNVSNNLQNSNTGPTTENVNHQGALPGMVWQDRDVYLQGPIWAKIPHTDGHFHPSPLMGGFGLKHPPPQIMIKNTPVPANPPTNFSAAKFASFITQYSTGQVSVEIEWELQKENSKRWNPEIQYTSNYNKSVNVDFTVDANGVYSEPRPIGTRYLTRNL

SEQ ID NO: 2766 - protein, 735 aa, synthetic construct
  REGION 1..735: note = source = /note="Description of Artificial Sequence: Synthetic polypeptide"
MAADGYLPDWLEDTLSEGIRQWWKLKPGPPPPRPAERHQDDSRGLVLPGYKYLGPFNGLDKGEPVNEADAAALEHDKAYDRQLDSGDNPYLKYNHADAEFQERLKEDTSFGGNLGRAVFQAKKRVLEPLGLVEEPVKTAPGKKRPVEHSPAEPDSSSGTGKAGQQPARKRLNFGQTGDADSVPDPQPLGQPPAAPTSLGSTTMATGSGAPMADNNEGADGVGNSSGNWHCDSQWLGDRVITTSTRTWALPTYNNHLYKQISSQSGASNDNHYFGYSTPWGYFDFNRFHCHFSPRDWQRLINNNWGFRPKRLNFKLFNIQVKEVTQNDGTTTIANNLTSTVQVFTDSEYQLPYVLGSAHQGCLPPFPADVFMVPQYGYLTLNNGSQAVGRSSFYCLEYFPSQMLRTGNNFTFSYTFEDVPFHSSYAHSQSLDRLMNPLIDQYLYYLNRTQSNSGTLQQSRLLFSQAGPTSMSLQAKNWLPGPCYRQQRLSKQANDNNNSNFPWTAATKYHLNGRDSLVNPGPAMASHKDDEEKFFPMHGTLIFGKQGTNANDADLEHVMITDEEEIRTTNPVATEQYGNVSNNLQNSNTGPTTENVNHQGALPGMVWQDRDVYLQGPIWAKIPHTDGHFHPSPLMGGFGLKHPPPQIMIKNTPVPANPPTNFSAAKFASFITQYSTGQVSVEIEWELQKENSKRWNPEIQYTSNYNKSVNVDFTVDTNGVYSEPRPIGTRYLTRNL

SEQ ID NO: 2767 - protein, 735 aa, synthetic construct
  REGION 1..735: note = source = /note="Description of Artificial Sequence: Synthetic polypeptide"
MAADGYLPDWLEDTLSEGIRQWWKLKPGPPPPKPAERHQDDSRGLVLPGHKYLGPFNGLDKGEPVNEADAAALEHDKAYDRQLDSGDNPYLKYNHADAEFQERLKEDTSFGGNLGRAVFQAKKRVLEPLGLVEEPVKTAPGKKRPVEHSPAEPDSSSGTGKAGQQPARKRLNFGQTGDADSVPDPQPLGQPPAAPTSLGSTTMATGSGAPMADNNEGADGVGNSSGNWHCDSQWLGDRVITTSTRTWALPTYNNHLYKQISSQSGASNDNHYFGYSTPWGYFDFNRFHCHFSPRDWQRLINNNWGFRPKRLNFKLFNIQVKEVTQNDGTTTIANNLTSTVQVFTDSEYQLPYVLGSAHQGCLPPFPADVFMVPQYGYLTLNNGSQAVGHSSSYCLEYFPSQMLRTGNNFTFSYTFEDVPFHSSYAHSQSLDRLMNPLIDQYLYYLNRTQSNSGTLQQSRLLFSQAGPTSMSLQAKNWLPGPCYRQQRLSKQANDNNNSNFPWTAATKYHLNGRDSLVNPGPAMASHKDDEEKFFPMHGTLIFGKQGTNANDADLEHVMITDEEEIRTTNPVATEQYGNVSNNLQNSNTGPTTENVNHQGALPGMVWQDRDVYLQGPIWAKIPHTDGHFHPSPLMGGFGLKHPPPQIMIKNTPVPANPPTNFSAAKFASFITQYSTGQVSVEIEWELQKENSKRWNPEIQYTSNYNKSVNVDFTVDANGVYSEPRPIGTRYLTRNL

SEQ ID NO: 2768 - protein, 735 aa, synthetic construct
  REGION 1..735: note = source = /note="Description of Artificial Sequence: Synthetic polypeptide"
MAADGYLPDWLEDTLSEGIRQWWKLKPGPPPPRPAERHQDDSRGLVLPGYKYLGPFNGLDKGEPVNEADAAALEHDKAYDRQLDSGDNPYLKYNHADAEFQERLKEDTSFGGNLGRAVFQAKKRVLEPLGLVEEPVKTAPGKKRPVEHSPAEPDSSSGTGKAGQQPARKRLNFGQTGDADSVPDPQPLGQPPAAPTSLGSTTMATGSGAPMADNNEGADGVGNSSGNWHCDSQWLGDRVITTSTRTWALPTYNNHLYKQISSQSGASNDNHYFGYSTPWGYFDFNRFHCHFSPRDWQRLINNNWGFRPKRLNFKLFNIQVKEVTQNDGTTTIANNLTSTVQVFTDSEYQLPYVLGSAHQGCLPPFPADVFMVPQYGYLTLNNGSQAVGRSSFYCLEYFPSQMLRTGNNFTFSYTFEDVPFHSSYAHSQSLDRLMNPLIDQYLYYLNRTQSNSGTLQQSRLLFSQAGPTSMSLQAKNWLPGPCYRQQRLSKQANDNNNSNFPWTAATKYHLNGRDSLVNPGPAMASHKDDEEKFFPMHGTLIFGKQGTNANDADLEHVMITDEEEIRTTNPVATEQYGNVSNNLQNSNTGPTTENVNHQGALPGMVWQDRDVYLQGPIWAKIPHTDGHFHPSPLMGGFGLKHPPPQIMIKNTPVPANPPTNFSAAKFASFITQYSTGQASVEIEWELQKENSKRWNPEIQYTSNYNKSVNVDFTVDANGVYSEPRPIGTRYLTRNL

SEQ ID NO: 2769 - protein, 735 aa, synthetic construct
  REGION 1..735: note = source = /note="Description of Artificial Sequence: Synthetic polypeptide"
MAADGYLPDWLEDTLSEGIRQWWKLKPGPPPPKPAGRHKDDSRGLVLPGYKYLGPFNGLDKGEPVNEADAAALEHDKAYDRQLDSGDNPYLKYNHAGAEFQERLKEDTSFGGNLGRAVFQAKKRVLEPLGLVEEPVKTAPGKKRPVEHSPVEPDSSSGTGKAGQQPARKRLNFGQTGDADSVPDPQPLGQPPAAPTSLGSTTMATGSGAPMADNNEGADGVGNSSGNWHCDSQWLGDRVITTSTRTWALPTYNNHLYKQISSQSGAANDNHYFGYSTPWGYFDFNRFHCHFSPRDWQRLINNNWGFRPKRLNFKLFNIQVKEVTQNDGTTTIANNLTSTVQVFTDSEYQLPYVLGSAHQGCLPPFPADVFMVPQYGYLTLNNGSQAVGRSSFYCLEYFPSQMLRTGNNFTFSYTFEDVPFHSSYAHSQSLDRLMNPLIDQYLYYLNRTQSNSGTLQQSRLLFSQAGPTSMSLQAKNWLPGPCYRQQRLSKQANDNNNSNFPWTAATKYHLNGRDSLVNPGPAMASHKDDEEKFFPMHGTLIFGKQGTNANDADLEHVMITDEEEIRTTNPVATEQYGNVSNNLQNSNTGPTTENVNHQGALPGMVWQDRDVYLQGPIWAKIPHTDGHFHPSPLMGGFGLKHPPPQIMIKNTPVPANPPTNFSAAKFASFITQYSTGQVSVEIEWELQKENSKRWNPEIQYTSNYNKSVNVDFTVDANGVYSEPRPIGTRYLTRNL

SEQ ID NO: 2770 - protein, 735 aa, synthetic construct
  REGION 1..735: note = source = /note="Description of Artificial Sequence: Synthetic polypeptide"
MAADGYLPDWLEDTLSEGIRQWWKLKPGPPPPRPAERHQDDSRGLVLPGYKYLGPFNGLDKGEPVNEADAAALEHDKAYDRQLDSGDNPYLKYNHADAEFQERLKEDTSFGGNLGRAVFQAKKRVLEPLGLVEEPVKTAPGKKRPVEHSPAEPDSSSGTGKAGQQPARKRLNFGQTGDADSVPDPQPLGQPPAAPTSLGSTTMATGSGAPMADNNEGADGVGNSSGNWHCDSQWLGDRVITTSTRTWALPTYNNHLYKQISSQSGASNDNHYFGYSTPWGYFDFNRFHCHFSPRDWQRLINNNWGFRPKRLNFKLFNIQVKEVTQNDGTTTIANNLTSTVQVFTDSEYQLPYVLGSAHQGCLPPFPADVFMVPQYGYLTLNNGSQAVGRSSFYCLEYFPSQMLRTGNNFTFSYTFEDVPFHSSYAHSQSLDRLMNPLIDQYLYYLNRTQSNSGTLQQSRLLFSQAGPTSMSLQAKNWLPGPCYRQQRLSKQANDNNNSNFPWTAATKYHLNGRDSLVNPGPAMASHKDDEEKFFPMHGTLIFGKQGTNANDADLEHVMITDEEEIRTTNPVATEQYGNVSNNLQNSNTGPTTENVNHQGALPGMVWQDRDVYLQGPIWAKIPHTDGHFHPSPLMGGFGLKHPPPQIMIKNTPVPAYPPTNFSAAKFASFITQYSTRQVSVEIEWELQKENSKRWNPEIQYTSNYNKSVNVDFTVDANGVYSEPRPIGTRYLTRNL

SEQ ID NO: 2771 - protein, 735 aa, synthetic construct
  REGION 1..735: note = source = /note="Description of Artificial Sequence: Synthetic polypeptide"
MAADGYLPDWLEDTLSEGIRQWWKLKPGPPPPRPAERHQDDSRGLVLPGYKYLGPFNGLDKGEPVNEADAAALEHDKAYDRQLDSGDNPYLKYNHADAEFQERLKEDTSFGGNLGRAVFQAKKRVLEPLGLVEEPVKTAPGKKRPVEHSPAEPDSSSGTGKAGQQPARKRLNFGQTGDADSVPDPQPLGQPPAAPTSLGSTTMATGSGAPMADNNEGADGVGNSSGNWHCDSQWLGDRVITTSTRTWALPTYNNHLYKQISSQSGASNDNHYFGYSTPWGYFDFNRFHCHFSPRDWQRLINNNWGFRPKRLNFKLFNIQVKEVTQNDGTTTIANNLTSTVQVFTDSEYQLPYVLGSAHQGCLPPFPADVFMVPQYGYLTLNNGSQAVGRSSFYCLEYFPSQMLRTGNNFTFSYTFEDVPFHSSYAHSQSLDRLMNPLIDQYLYYLNRTQSNSGTLQQSRLLFSQAGPTSMSLQAKNWLPGPCYRQQRLSKQANDNNNSNFPWTAATKYHLNGRDSLVNPGPAMASHKDDEEKFFPMHGTLIFGKQGTNANDADLDNVMITDEEEIRTTNPVATEQYGTVSNNLQNSNTGPTTGTVNHQGALPGMVWQDRDVYLQGPIWAKIPHTDGHFHPSPLMGGFGLKHPPPQIMIKNTPVPANPPTNFSSAKFASFITQYSTGQVSVEIEWELQKENSKRWNPEIQYTSNYNKSVNVDFTVDTNGVYSEPRPIGTRYLTRNL

SEQ ID NO: 2772 - protein, 735 aa, synthetic construct
  REGION 1..735: note = source = /note="Description of Artificial Sequence: Synthetic polypeptide"
MAADGYLPDWLEDILSEGIRQWWKLKPGPPPPKPAERHKDDSRGLVLPGYKYLGPFNGLDKGEPVNEADAAALEHDKAYDRQLDSGDNPYLKYNHADAEFQERLKEDTSFGGNLGRAVFQAKKRVLEPLGLVEEPVKTAPGKKRPVEQSPAEPDSSSGTGKAGNQPARKRLNFGQTGDADSVPDPQPLGQPPAAPSGLGSTTMATGSGAPMADNNEGADGVGNSSGNWHCDSQWLGDRVITTSTRTWALPTYNNHLYKQISSQSGAANDNHYFGYSTPWGYFDFNRFHCHFSPRDWQRLINNNWGFRPKRLNFKLFNIQVKEVTQNDGTTTIANNLTSTVQVFTDSEYQLPYVLGSAHQGCLPPFPADVFMVPQYGYLTLNNGSQAVGRSSFYCLEYFPSQMLRTGNNFTFSYTFEDVPFHSSYAHSQSLDRLMNPLIDQYLYYLNKTQSNSGTLQQSRLLFSQAGPTSMSLQAKNWLPGPCYRQQRLSKQANDNNNSNFPWTAATKYHLNGRDSLVNPGPAMASHKDDEEKFFPMHGTLIFGKQGTNANDADLDNVMITDEEEIRTTNPVATEQYGTVSNNLQNSNTGPTTGTVNHQGALPGMVWQDRDVYLQGPIWAKIPHTDGHFHPSPLMGGFGLKHPPPQIMIKNTPVPANPPTNFSSAKFASFITQYSTGQVSVEIEWELQKENSKRWNPEIQYTSNYNKSVNVDFTVDTNGVYSEPRPIGTRYLTRNL

SEQ ID NO: 2773 - protein, 735 aa, synthetic construct
  REGION 1..735: note = source = /note="Description of Artificial Sequence: Synthetic polypeptide"
MAADGYLPDWLEDTLSEGIRQWWKLKPGPPPPRPAERHQDDSRGLVLPGYKYLGPFNGLDKGEPVNEADAAALEHDKAYDRQLDSGDNPYLKYNHAGAEFQERLKEDTSFGGNLGRAVFQAKKRVLEPLGLVEEPVKTAPGKKRPVEHSPVEPDSSSGTGKAGQQPARKRLNFGQTGDADSVPDPQPLGQPPAAPTSLGSTTMATGSGAPMADNNEGADGVGNSSGNWHCDSQWLGDRVITTSTRTWALPTYNNHLYKQISSQSGAANDNHYFGYSTPWGYFDFNRFHCHFSPRDWQRLINNNWGFRPKRLNFKLFNIQVKEVTQNDGTTTIANNLTSTVPVFTDSEYQLPYVLGSAHQGCLPPFPADVFMVPQYGYLTLNNGSQAVGRSSFYCLEYFPSQMLRTGNNFTFSYTFEDVPFHSSYAHSQSLDRLMNPLIDQYLYYLNKTQSNSGTLQQSRLLFSQAGPTSMSLQAKNWLPGPCYRQQRLSKQANDNNNSNFPWTAATKYHLNGRDSLVNPGPAMASHKDDEEKFFPMHGTLIFGKQGTNANDADLDNVMITDEEEIRTTNPVATEQYGTVSNNLQNSNTGPTTGTVNHQGALPGMVWQDRDVYLQGPIWAKIPHTDGHFHPSPLMGGFGLKHPPPQIMIKNTPVPANPPTNFSSAKFASFITQYSTGQVSVEIEWELQKENSKRWNPEIQYTSNYNKSVNVDFTVDTNGVYSEPRPIGTRYLTRNL

SEQ ID NO: 2774 - protein, 734 aa, synthetic construct
  REGION 1..734: note = source = /note="Description of Artificial Sequence: Synthetic polypeptide"
MAADGYLPDWLEDTLSEGIRQWWKLKPGPPPRPAERHQDDSRGLVLPGYKYLGPFNGLDKGEPVNEADAAALEHDKAYDRQLDSGDNPYLKYNHADAEFQERLKEDTSFGGNLGRAVFQAKKRVLEPLGLVEEPVKTAPGKKRPVEHSPAEPDSSSGTGKAGQQPARKRLNFGQTGDADSVPDPQPLGQPPAAPTSLGSTTMATGSGAPMADNNEGADGVGNSSGNWHCDSQWLGDRVITTSTRTWALPTYNNHLYKQISSQSGASNDNHYFGYSTPWGYFDFNRFHCHFSPRDWQRLINNNWGFRPKRLNFKLFNIQVKEVTQNDGTTTIANNLTSTVQVFTDSEYQLPYVLGSAHQGCLPPFPADVFMVPQYGYLTLNNGSQAVGRSSFYCLEYFPSQMLRTGNNFTFSYTFEDVPFHSSYAHSQSLDRLMNPLIDQYLYYLNRTQSNSGTLQQSRLLFSQAGPTSMSLQAKNWLPGPCYRQQRLSKQANDNNNSNFPWTAATKYHLNGRDSLVNPGPAMASHKDDEEKFFPMHGTLIFGKQGTNANDADLEHVMITDEEEIRTTNPVATEQYGNVSNNLQNSNTGPTTENVNHQGALPGMVWQDRDVYLQGPIWAKIPHTDGHFHPSPLMGGFGLKHPPPQIMIKNTPVPANPPTNFSAAKFASFITQYSTGQVSVEIEWELQKENSKRWNPEIQYTSNYNKSVNVDFTVDANGVYSEPRPIGTRYLTRNL

SEQ ID NO: 2775 - protein, 735 aa, synthetic construct
  REGION 1..735: note = source = /note="Description of Artificial Sequence: Synthetic polypeptide"
MAADGYLPDWLEDTLSEGIRQWWKLKPGPPPPKPAERHQDDSRGLVLPGHKYLGPFNGLDKGEPVNEADAAALEHDKAYDRQLDSGDNPYLKYNHADAEFQERLKEDTSFGGNLGRAVFQAKKRVLEPLGLVEEPVKTAPGKKRPVEHSPAEPDSSSGTGKAGQQPARKRLNFGQTGDADSVPDPQPLGQPPAAPTSLGSTTMATGSGAPMADNNEGADGVGNSSGNWHCDSQWLGDRVITTSTRTWALPTYNNHLYKQISSQSGASNDNHYFGYSTPWGYFDFNRFHCHFSPRDWQRLINNNWGFRPKRLNFKLFNIQVKEVTQNDGTTTIANNLTSTVQVFTDSEYQLPYVLGSAHQGCLPPFPADVFMVPQYGYLTLNNGSQAVGRSSFYCLEYFPSQMLRTGNNFTFSYTFEDVPFHSSYAHSQSLDRLMNPLIDQYLYYLNRTQSNSGTLQQSRLLFSQAGPTSMSLQAKNWLPGPCYRQQRLSKQANDNNNSNFPWTAATKYHLNGRDSLVNPGPAMASHKDDEEKFFPMHGTLIFGKQGTNANDADLEHVMITDEEEIRTTNPVATEQYGNVSNNLQNSNTGPTTENVNHQGALPGMVWQDRDVYLQGPIWAKIPHTDGHFHPSPLMGGFGLKHPPPQIMIKNTPVPANPPTNFSAAKFASFITQYSTGQVSVEIEWELQKENSKRWNPEIQYTSNYNKSVNVDFTVDTNGVYSEPRPIGTRYLTRNL

SEQ ID NO: 2776 - protein, 735 aa, synthetic construct
  REGION 1..735: note = source = /note="Description of Artificial Sequence: Synthetic polypeptide"
MAADGYLPDWLEDTLSEGIRQWWKLKPGPPPPRPAERHQDDSRGLVLPGYKYLGPFNGLDKGEPVNEADAAALEHDKAYDRQLDSGDNPYLKYNHADAEFQERLKEDTSFGGNLGRAVFQAKKRVLEPLGLVEEPVKTAPGKKRPVEHSPAEPDSSSGTGKAGQQPARKRLNFGQTGDADSVPDPQPLGQPPAAPTSLGSTTMATGSGAPMADNNEGADGVGNSSGNWHCDSQWLGDRVITTSTRTWALPTYNNHLYKQISSQSGASNDNHYFGYSTPWGYFDFNRFHCHFSPRDWQRLINNNWGFRPKRLNFKLFNIQVKEVTQNDGTTTIANNLTSTVQVFTDSEYQLPYVLGSAHQGCLPPFPADVFMVPQYGYLTLNNGSQAVGHSSSYCLEYFPSQMLRTGNNFTFSYTFEDVPFHSSYAHSQSLDRLMNPLIDQYLYYLNRTQSNSGTLQQSRLLFSQAGPTSMSLQAKNWLPGPCYRQQRLSKQANDNNNSNFPWTAATKYHLNGRDSLVNPGPAMASHKDDEEKFFPMHGTLIFGKQGTNANDADLEHVMITDEEEIRTTNPVATEQYGNVSNNLQNSNTGPTTENVNHQGALPGMVWQDRDVYLQGPIWAKIPHTDGHFHPSPLMGGFGLKHPPPQIMIKNTPVPANPPTNFSAAKFASFITQYSTGQVSVEIEWELQKENSKRWNPEIQYTSNYNKSVNVDFTVDANGVYSEPRPIGTRYLTRNL

SEQ ID NO: 2777 - protein, 735 aa, synthetic construct
  REGION 1..735: note = source = /note="Description of Artificial Sequence: Synthetic polypeptide"
MAADGYLPDWLEDTLSEGIRQWWKLKPGPPPPRPAERHQDDSRGLVLPGYKYLGPFNGLDKGEPVNEADAAALEHDKAYDRQLDSGDNPYLKYNHADAEFQERLKEDTSFGGNLGRAVFQAKKRVLEPLGLVEEPVKTAPGKKRPVEHSPAEPDSSSGTGKAGQQPARKRLNFGQTGDADSVPDPQPLGQPPAAPTSLGSTTMATGSGAPMADNNEGADGVGNSSGNWHCDSQWLGDRVITTSTRTRALPTYNNHLYKQISSQSGASNDNHYFGYSTPWGYFDFNRFHCHFSPRDWQRLTNNNWGFRPKRLNFKLFNIQVKEVTQNDGTTTIANNLTSTVQVFTDSEYQLPYVLGSAHQGCLPPFPADVFMVPQYGYLTLNNGSQAVGRSSFYCLEYFPSQMLRTGNNFTFSYTFEDVPFHSSYAHSQSLDRLMNPLIDQYLYYLNRTQSNSGTLQQSRLLFSQAGPTSMSLQAKNWLPGPCYRQQRLSKQANDNNNSNFPWTAATKYHLNGRDSLVNPGPAMASHKDDEEKFFPMHGTLIFGKQGTNANDADLEHVMITDEEEIRTTNPVATEQYGNVSNNLQNSNTGPTTENVNHQGALPGMVWQDRDVYLQGPIWAKIPHTDGHFHPSPLMGGFGLKHPPPQIMIKNTPVPANPPTNFSAAKFASFITQYSTGQVSVEIEWELQKENSKRWNPEIQYTSNYNKSVNVDFTVDANGVYSEPRPIGTRYLTRNL

SEQ ID NO: 2778 - protein, 735 aa, synthetic construct
  REGION 1..735: note = source = /note="Description of Artificial Sequence: Synthetic polypeptide"
MAADGYLPDWLEDTLSEGIRQWWKLKPGPPPPKPAERHKDDSRGLVLPGYKYLGPFNGLDKGEPVNEADAAALEHDKAYDRQLDSGDNPYLKYNHADAEFQERLKEDTSFGGNLARAVFQAKKRVLEPLGLVEEPVKTAPGKKRPVEHSPAGPDSSSGTGKSGQQPARKRLNFGQTGDADSVPDPQPLGQPPAAPSGLGTNTMASGSGAPMADNNEGADGVGNSSGNWHCDSTWMGDRVITTSTRTWALPTYNNHLYKQISSQSGAANDNHYFGYSTPWGYFDFNRFHCHFSPRDWQRLINNNWGFRPKRLNFKLFNIQVKEVTQNDGTTTIANNLTSTVQVFTDSEYQLPYVLGSAHQGCLPPFPADVFMVPQYGYLTLNNGSQAVGRSSFYCLEYFPSQMLRTGNNFTFSYTFEDVPFHSSYAHSQSLDRLMNPLIDQYLYYLNRTQSNSGTLQQSRLLFSQAGPTSMSLQAKNWLPGPCYRQQRLSKQANDNNNSNFPWTAATKYHLNGRDSLVNPGPAMASHKDDEEKFFPMHGTLIFGKQGTNANDADLEHVMITDEEEIRTTNPVATEQYGNVSNNLQNSNTGPTTENVNHQGALPGMVWQDRDVYLQGPIWAKIPHTDGHFHPSPLMGGFGLKHPPPQIMIKNTPVPANPPTNFSAAKFASFITQYSTGQVSVEIEWELQKENSKRWNPEIQYTSNYNKSVNVDFTVDANGVYSEPRPIGTRYLTRNL

SEQ ID NO: 2779 - protein, 734 aa, synthetic construct
  REGION 1..734: note = source = /note="Description of Artificial Sequence: Synthetic polypeptide"
MAADGYLPDWLEDTLSEGIRQWWKLKPGPPPPRPAERHQDDSRGLVLPGYKYLGPFNGLDKGEPVNEADAAALEHDKAYDRQLDSGDNPYLKYNHADAEFQERLKEDTSFGGNLGRAVFQAKKRVLEPLGLVEEPVKTAPGKKRPVEHSPAEPDSSSGTGKAGQQPARKRLNFGQTGDADSVPDPQPLGQPPAAPTSLGSTTMATGSGAPMADNNEGADGVGNSSGNWHCDSQWLGDRVITTSTRTWALPTYNNHLYKQISSQSGASNDNHYFGYSTPWGYFDFNRFHCHFSPRDWQRLINNNWGFRPKRLNFKLFNIQVKEVTQNDGTTTIANNLTSTVQVFTDSEYQLPYVLGSAHQGCLPPFPADVFMVPQYGYLTLNNGSQAVGRSSFYCLEYFPSQMLRTGNNFTFSYTFEDVPFHSSYAHSQSLDRLMNPLIDQYLYYLNRTQSNSGTLQQSRLLFSQAGPTSMSLQAKNWLPGPCYRQQRLSKQANDNNSNFPWTAATKYHLNGRDSLVNPGPAMASHKDDEEKFFPMHGTLIFGKQGTNANDADLEHVMITDEEEIRTTNPVATEQYGNVSNNLQNSNTGPTTENVNHQGALPGMVWQDRDVYLQGPIWAKIPHTDGHFHPSPLMGGFGLKHPPPQIMIKNTPVPANPPTNFSAAKFASFITQYSTGQVSVEIEWELQKENSKRWNPEIQYTSNYNKSVNVDFTVDANGVYSEPRPIGTRYLTRNL

SEQ ID NO: 2780 - protein, 735 aa, synthetic construct
  REGION 1..735: note = source = /note="Description of Artificial Sequence: Synthetic polypeptide"
MAADGYLPDWLEDTLSEGIRQWWKLKPGPPPPKPAERHKDDSRGLVLPGYKYLGPFNGLDKGEPVNEADAAALEHDKAYDRQLDSGDNPYLKYNHADAEFQERLKEDTSFGGNLARAVFQAKKRVLEPLGLVEEPVKTAPGKKRPVEHSPAGPDSSSGTGKSGQQPARKRLNFGQTGDADSVPDPQPLGQPPAAPTSLGSTTMATGSGAPMADNNEGADGVGNSSGNWHCDSQWLGDRVITTSTRTWALPTYNNHLYKQISSQSGASNDNHYFGYSTPWGYFDFNRFHCHFSPRDWQRLINNNWGFRPKRLNFKLFNIQVKEVTQNDGTTTIANNLTSTVQVFTDSEYQLPYVLGSAHQGCLPPFPADVFMVPQYGYLTLNNGSQAVGRSSFYCLEYFPSQMLRTGNNFTFSYTFEDVPFHSSYAHSQSLDRLMNPLIDQYLYYLNRTQSNSGTLQQSRLLFSQAGPTSMSLQAKNWLPGPCYRQQRLSKQANDNNNSNFPWTAATKYHLNGRDSLVNPGPAMASHKDDEEKFFPMHGTLIFGKQGTNANDADLEHVMITDEEEIRTTNPVATEQYGNVSNNLQNSNTGPTTENVNHQGALPGMVWQDRDVYLQGPIWAKIPHTDGHFHPSPLMGGFGLKHPPPQIMIKNTPVPANPPTNFSAAKFASFITQYSTGQVSVEIEWELQKENSKRWNPEIQYTSNYNKSVNVDFTVDANGVYSEPRPIGTRYLTRNL

SEQ ID NO: 2781 - protein, 735 aa, synthetic construct
  REGION 1..735: note = source = /note="Description of Artificial Sequence: Synthetic polypeptide"
MAADGYLPDWLEDTLSEGIRQWWKLKPGPPPPKPAGRHKDDSRGLVLPGYKYLGPFNGLDKGEPVNEADAAALEHDKAYDRQLDSGDNPYLKYNHAGAEFQERLKEDTSFGGNLGRAVFQAKKRVLEPLGLVEEPVKTAPGKKRPVEHSPVEPDSSSGTGKAGQQPARKRLNFGQTGDADSVPDPQPLGQPPAAPTSLGSTTMATGSGAPMADNNEGADGVGNSSGNWHCDSQWLGDRVITTSTRTWALPTYNNHLYKQISSQSGAANDNHYFGYSTPWGYFDFNRFHCHFSPRDWQRLINNNWGFRPKRLNFKLFNIQVKEVTQNDGTTTIANNLTSTVPVFTDSEYQLPYVLGSAHQGCLPPFPADVFMVPQYGYLTLNNGSQAVGRSSFYCLEYFPSQMLRTGNNFTFSYTFEDVPFHSSYAHSQSLDRLMNPLIDQYLYYLNKTQSNSGTLQQSRLLFSQAGPTSMSLQAKNWLPGPCYRQQRLSKQANDNNNSNFPWTAATKYHLNGRDSLVNPGPAMASHKDDEEKFFPMHGTLIFGKQGTNANDADLEHVMITDEEEIRTTNPVATEQYGNVSNNLQNSNTGPTTENVNHQGALPGMVWQDRDVYLQGPIWAKIPHTDGHFHPSPLMGGFGLKHPPPQIMIKNTPVPANPPTNFSAAKFASFITQYSTGQVSVEIEWELQKENSKRWNPEIQYTSNYNKSVNVDFTVDANGVYSEPRPIGTRYLTRNL

SEQ ID NO: 2782 - protein, 735 aa, synthetic construct
  REGION 1..735: note = source = /note="Description of Artificial Sequence: Synthetic polypeptide"
MAADGYLPDWLEDTLSEGIRQWWKLKPGPPPPKPAGRHKDDSRGLVLPGYKYLGPFNGLDKGEPVNEADAAALEHDKAYDRQLDSGDNPYLKYNHAGAEFQERLKEDTSFGGNLGRAVFQAKKRVLEPLGLVEEPVKTAPGKKRPVEHSPVEPDSSSGTGKAGQQPARKRLNFGQTGDADSVPDPQPLGQPPAAPTSLGSTTMATGSGAPMADNNEGADGVGNSSGNWHCDSQWLGDRVITTSTRTWALPTYNNHLYKQISSQSGAANDNHYFGYSTPWGYFDFNRFHCHFSPRDWQRLINNNWGFRPKRLNFKLFNIQVKEVTQNDGTTTIANNLTSTVPVFTDSEYQLPYVLGSAHQGCLPPFPADVFMVPQYGYLTLNNGSQAVGRSSFYCLEYFPSQMLRTGNNFTFSYTFEDVPFHSSYAHSQSLDRLMNPLIDQYLYYLNKTQSNSGTLQQSRLLFSQAGPTSMSLQAKNWLPGPCYRQQRLSKQANDNNNSNFPWTAATKYHLNGRDSLVNPGPAMASHKDDEEKFFPMHGTLIFGKQGTNANDADLDNVMITDEEEIRTTNPVATEQYGTVSNNLQNSNTGPTTGTVNHQGALPGMVWQDRDVYLQGPIWAKIPHTDGHFHPSPLMGGFGLKHPPPQIMIKNTPVPANPPTNFSAAKFASFITQYSTGQVSVEIEWELQKENSKRWNPEIQYTSNYNKSVNVDFTVDANGVYSEPRPIGTRYLTRNL

SEQ ID NO: 2783 - protein, 735 aa, synthetic construct
  REGION 1..735: note = source = /note="Description of Artificial Sequence: Synthetic polypeptide"
MAADGYLPDWLEDTLSEGIRQWWKLKPGPPPPRPAERHQDDSRGLVLPGYKYLGPFNGLDKGEPVNEADAAALEHDKAYDRQLDSGDNPYLKYNHADAEFQERLKEDTSFGGNLGRAVFQAKKRVLEPLGLVEEPVKTAPGKKRPVEHSPAEPDSSSGTGKAGQQPARKRLNFGQTGDADSVPDPQPLGQPPAAPTSLGSTTMATGSGAPMADNNEGADGVGNSSGNWHCDSQWLGDRVITTSTRTWALPTYNNHLYKQISSQSGASNDNHYFGYSTPWGYFDFNRFHCHFSPRDWQRLINNNWGFRPKRLNFKLFNIQVKEVTQNDGTTTIANNLTSTVQVFTDSEYQLPYVLGSAHQGCLPPFPADVFMVPQYGYLTLNNGSQAVGRSSFYCLEYFPSQMLRTGNNFTFSYTFEDVPFHSSYAHSQSLDRLMNPLIDQYLYYLNRTQSNSGTLQQSRLLFSQAGPTSMSLQAKNWLPGPCYRQQRLSKQANDNNNSNFPWTAATKYHLNGRDSLVNPGPAMASHKDDEEKFFPMHGTLIFGKQGTNANDADLEHVMITDEEEIRTTNPVATEQYGNVSNNLQNSNTGPTTENVNHQGALPGMVWQDRDVYLQGPIWAKIPHTDGHFHPSPLMGGFGLKHPPPQIMIKNTPVPANPPTNFSSAKFASFITQYSTGQVSVEIEWELQKENSKRWNPEIQYTSNYNKSVNVDFTVDTNGVYSEPRPIGTRYLTRNL

SEQ ID NO: 2784 - protein, 735 aa, synthetic construct
  REGION 1..735: note = source = /note="Description of Artificial Sequence: Synthetic polypeptide"
MAADGYLPDWLEDTLSEGIRQWWKLKPGPPPPKPAERHQDDSRGLVLPGYKYLGPFNGLDKGEPVNEADAAALEHDKAYDRQLDSGDNPYLKYNHADAEFQERLKEDTSFGGNLGRAVFQAKKRVLEPLGLVEEPVKTAPGKKRPVEHSPAEPDSSSGTGKAGQQPARKRLNFGQTGDADSVPDPQPLGQPPAAPTSLGSTTMATGSGAPMADNNEGADGVGNSSGNWHCDSQWLGDRVITTSTRTWALPTYNNHLYKQISSQSGAANDNHYFGYSTPWGYFDFNRFHCHFSPRDWQRLINNNWGFRPKRLNFKLFNIQVKEVTQNDGTTTIANNLTSTVPVFTDSEYQLPYVLGSAHQGCLPPFPADVFMVPQYGYLTLNNGSQAVGRSSFYCLEYFPSQMLRTGNNFTFSYTFEDVPFHSSYAHSQSLDRLMNPLIDQYLYYLNKTQSNSGTLQQSRLLFSQAGPTSMSLQAKNWLPGPCYRQQRLSKQANDNNNSNFPWTAATKYHLNGRDSLVNPGPAMASHKDDEEKFFPMHGTLIFGKQGTNANDADLDNVMITDEEEIRTTNPVATEQYGTVSNNLQNSNTGPTTGTVNHQGALPGMVWQDRDVYLQGPIWAKIPHTDGHFHPSPLMGGFGLKHPPPQIMIKNTPVPANPPTNFSSAKFASFITQYSTGQVSVEIEWELQKENSKRWNPEIQYTSNYNKSVNVDFTVDTNGVYSEPRPIGTRYLTRNL

SEQ ID NO: 2785 - protein, 735 aa, synthetic construct
  REGION 1..735: note = source = /note="Description of Artificial Sequence: Synthetic polypeptide"
MAADGYLPDWLEDTLSEGIRQWWKLKPGPPPPKPAERHKDDSRGLVLPGYKYLGPFNGLDKGEPVNEADAAALEHDKAYDRQLDSGDNPYLKYNHADAEFQERLKEDTSFGGNLARAVFQAKKRVLEPLGLVEEPVKTAPGKKRPVEHSPAGPDSSSGTGKSGQQPARKRLNFGQTGDADSVPDPQPLGQPPAAPSGLGTNTMASGSGAPMADNNEGADGVGNSSGNWHCDSTWMGDRVITTSTRTWALPTYNNHLYKQISSQSGAANDNHYFGYSTPWGYFDFNRFHCHFSPRDWQRLINNNWGFRPKRLNFELFNIQVKEVTQNDGTTTIANNLTSTVQVFTDSEYQLPYVLGSAHQGCLPPFPADVFMVPQYGYLTLNNGSQAVGRSSFYCLEYFPSQMLRTGNNFTFSYTFEDVPFHSSYAHSQSLDRLMNPLIDQYLYYLNRTQSNSGTLQQSRLLFSQAGPTSMSLQAKNWLPGPCYRQQRLSKQANDNNNSNFPWTAATKYHLNGRDSLVNPGPAMASHKDDEEKFFPMHGTLIFGKQGTNANDADLEHVMITDEEEIRTTNPVATEQYGNVSNNLQNSNTGPTTENVNHQGALPGMVWQDRDVYLQGPIWAKIPHTDGHFHPSPLMGGFGLKHPPPQIMIKNTPVPANPPTNFSAAKFASFITQYSTGQVSVEIEWELQKENSKRWNPEIQYTSNYNKSVNVDFTVDANGVYSEPRPIGTRYLTRNL

SEQ ID NO: 2786 - protein, 735 aa, synthetic construct
  REGION 1..735: note = source = /note="Description of Artificial Sequence: Synthetic polypeptide"
MAADGYLPDWLEDILSEGIRQWWKLKPGPPPPKPAERHKDDSRGLVLPGYKYLGPFNGLDKGEPVNEADAAALEHDKAYDRQLDSGDNPYLKYNHADAEFQERLKEDTSFGGNLGRAVFQAKKRVLEPLGLVEEPVKTAPGKKRPVEHSPAEPDSSSGTGKAGQQPARKRLNFGQTGDADSVPDPQPLGQPPAAPTSLGSTTMATGSGAPMADNNEGADGVGNSSGNWHCDSQWLGDRVITTSTRTWALPTYNNHLYKQISSQSGASNDNHYFGYSTPWGYFDFNRFHCHFSPRDWQRLINNNWGFRPKRLNFKLFNIQVKEVTQNDGTTTIANNLTSTVQVFTDSEYQLPYVLGSAHQGCLPPFPADVFMVPQYGYLTLNNGSQAVGRSSFYCLEYFPSQMLRTGNNFTFSYTFEDVPFHSSYAHSQSLDRLMNPLIDQYLYYLNRTQSNSGTLQQSRLLFSQAGPTSMSLQAKNWLPGPCYRQQRLSKQANDNNNSNFPWTAATKYHLNGRDSLVNPGPAMASHKDDEEKFFPMHGTLIFGKQGTNANDADLEHVMITDEEEIRTTNPVATEQYGNVSNNLQNSNTGPTTENVNHQGALPGMVWQDRDVYLQGPIWAKIPHTDGHFHPSPLMGGFGLKHPPPQIMIKNTPVPANPPTNFSAAKFASFITQYSTGQVSVEIEWELQKENSKRWNPEIQYTSNYNKSVNVDFTVDANGVYSEPRPIGTRYLTRNL

SEQ ID NO: 2787 - protein, 735 aa, synthetic construct
  REGION 1..735: note = source = /note="Description of Artificial Sequence: Synthetic polypeptide"
MAADGYLPDWLEDTLSEGIRQWWKLKPGPPPPRPAERHQDDSRGLVLPGYKYLGPFNGLDKGEPVNEADAAALEHDKAYDRQLDSGDNPYLKYNHADAEFQERLKEDTSFGGNLGRAVFQAKKRVLEPLGLVEEPVKTAPGKKRPVEHSPVEPDSSSGTGKAGQQPARKRLNFGQTGDADSVPDPQPLGQPPAAPTSLGSTTMATGSGAPMADNNEGADGVGNSSGNWHCDSQWLGDRVITTSTRTWALPTYNNHLYKQISSQSGAANDNHYFGYSTPWGYFDFNRFHCHFSPRDWQRLINNNWGFRPKRLNFKLFNIQVKEVTQNDGTTTIANNLTSTVPVFTDSEYQLPYVLGSAHQGCLPPFPADVFMVPQYGYLTLNNGSQAVGRSSFYCLEYFPSQMLRTGNNFTFSYTFEDVPFHSSYAHSQSLDRLMNPLIDQYLYYLNKTQSNSGTLQQSRLLFSQAGPTSMSLQAKNWLPGPCYRQQRLSKQANDNNNSNFPWTAATKYHLNGRDSLVNPGPAMASHKDDEEKFFPMHGTLIFGKQGTNANDADLDNVMITDEEEIRTTNPVATEQYGTVSNNLQNSNTGPTTGTVNHQGALPGMVWQDRDVYLQGPIWAKIPHTDGHFHPSPLMGGFGLKHPPPQIMIKNTPVPANPPTNFSSAKFASFITQYSTGQVSVEIEWELQKENSKRWNPEIQYTSNYNKSVNVDFTVDTNGVYSEPRPIGTRYLTRNL

SEQ ID NO: 2788 - protein, 735 aa, synthetic construct
  REGION 1..735: note = source = /note="Description of Artificial Sequence: Synthetic polypeptide"
MAADGYLPDWLEDTLSEGIRQWWKLKPGPPPPKPAERHKDDSRGLVLPGYKYLGPFNGLDKGEPVNEADAAALEHDKAYDRQLDSGDNPYLKYNHADAEFQERLKEDTSFGGNLARAVFQAKKRVLEPLGLVEEPVKTAPGKKRPVEHSPAEPDSSSGTGKAGQQPARKRLNFGQTGDADSVPDPQPLGQPPAAPTSLGSTTMATGSGAPMADNNEGADGVGNSSGNWHCDSQWLGDRVITTSTRTWALPTYNNHLYKQISSQSGASNDNHYFGYSTPWGYFDFNRFHCHFSPRDWQRLINNNWGFRPKRLNFKLFNIQVKEVTQNDGTTTIANNLTSTVQVFTDSEYQLPYVLGSAHQGCLPPFPADVFMVPQYGYLTLNNGSQAVGRSSFYCLEYFPSQMLRTGNNFTFSYTFEDVPFHSSYAHSQSLDRLMNPLIDQYLYYLNRTQSNSGTLQQSRLLFSQAGPTSMSLQAKNWLPGPCYRQQRLSKQANDNNNSNFPWTAATKYHLNGRDSLVNPGPAMASHKDDEEKFFPMHGTLIFGKQGTNANDADLEHVMITDEEEIRTTNPVATEQYGNVSNNLQNSNTGPTTENVNHQGALPGMVWQDRDVYLQGPIWAKIPHTDGHFHPSPLMGGFGLKHPPPQIMIKNTPVPANPPTNFSAAKFASFITQYSTGQVSVEIEWELQKENSKRWNPEIQYTSNYNKSVNVDFTVDANGVYSEPRPIGTRYLTRNL

SEQ ID NO: 2789 - protein, 735 aa, synthetic construct
  REGION 1..735: note = source = /note="Description of Artificial Sequence: Synthetic polypeptide"
MAADGYLPDWLEDTLSEGIRQWWKLKPGPPPPRPAERHQDDSRGLVLPGYKYLGPFNGLDKGEPVNEADAAALEHDKAYDRQLDSGDNPYLKYNHADAEFQERLKEDTSFGGNLGRAVFQAKKRVLEPLGLVEEPVKTAPGKKRPVEHSPAEPDSSSGTGKAGQQPARKRLNFGQTGDADSVPDPQPLGQPPAAPTSLGSTTMATGSGAPMADNNEGADGVGNSSGNWHCDSQWLGDRVITTSTRTWALPTYNNHLYKQISSQSGAANDNHYFGYSTPWGYFDFNRFHCHFSPRDWQRLINNNWGFRPKRLNFKLFNIQVKEVTQNDGTTTIANNLTSTVPVFTDSEYQLPYVLGSAHQGCLPPFPADVFMVPQYGYLTLNNGSQAVGRSSFYCLEYFPSQMLRTGNNFTFSYTFEDVPFHSSYAHSQSLDRLMNPLIDQYLYYLNKTQSNSGTLQQSRLLFSQAGPTSMSLQAKNWLPGPCYRQQRLSKQANDNNNSNFPWTAATKYHLNGRDSLVNPGPAMASHKDDEEKFFPMHGTLIFGKQGTNANDADLDNVMITDEEEIRTTNPVATEQYGTVSNNLQNSNTGPTTGTVNHQGALPGMVWQDRDVYLQGPIWAKIPHTDGHFHPSPLMGGFGLKHPPPQIMIKNTPVPANPPTNFSSAKFASFITQYSTGQVSVEIEWELQKENSKRWNPEIQYTSNYNKSVNVDFTVDTNGVYSEPRPIGTRYLTRNL

SEQ ID NO: 2790 - protein, 735 aa, synthetic construct
  REGION 1..735: note = source = /note="Description of Artificial Sequence: Synthetic polypeptide"
MAADGYLPDWLEDTLSEGIRQWWKLKPGPPPPKPAGRHKDDSRGLVLPGYKYLGPFNGLDKGEPVNEADAAALEHDKAYDRQLDSGDNPYLKYNHAGAEFQERLKEDTSFGGNLGRAVFQAKKRVLEPLGLVEEPVKTAPGKKRPVEHSPVEPDSSSGTGKAGQQPARKRLNFGQTGDADSVPDPQPLGQPPAAPTSLGSTTMATGSGAPMADNNEGADGVGNSSGNWHCDSQWLGDRVITTSTRTWALPTYNNHLYKQISSQSGAANDNHYFGYSTPWGYFDFNRFHCHFSPRDWQRLINNNWGFRPKRLNFKLFNIQVKEVTQNDGTTTIANNLTSTVPVFTDSEYQLPYVLGSAHQGCLPPFPADVFMVPQYGYLTLNNGSQAVGRSSFYCLEYFPSQMLRTGNNFTFSYTFEDVPFHSSYAHSQSLDRLMNPLIDQYLYYLNKTQSNSGTLQQSRLLFSQAGPTSMSLQAKNWLPGPCYRQQRLSKQANDNNNSNFPWTAATKYHLNGRDSLVNPGPAMASHKDDEEKFFPMHGTLIFGKQGTNANDADLDNVMITDEEEIRTTNPVATEQYGTVSNNLQNSNTGPTTGTVNHQGALPGMVWQDRDVYLQGPIWAKIPHTDGHFHPSPLMGGFGLKHPPPQIMIKNTPVPANPPTNFSSAKFASFITQYSTGQVSVEIEWELQKENSKRWNPEIQYTSNYNKSVNVDFTVDTNGVYSEPRPIGTRYLTRNL

SEQ ID NO: 2791 - protein, 735 aa, synthetic construct
  REGION 1..735: note = source = /note="Description of Artificial Sequence: Synthetic polypeptide"
MAADGYLPDWLEDTLSEGIRQWWKLKPGPPPPRPAERHQDDSRGLVLPGYKYLGPFNGLDKGEPVNEADAAALEHDKAYDRQLDSGDNPYLKYNHADAEFQERLKEDTSFGGNLGRAVFQAKKRVLEPLGLVEEPVKTAPGKKRPVEHSPAEPDSSSGTGKAGQQPARKRLNFGQTGDADSVPDPQPLGQPPAAPTSLGSTTMATGSGAPMADNNEGADGVGNSSGNWHCDSQWLGDRVITTSTRTWALPTYNNHLYKQISSQSGASNDNHYFGYSTPLGYFDFNRFHCHFSPRDWQRLINNNWGFRPKRLNFKLFNIQVKEVTQNDGTTTIANNLTSTVQVFTDSEYQLPYVLGSAHQGCLPPFPADVFMVPQYGYLTLNNGSQAVGRSSFYCLEYFPSQMLRTGNNFTFSYTFEDVPFHSSYAHSQSLDRLMNPLIDQYLYYLNRTQSNSGTLQQSRLLFSQAGPTSMSLQAKNWLPGPCYRQQRLSKQANDNNNSNFPWTAATKYHLNGRDSLVNPGPAMASHKDDEEKFFPMHGTLIFGKQGTNANDADLEHVMITDEEEIRTTNPVATEQYGNVSNNLQNSNTGPTTENVNHQGALPGMVWQDRDVYLQGPIWAKIPHTDGHFHPSPLMGGFGLKHPPPQIMIKNTPVPANPPTNFSAAKFASFITQYSTGQVSVEIEWELQKENSKRWNPEIQYTSNYNKSVNVDFTVDANGVYSEPRPIGTRYLTRNL

SEQ ID NO: 2792 - protein, 735 aa, synthetic construct
  REGION 1..735: note = source = /note="Description of Artificial Sequence: Synthetic polypeptide"
MAADGYLPDWLEDTLSEGIRQWWKLKPGPPPPKPAGRHKDDSRGLVLPGYKYLGPFNGLDKGEPVNEADAAALEHDKAYDRQLDSGDNPYLKYNHAGAEFQERLKEDTSFGGNLGRAVFQAKKRVLEPLGLVEEPVKTAPGKKRPVEHSPVEPDSSSGTGKAGQQPARKRLNFGQTGDADSVPDPQPLGQPPAAPTSLGSTTMATGSGAPMADNNEGADGVGNSSGNWHCDSQWLGDRVITTSTRTWALPTYNNHLYKQISSQSGAANDNHYFGYSTPWGYFDFNRFHCHFSPRDWQRLINNNWGFRPKRLNFKLFNIQVKEVTQNDGTTTIANNLTSTVPVFTDSEYQLPYVLGSAHQGCLPPFPADVFMVPQYGYLTLNNGSQAVGRSSFYCLEYFPSQMLRTGNNFTFSYTFEDVPFHSSYAHSQSLDRLMNPLIDQYLYYLNRTQSNSGTLQQSRLLFSQAGPTSMSLQAKNWLPGPCYRQQRLSKQANDNNNSNFPWTAATKYHLNGRDSLVNPGPAMASHKDDEEKFFPMHGTLIFGKQGTNANDADLEHVMITDEEEIRTTNPVATEQYGNVSNNLQNSNTGPTTENVNHQGALPGMVWQDRDVYLQGPIWAKIPHTDGHFHPSPLMGGFGLKHPPPQIMIKNTPVPANPPTNFSAAKFASFITQYSTGQVSVEIEWELQKENSKRWNPEIQYTSNYNKSVNVDFTVDANGVYSEPRPIGTRYLTRNL

SEQ ID NO: 2793 - protein, 735 aa, synthetic construct
  REGION 1..735: note = source = /note="Description of Artificial Sequence: Synthetic polypeptide"
MAADGYLPDWLEDILSEGIRQWWKLKPGPPPPKPAERHKDDSRGLVLPGYKYLGPFNGLDKGEPVNEADAAALEHDKAYDRQLDSGDNPYLKYNHADAEFQERLKEDTSFGGNLGRAVFQAKKRVLEPLGLVEEPVKTAPGKKRPVEQSPAEPDSSSGTGKAGNQPARKRLNFGQTGDADSVPDPQPLGQPPAAPSGLGSTTMATGSGAPMADNNEGADGVGNSSGNWHCDSQWLGDRVITTSTRTWALPTYNNHLYKQISSQSGAANDNHYFGYSTPWGYFDFNRFHCHFSPRDWQRLINNNWGFRPKRLNFKLFNIQVKEVTQNDGTTTIANNLTSTVPVFTDSEYQLPYVLGSAHQGCLPPFPADVFMVPQYGYLTLNNGSQAVGRSSFYCLEYFPSQMLRTGNNFTFSYTFEDVPFHSSYAHSQSLDRLMNPLIDQYLYYLNKTQSNSGTLQQSRLLFSQAGPTSMSLQAKNWLPGPCYRQQRLSKQANDNNNSNFPWTAATKYHLNGRDSLVNPGPAMASHKDDEEKFFPMHGTLIFGKQGTNANDADLDNVMITDEEEIRTTNPVATEQYGTVSNNLQNSNTGPTTGTVNHQGALPGMVWQDRDVYLQGPIWAKIPHTDGHFHPSPLMGGFGLKHPPPQIMIKNTPVPANPPTNFSSAKFASFITQYSTGQVSVEIEWELQKENSKRWNPEIQYTSNYNKSVNVDFTVDTNGVYSEPRPIGTRYLTRNL

SEQ ID NO: 2794 - protein, 735 aa, synthetic construct
  REGION 1..735: note = source = /note="Description of Artificial Sequence: Synthetic polypeptide"
MAADGYLPDWLEDTLSEGIRQWWKLKPGPPPPRPAERHQDDSRGLVLPGYKYLGPFNGLDKGEPVNEADAAALEHDKAYDRQLDSGDNPYLKYNHADAEFQERLKEDTSFGGNLGRAVFQAKKRVLEPLGLVEEPVKTAPGKKRPVEHSPAEPDSSSGTGKAGQQPARKRLNFGQTGDADSVPDPQPLGQPPAAPTSLGSTTMATGSGAPMADNNEGADGVGNSSGNWHCDSQWLGDRVITTSTRTWALPTYNNHLYKQISSQSGASNDNHYFGYSTPWGYFDFNRFHCHFSPRDWQRLINNNWGFRPKRLNFKLFNIQVKEVTQNDGTTTIANNLTSTVQVFTDSEYQLPYVLGSAHQGCLPPFPADVFMVPQYGYLTLNNGSQAVGRSSFYCLEYFPSQMLRTGNNFTFSYTFEDVPFHSSYAHSQSLDRLMNPLIDQYLYYLNRTQSNSGTLQQSRLLFSQAGPTSMSLQAKNWLPGPCYRQQRLSKQANDNNNSNFPWTAATKYHLNGRDSLVNPGPAMASHKDDEEKFFPMHGTLIFGKQGTNANDADLEHVMITDEEEIRTTNPVATEQYGNVSNNLQNSNTGPTTENVNHQGALPGMVWQDRDVYLQGPIWAKIPHTDGHFHPSPLMGGFGLKHPPPQIMIKNTPVPANPPTNFSAAKFASFITQYSTGQVSVEIEWELQKENSKRWNPEIQYTSNYNKSVNVDFTVDANGVYSEPRPIGTRYLTRNL

SEQ ID NO: 2795 - protein, 735 aa, synthetic construct
  REGION 1..735: note = source = /note="Description of Artificial Sequence: Synthetic polypeptide"
MAADGYLPDWLEDTLSEGIRQWWKLKPGPPPPKPAGRHKDDSRGLVLPGYKYLGPFNGLDKGEPVNEADAAALEHDKAYDRQLDSGDNPYLKYNHAGAEFQERLKEDTSFGGNLGRAVFQAKKRVLEPLGLVEEPVKTAPGKKRPVEHSPVEPDSSSGTGKAGQQPARKRLNFGQTGDADSVPDPQPLGQPPAAPTSLGSTTMATGSGAPMADNNEGADGVGNSSGNWHCDSQWLGDRVITTSTRTWALPTYNNHLYKQISSQSGASNDNHYFGYSTPWGYFDFNRFHCHFSPRDWQRLINNNWGFRPKRLNFKLFNIQVKEVTQNDGTTTIANNLTSTVQVFTDSEYQLPYVLGSAHQGCLPPFPADVFMVPQYGYLTLNNGSQAVGHSSFYCLEYFPSQMLRTGNNFTFSYTFEDVPFHSSYAHSQSLDRLMNPLIDQYLYYLNRTQSNSGTLQQSRLLFSQAGPTSMSLQAKNWLPGPCYRQQRLSKQANDNNNSNFPWTAATKYHLNGRDSLVNPGPAMASHKDDEEKFFPMHGTLIFGKQGTNANDADLEHVMITDEEEIRTTNPVATEQYGNVSNNLQNSNTGPTTENVNHQGALPGMVWQDRDVYLQGPIWAKIPHTDGHFHPSPLMGGFGLKHPPPQIMIKNTPVPANPPTNFSAAKFASFITQYSTGQVSVEIEWELQKENSKRWNPEIQYTSNYNKSVNVDFTVDTNGVYSEPRPIGTRYLTRNL

SEQ ID NO: 2796 - protein, 735 aa, synthetic construct
  REGION 1..735: note = source = /note="Description of Artificial Sequence: Synthetic polypeptide"
MAADGYLPDWLEDTLSEGIRQWWKLKPGPPPPKPAERHKDDSRGLVLPGYKYLGPFNGLDKGEPVNEADAAALEHDKAYDRQLDSGDNPYLKYNHADAEFQERLKEDTSFGGNLGRAVFQAKKRVLEPLGLVEEPVKTAPGKKRPVEHSPAEPDSSSGTGKAGQQPARKRLNFGQTGDADSVPDPQPLGQPPAAPTSLGSTTMATGSGAPMADNNEGADGVGNSSGNWHCDSQWLGDRVITTSTRTWALPTYNNHLYKQISSQSGASNDNHYFGYSTPWGYFDFNRFHCHFSPRDWQRLINNNWGFRPKRLNFKLFNIQVKEVTQNDGTTTIANNLTSTVQVFTDSEYQLPYVLGSAHQGCLPPFPADVFMVPQYGYLTLNNGSQAVGRSSFYCLEYFPSQMLRTGNNFTFSYTFEDVPFHSSYAHSQSLDRLMNPLIDQYLYYLNRTQSNSGTLQQSRLLFSQAGPTSMSLQAKNWLPGPCYRQQRLSKQANDNNNSNFPWTAATKYHLNGRDSLVNPGPAMASHKDDEEKFFPMHGTLIFGKQGTNANDADLEHVMITDEEEIRTTNPVATEQYGNVSNNLQNSNTGPTTENVNHQGALPGMVWQDRDVYLQGPIWAKIPHTDGHFHPSPLMGGFGLKHPPPQIMIKNTPVPANPPTNFSAAKFASFITQYSTGQVSVEIEWELQKENSKRWNPEIQYTSNYNKSVNVDFTVDTNGVYSEPRPIGTRYLTRNL

SEQ ID NO: 2797 - protein, 735 aa, synthetic construct
  REGION 1..735: note = source = /note="Description of Artificial Sequence: Synthetic polypeptide"
MAADGYLPDWLEDTLSEGIRQWWKLKPGPPPPKPAERHQDDSRGLVLPGHKYLGPFNGLDKGEPVNEADAAALEHDKAYDRQLDSGDNPYLKYNHADAEFQERLKEDTSFGGNLGRAVFQAKKRVLEPLGLVEEPVKTAPGKKRPVEHSPAEPDSSSGTGKAGQQPARKRLNFGQTGDADSVPDPQPLGQPPAAPTSLGSTTMATGSGAPMADNNEGADGVGNSSGNWHCDSQWLGDRVITTSTRTWALPTYNNHLYKQISSQSGASNDNHYFGYSTPWGYFDFNRFHCHFSPRDWQRLINNNWGFRPKRLNFKLFNIQVKEVTQNDGTTTIANNLTSTVQVFTDSEYQLPYVLGSAHQGCLPPFPADVFMVPQYGYLTLNNGSQAVGHSSSYCLEYFPSQMLRTGNNFTFSYTFEDVPFHSSYAHSQSLDRLMNPLIDQYLYYLNRTQSNSGTLQQSRLLFSQAGPTSMSLQAKNWLPGPCYRQQRLSKQANDNNNSNFPWTAATKYHLNGRDSLVNPGPAMASHKDDEEKFFPMHGTLIFGKQGTNANDADLEHVMITDEEEIRTTNPVATEQYGNVSNNLQNSNTGPTTENVNHQGALPGMVWQDRDVYLQGPIWAKIPHTDGHFHPSPLMGGFGLKHPPPQILIKNTPVPANPSTTFSAAKFASFITQYSTGQVSVEIEWELQKENSKRWNPEIQYTSNYNKSVNVDFTVDTNGVYSEPRPIGTRYLTRNL

SEQ ID NO: 2798 - protein, 735 aa, synthetic construct
  REGION 1..735: note = source = /note="Description of Artificial Sequence: Synthetic polypeptide"
MAADGYLPDWLEDTLSEGIRQWWKLKPGPPPPKPAERHKDDSRGLVLPGYKYLGPFNGLDKGEPVNEADAAALEHDKAYDRQLDSGDNPYLKYNHADAEFQERLKEDTSFGGNLARAVFQAKKRVLEPLGLVEEPVKTAPGKKRPVEHSPAEPDSSSGTGKSGQQPARKRLNFGQTGDADSVPDPQPLGQPPAAPSGLGTNTMASGSGAPMADNNEGADGVGNSSGNWHCDSTWMGDRVITTSTRTWALPTYNNHLYKQISSQSGASNDNHYFGYSTPWGYFDFNRFHCHFSPRDWQRLINNNWGFRPKRLNFKLFNIQVKEVTQNDGTTTIANNLTSTVQVFTDSEYQLPYVLGSAHQGCLPPFPADVFMVPQYGYLTLNNGSQAVGRSSFYCLEYFPSQMLRTGNNFTFSYTFEDVPFHSSYAHSQSLDRLMNPLIDQYLYYLNRTQSNSGTLQQSRLLFSQAGPTSMSLQAKNWLPGPCYRQQRLSKQANDNNNSNFPWTAATKYHLNGRDSLVNPGPAMASHKDDEEKFFPMHGTLIFGKQGTNANDADLEHVMITDEEEIRTTNPVATEQYGNVSNNLQNSNTGPTTENVNHQGALPGMVWQDRDVYLQGPIWAKIPHTDGHFHPSPLMGGFGLKHPPPQIMIKNTPVPANPPTNFSAAKFASFITQYSTGQVSVEIEWELQKENSKRWNPEIQYTSNYNKSVNVDFTVDANGVYSEPRPIGTRYLTRNL

SEQ ID NO: 2799 - protein, 735 aa, synthetic construct
  REGION 1..735: note = source = /note="Description of Artificial Sequence: Synthetic polypeptide"
MAADGYLPDWLEDILSEGIRQWWKLKPGPPPPKPAERHKDDSRGLVLPGYKYLGPFNGLDKGEPVNEADAAALEHDKAYDRQLDSGDNPYLKYNHADAEFQERLKEDTSFGGNLGRAVFQAKKRVLEPLGLVEEPVKTAPGKKRPVEQSPAEPDSSSGTGKAGNQPARKRLNFGQTGDADSVPDPQPLGQPPAAPSGLGSTTMATGSGAPMADNNEGADGVGNSSGNWHCDSQWLGDRVITTSTRTWALPTYNNHLYKQISSQSGAANDNHYFGYSTPWGYFDFNRFHCHFSPRDWQRLINNNWGFRPKRLNFKLFNIQVKEVTQNDGTTTIANNLTSTVQVFTDSEYQLPYVLGSAHQGCLPPFPADVFMVPQYGYLTLNNGSQAVGRSSFYCLEYFPSQMLRTGNNFTFSYTFEDVPFHSSYAHSQSLDRLMNPLIDQYLYYLNRTQSNSGTLQQSRLLFSQAGPTSMSLQAKNWLPGPCYRQQRLSKQANDNNNSNFPWTAATKYHLNGRDSLVNPGPAMASHKDDEEKFFPMHGTLIFGKQGTNANDADLEHVMITDEEEIRTTNPVATEQYGNVSNNLQNSNTGPTTENVNHQGALPGMVWQDRDVYLQGPIWAKIPHTDGHFHPSPLMGGFGLKHPPPQIMIKNTPVPANPPTNFSAAKFASFITQYSTGQVSVEIEWELQKENSKRWNPEIQYTSNYNKSVNVDFTVDANGVYSEPRPIGTRYLTRNL

SEQ ID NO: 2800 - protein, 735 aa, synthetic construct
  REGION 1..735: note = source = /note="Description of Artificial Sequence: Synthetic polypeptide"
MAADGYLPDWLEDTLSEGIRQWWKLKPGPPPPRPAERHQDDSRGLVLPGYKYLGPFNGLDKGEPVNEADAAALEHDKAYDRQLDSGDNPYLKYNHADAEFQERLKEDTSFGGNLGRAVFQAKKRVLEPLGLVEEPVKTAPGKKRPVEHSPAEPDSSSGTGKAGQQPARKRLNFGQTGDADSVPDPQPLGQPPAAPTSLGSTTMATGSGAPMADNNEGADGVGNSSGNWHCDSQWLGDRVITTSTRTWALPTYNNHLYKQISSQSGASNDNHYFGYSTPWGYFDFNRFHCHFSPRDWQRLINNNWGFRPKRLNFKLFNIQVKEVTQNDGTTTIANNLTSTVQVFTDSEYQLPYVLGSAHQGCLPPFPADVFMVPQYGYLTLNNGSQAVGRSSFYCLEYFPSQMLRTGNNFTFSYTFEDVPFHSSYAHSQSLDRLMNPLIDQYLYYLNRTQSNSGTLQQSRLLFSQAGPTSMSLQAKNWLPGPCYRQQRLSKQANDNNNSNFPWTAATKYHLNGRDSLVNPGPAMASHKDDEEKFFPMHGTLIFGKQGTNANDADLEHVMITDEEEIRTTNPVATEQYGNVSNNLQNSNTGPTTENVNHQGALPGMVWQDRDVYLQGPIWAKIPHTDGHFHPSPLMGGFGLKHPPPQILIKSTPVPANPSTTFSAAKFASFITQYSTGQVSVEIEWELQKENSKRWNPEIQYTSNYNKSVNVDFTVDTNGVYSEPRPIGTRYLTRNL

SEQ ID NO: 2801 - protein, 735 aa, synthetic construct
  REGION 1..735: note = source = /note="Description of Artificial Sequence: Synthetic polypeptide"
MAADGYLPDWLEDTLSEGIRQWWKLKPGPPPPRPAERHQDDSRGLVLPGYKYLGPFNGLDKGEPVNEADAAALEHDKAYDRQLDSGDNPYLKYNHADAEFQERLKEDTSFGGNLGRAVFQAKKRVLEPLGLVEEPVKTAPGKKRPVEHSPAEPDSSSGTGKAGQQPARKRLNFGQTGDADSVPDPQPLGQPPAAPTSLGSTTMATGSGAPMADNNEGADGVGNSSGNWHCDSQWLGDRVITTSTRTWALPTYNNHLYKQISSQSGASNDNHYFGYSTPWGYFDFNRFHCHFSPRDWQRLTNNNWGFRPKRLNFKLFNIQVKEVTQNDGTTTIANNLTSTVQVFTDSEYQLPYVLGSAHQGCLPPFPADVFMVPQYGYLTLNNGSQAVGRSSFYCLEYFPSQMLRTGNNFTFSYTFEDVPFHSSYAHSQSLDRLMNPLIDQYLYYLNRTQSNSGTLQQSRLLFSQAGPTSMSLQAKNWLPGPCYRQQRLSKQANDNNNSNFPWTAATKYHLNGRDSLVNPGPAMASHKDDEEKFFPMHGTLIFGKQGTNANDADLEHVMITDEEEIRTTNPVATEQYGNVSNNLQNSNTGPTTENVNHQGALPGMVWQDRDVYLQGPIWAKIPHTDGHFHPSPLMGGFGLKHPPPQIMIKNTPVPANPPTNFSAAKFASFITQYSTGQVSVEIEWELQKENSKRWNPEIQYTSNYNKSVNVDFTVDANGVYSEPRPIGTRYLTRNL

SEQ ID NO: 2802 - protein, 735 aa, synthetic construct
  REGION 1..735: note = source = /note="Description of Artificial Sequence: Synthetic polypeptide"
MAADGYLPDWLEDTLSEGIRQWWKLKPGPPPPKPAGRHKDDSRGLVLPGYKYLGPFNGLDKGEPVNEADAAALEHDKAYDRQLDSGDNPYLKYNHAGAEFQERLKEDTSFGGNLGRAVFQAKKRVLEPLGLVEEPVKTAPGKKRPVEHSPVEPDSSSGTGKAGQQPARKRLNFGQTGDADSVPDPQPLGQPPAAPTSLGSTTMATGSGAPMADNNEGADGVGNSSGNWHCDSQWLGDRVITTSTRTWALPTYNNHLYKQISSQSGASNDNHYFGYSTPWGYFDFNRFHCHFSPRDWQRLINNNWGFRPKRLNFKLFNIQVKEVTQNDGTTTIANNLTSTVPVFTDSEYQLPYVLGSAHQGCLPPFPADVFMVPQYGYLTLNNGSQAVGRSSFYCLEYFPSQMLRTGNNFTFSYTFEDVPFHSSYAHSQSLDRLMNPLIDQYLYYLNKTQSNSGTLQQSRLLFSQAGPTSMSLQAKNWLPGPCYRQQRLSKQANDNNNSNFPWTAATKYHLNGRDSLVNPGPAMASHKDDEEKFFPMHGTLIFGKQGTNANDADLDNVMITDEEEIRTTNPVATEQYGTVSNNLQNSNTGPTTGTVNHQRALPGMVWQDRDVYLQGPIWAKIPHTDGHFHPSPLMGGFGLKHPPPQIMIKNTPVPANPPTNFSSAKFASFITQYSTGQVSVEIEWELQKENSKRWNPEIQYTSNYNKSVNVDFTVDTNGVYSEPRPIGTRYLTRNL

SEQ ID NO: 2803 - protein, 735 aa, synthetic construct
  REGION 1..735: note = source = /note="Description of Artificial Sequence: Synthetic polypeptide"
MAADGYLPDWLEDTLSEGIRQWWKLKPGPPPPKPAGRHKDDSRGLVLPGYKYLGPFNGLDKGEPVNEADAAALEHDKAYDRQLDSGDNPYLKYNHAGAEFQERLKEDTSFGGNLGRAVFQAKKRVLEPLGLVEEPVKTAPGKKRPVEHSPVEPDSSSGTGKAGQQPARKRLNFGQTGDADSVPDPQPLGQPPAAPTSLGSTTMATGSGAPMADNNEGADGVGNSSGNWHCDSQWLGDRVITTSTRTWALPTYNNHLYKQISSQSGASNDNHYFGYSTPWGYFDFNRFHCHFSPRDWQRLINNNWGFRPKRLNFKLFNIQVKEVTQNDGTTTIANNLTSTVPVFTDSEYQLPYVLGSAHQGCLPPFPADVFMVPQYGYLTLNNGSQAVGRSSFYCLEHFPSQMLRTGNNFTFSYTFEDVPFHSSYAHSQSLDRLMNPLIDQYLYYLNKTQSNSGTLQQSRLLFSQAGPTSMSLQAKNWLPGPCYRQQRLSKQANDNNNSNFPWTAATKYHLNGRDSLVNPGPAMASHKDDEEKFFPMHGTLIFGKQGTNANDADLDNVMITDEEEIRTTNPVATEQYGTVSNNLQNSNTGPTTGTVNHQRALPGMVWQDRDVYLQGPIWAKIPHTDGHFHPSPLMGGFGLKHPPPQIMIKNTPVPANPPTNFSSAKFASFITQYSTGQVSVEIEWELQKENSKRWNPEIQYTSNYNKSVNVDFTVDTNGVYSEPRPIGTRYLTRNL

SEQ ID NO: 2804 - protein, 735 aa, synthetic construct
  REGION 1..735: note = source = /note="Description of Artificial Sequence: Synthetic polypeptide"
MAADGYLPDWLEDTLSEGIRQWWKLKPGPPPPKPAGRHKDDSRGLVLPGYKYLGPFNGLDKGEPVNEADAAALEHDKAYDRQLDSGDNPYLKYNHAGAEFQERLKEDTSFGGNLGRAVFQAKKRVLEPLGLVEEPVKTAPGKKRPVEHSPVEPDSSSGTGKAGQQPARKRLNFGQTGDADSVPDPQPLGQPPAAPTSLGSTTMATGSGAPMADSNEGADGVGNSSGNWHCDSQWLGDRVITTSTRTWALPTYNNHLYKQISSQSGASNDNHYFGYSTPWGYFDFNRFHCHFSPRDWQRLINNNWGFRPKRLNFKLFNIQVKEVTQNDGTTTIANNLTSTVPVFTDSEYQLPYVLGSAHQGCLPPFPADVFMVPQYGYLTLNNGSQAVGRSSFYCLEYFPSQMLRTGNNFTFSYTFEDVPFHSSYAHSQSLDRLMNPLIDQYLYYLNKTQSNSGTLQQSRLLFSQAGPTSMSLQAKNWLPGPCYRQQRLSKQANDNNNSNFPWTAATKYHLNGRDSLVNPGPAMASHKDDEEKFFPMHGTLIFGKQGTNANDADLDNVMITDEEEIRTTNPVATEQYGTVSNNLQNSNTGPTTGTVNHQRALPGMVWLDRDVYLQGPIWAKIPHTDGHFHPSPLMGGFGLKHPPPQIMIKNTPVPANPPTNFSSAKFASFITQYSTGQVSVEIEWELQKENSKRWNPEIQYTSNYNKSVNVDFTVDTNGVYSEPRPIGTRYLTRNL

SEQ ID NO: 2805 - protein, 735 aa, synthetic construct
  REGION 1..735: note = source = /note="Description of Artificial Sequence: Synthetic polypeptide"
MAADGYLPDWLEDTLSEGIRQWWRLKPGPPPPKPAGRHKDDSRGLVLPGYKYLGPFNGLDKGEPVNEADAAALEHDKAYDRQLDSGDNPYLKYNHAGAEFQERLKEDTSFGGNLGRAVFQAKKRVLEPLGLVEEPVKTAPGKKRPVEHSPVEPDSSSGTGKAGQQPARKRLNFGQTGDADSVPDPQPLGQPPAAPTSLGSTTMATGSGAPMADNNEGADGVGNSSGNWHCDSQWLGDRVITTSTRTWALPTYNNHLYKQISSQSGASNDNHYFGYSTPWGYFDFNRFHCHFSPRDWQRLINNNWGFRPKRLNFKLFNIQVKEVTQNDGTTTIANNLTSTVPVFTDSEYQLPYVLGSAHQGCLPPFPADVFMVPQYGYLTLNNGSQAVGRSSFYCLEYFPSQMLRTGNNFTFSYTFEDVPFHSSYAHSQSLDRLMNPLIDQYLYYLNKTQSNSGTLQQSRLLFSQAGPTSMSLQAKNWLPGPCYRQQRLSKQANDNNNSNFPWTAATKYHLNGRDSLVNPGPAMASHKDDEEKFFPMHGTLIFGKQGTNANDADLDNVMITDEEEIRTTNPVATEQYGTVSNNLQNSNTGPTTGTVNHQRALPGMVWQDRDVYLQGPIWAKIPHTDGHFHPSPLMGGFGLKHPPPQIMIKNTPVPANPPTNFSSAKFASFITQYSTGQVSVEIEWELQKENSKRWNPEIQYTSNYNKSVNVDFTVDTNGVYSEPRPIGTRYLTRNL

SEQ ID NO: 2806 - protein, 735 aa, synthetic construct
  REGION 1..735: note = source = /note="Description of Artificial Sequence: Synthetic polypeptide"
MAADGYLPDWLEDTLSEGIRQWWKLKPGPPPPKPAGRHKDDSRGLVLPGYKYLGPFNGLDKGEPVNEADAAALEHDKAYDRQLDSGDNPYLKYNHAGAEFQERLKEDTSFGGNLGRAVFQAKKRVLEPLGLVEEPVKTAPGKKRPVEHSPVEPDSSSGTGKAGQQPARKRLNFGQTGDADSVPDPQPLGQPPAAPTSLGSTTMATGSGAPMADNNEGADGVGNSSGNWHCDSQWLGDRVITTSTRTWALPTYNNHLYKQISSQSGASNDNHYFGYSTPWGYFDFNRFHCHFSPRDWQRLINNNWGFRPKRLNFKLFNIQVKEVTQNDGTTTIANNLTSTVPVFTDSEYQLPYVLGSAHQGCLPPFPADVFMVPQYGYLTLNNGSQAVGRSSFYCLEYFPSQMLRTGNNFTFSYTFEDVPFHSSYAHSQSLDRLMNPLIDQYLYYLNKTQSNSGTLQQSRLLFSQAGPTSMSLQAKNWLPGPCYRQQRLSKQANDNNNSNFPWTAATKYHLNGRDSLVNPGPAMASHKDDEEKFFPMHGTLIFGKQGTNANDADLDNVMITDEEEIRTTNPVATEQYGTVSNNLQNSNTGPTTGTVNHQRALPGMVWQDRDVYLQGPIWAKIPHTDGHFHPSPLMGGFGLKHPPPQIMIKNTPVPANPPTNFSSAKFASFITQYSTGQVSVEIEWELQKENSKRWNPEIQYTSNYNKSVNVDLTVDTNGVYSEPRPIGTRYLTRNL

SEQ ID NO: 2807 - protein, 735 aa, synthetic construct
  REGION 1..735: note = source = /note="Description of Artificial Sequence: Synthetic polypeptide"
MAADGYLPDWLEDTLSEGIRQWWKLKPGPPPPKPAGRHKDDSRGLVLPGYKYLGPFNGLDKGEPVNEADAAALEHDKAYDRQLDSGDNPYLKYNHAGAEFQERLKEDTSFGGNLGRAVFQAKKRVLEPLGLVEEPVKTAPGKKRPVEHSPVEPDSSSGTGKAGQQPARKRLNFGQTGDADSVPDPQPLGQPPAAPTSLGSTTMATGSGAPMADNNEGADGVGNSSGNWHCDSQWLGDRVITTSTRTWALPTYNNHLYKQISSQSGASNDNHYFGYSTPWGYFDFNRFHCHFSPRDWQRLINNNWGFRPKRLNFKLFNIQVKEVTQNDGTTTIANNLTSTVPVFTDSEYQLPYVLGSAHQGCLPPFPADVFMVPQYGYPTLNNGSQAVGRSSFYCLEYFPSQMLRTGNNFTFSYTFEDVPFHSSYAHSQSLDRLMNPLIDQYLYYLNKTQSNSGTLQQSRLLFSQAGPTSMSLQAKNWLPGPCYRQQRLSKQANDNNNSNFPWAAATKYHLNGRDSLVNPGPAMASHKDDEEKFFPMHGTLIFGKQGTNANDADLDNVMITDEEEIRTTNPVATEQYGTVSNNLQNSNTGPTTGTVNHQRALPGMVWQDRDVYLQGPIWAKIPHTDGHFHPSPLMGGFGLKHPPPQIMIKNTPVPANPPTNFSSAKFASFITQYSTGQVSVEIEWELQKENSKRWNPEIQYTSNYNKSVNVDFTVDTNGVYSEPRPIGTRYLTRNL

SEQ ID NO: 2808 - protein, 735 aa, synthetic construct
  REGION 1..735: note = source = /note="Description of Artificial Sequence: Synthetic polypeptide"
MAADGYLPDWLEDTLSEGIRQWWKLKPGPPPPKPAERHQDDSRGLVLPGYKYLGPFNGLDKGEPVNEADAAALEHDKAYDRQLDSGDNPYLKYNHADAEFQERLKEDTSFGGNLGRAVFQAKKRVLEPLGLVEEPVKTAPGKKRPVEHSPAEPDSSSGTGKAGQQPARKRLNFGQTGDADSVPDPQPLGQPPAAPTSLGSTTMATGSGAPMADNNEGADGVGNSSGNWHCDSQWLGDRVITTSTRTWALPTYNNHLYKQISSQSGASNDNHYFGYSTPWGYFDFNRFHCHFSPRDWQRLINNNWGFRPKRLNFKLFNIQVKEVTQNDGTTTIANNLTSTVQVFTDSEYQLPYVLGSAHQGCLPPFPADVFMVPQYGYLTLNNGSQAVGRSSFYCLEYFPSQMLRTGNNFTFSYTFEDVPFHSSYAHSQSLDRLMNPLIDQYLYYLNRTQSNSGTLQQSRLLFSQAGPTSMSLQAKNWLPGPCYRQQRLSKQANDNNNSNFPWTAATKYHLNGRDSLVNPGPAMASHKDDEEKFFPMHGTLIFGKQGTNANDADLEHVMITDEEEIRTTNPVATEQYGNVSNNLQNSNTGPTTENVNHQGALPGMVWQDRDVYLQGPIWAKIPHTDGHFHPSPLMGGFGLKHPPPQIMIKNTPVPANPPTNFSAAKFASFITQYSTGQVSVEIEWELQKENSKRWNPEIQYTSNYNKSVNVDFTVDTNGVYSEPRPIGTRYLTRNL

SEQ ID NO: 2809 - protein, 734 aa, synthetic construct
  REGION 1..734: note = source = /note="Description of Artificial Sequence: Synthetic polypeptide"
MAADGYLPDWLEDTLSEGIRQWWKLKPGPPPPKPAERHQDDSRGLVLPGYKYLGPFNGLDKGEPVNEADAAALEHDKAYDRQLDSGDNPYLKYNHADAEFQERLKEDTSFGGNLGRAVFQAKKRVLEPLGLVEEPVKTAPGKKRPVEHSPAEPDSSSGTGKAGQQPARKRLNFGQTGDADSVPDPQPLGQPPAAPTSLGSTTMATGSGAPMADNNEGADGVGNSSGNWHCDSQWLGDRVITTSTRTWALPTYNNHLYKQISSQSGASNDNHYFGYSTPWGYFDFNRFHCHFSPRDWQRLINNNWGFRPKRLNFKLFNIQVKEVTQNDGTTTIANNLTSTVQVFTDSEYQLPYVLGSAHQGCLPPFPADVFMVPQYGYLTLNNGSQAVGRSSFYCLEYFPSQMLRTGNNFTFSYTFEDVPFHSSYAHSQSLDRLMNPLIDQYLYYLNRTQSNSGTLQQSRLLFSQAGPTSMSLQAKNWLPGPCYRQQRLSKQANDNNSNFPWTAATKYHLNGRDSLVNPGPAMASHKDDEEKFFPMHGTLIFGKQGTNANDADLEHVMITDEEEIRTTNPVATEQYGNVSNNLQNSNTGPTTENVNHQGALPGMVWQDRDVYLQGPIWAKIPHTDGHFHPSPLMGGFGLKHPPPQIMIKNTPVPANPPTNFSAAKFASFITQYSTGQVSVEIEWELQKENSKRWNPEIQYTSNYNKSVNVDFTVDTNGVYSEPRPIGTRYLTRNL

SEQ ID NO: 2810 - protein, 734 aa, synthetic construct
  REGION 1..734: note = source = /note="Description of Artificial Sequence: Synthetic polypeptide"
MAADGYLPDWLEDTLSEGIRQWWKLKPGPPPKPAERHQDDSRGLVLPGYKYLGPFNGLDKGEPVNEADAAALEHDKAYDRQLDSGDNPYLKYNHADAEFQERLKEDTSFGGNLGRAVFQAKKRVLEPLGLVEEPVKTAPGKKRPVEHSPAEPDSSSGTGKAGQQPARKRLNFGQTGDADSVPDPQPLGQPPAAPTSLGSTTMATGSGAPMADNNEGADGVGNSSGNWHCDSQWLGDRVITTSTRTWALPTYNNHLYKQISSQSGASNDNHYFGYSTPWGYFDFNRFHCHFSPRDWQRLINNNWGFRPKRLNFKLFNIQVKEVTQNDGTTTIANNLTSTVQVFTDSEYQLPYVLGSAHQGCLPPFPADVFMVPQYGYLTLNNGSQAVGRSSFYCLEYFPSQMLRTGNNFTFSYTFEDVPFHSSYAHSQSLDRLMNPLIDQYLYYLNRTQSNSGTLQQSRLLFSQAGPTSMSLQAKNWLPGPCYRQQRLSKQANDNNNSNFPWTAATKYHLNGRDSLVNPGPAMASHKDDEEKFFPMHGTLIFGKQGTNANDADLEHVMITDEEEIRTTNPVATEQYGNVSNNLQNSNTGPTTENVNHQGALPGMVWQDRDVYLQGPIWAKIPHTDGHFHPSPLMGGFGLKHPPPQIMIKNTPVPANPPTNFSAAKFASFITQYSTGQVSVEIEWELQKENSKRWNPEIQYTSNYNKSVNVDFTVDTNGVYSEPRPIGTRYLTRNL

SEQ ID NO: 2811 - protein, 735 aa, synthetic construct
  REGION 1..735: note = source = /note="Description of Artificial Sequence: Synthetic polypeptide"
MAADGYLPDWLEDTLSEGIRQWWKLKPGPPPPKPAERHQDDSRGLVLPGYKYLGPFNGLDKGEPVNEADAAALEHDKAYDRQLDSGDNPYLKYNHADAEFQERLKEDTSFGGNLGRAVFQAKKRVLEPLGLVEEPVKTAPGKKRPVEHSPAEPDSSSGTGKAGQQPARKRLNFGQTGDADSVPDPQPLGQPPAAPTSLGSTTMATGSGAPMADNNEGADGVGNSSGNWHCDSQWLGDRVITTSTRTWALPTYNNHLYKQISSQSGASNDNHYFGYSTPWGYFDFNRFHCHFSPRDWQRLINNNWGFRPKRLNFKLFNIQVKEVTQNDGTTTIANNLTSTVQVFTDSEYQLPYVLGSAHQGCLPPFPADVFMVPQYGYLTLNNGSQAVGRSSFYCLEYFPSQMLRTGNNFTFSYTFEDVPFHSSYAHSQSLDRLMNPLIDQYLYYLNRTQSNSGTLQQSRLLFSQAGPTSMSLQAKNWLPGPCYRQQRLSKQANDNNNSNFPWTAATKYHLNGRDSLVNPGPAMASHKDDEEKFFPMHGTLIFGKQGTNANDADLEHVMITDEEEIRTTNPVATEQYGNVSNNLQNSNTGPTTENVNHQGALPGMVWQDRDAYLQGPIWAKIPHTDGHFHPSPLMGGFGLKHPPPQIMIKNTPVPANPPTNFSAAKFASFITQYSTGQVSVEIEWELQKENSKRWNPEIQYTSNYNKSVNVDFTVDTNGVYSEPRPIGTRYLTRNL

SEQ ID NO: 2812 - protein, 735 aa, synthetic construct
  REGION 1..735: note = source = /note="Description of Artificial Sequence: Synthetic polypeptide"
MAADGYLPDWLEDTLSEGIRQWWKLKPGPPPPKPAERHQDDSRGLVLPGYKYLGPFNGLDKGEPVNEADAAALEHDKAYDRQLDSGDNPYLKYNHADAEFQERLKEDTSFGGNLGRAVFQAKKRVLEPLGLVEEPAKTAPGKKRPVEHSPAEPDSSSGTGKAGQQPARKRLNFGQTGDADSVPDPQPLGQPPAAPTSLGSTTMATGSGAPMADNNEGADGVGNSSGNWHCDSQWLGDRVITTSTRTWALPTYNNHLYKQISSQSGASNDNHYFGYSTPWGYFDFNRFHCHFSPRDWQRLINNNWGFRPKRLNFKLFNIQVKEVTQNDGTTTIANNLTSTVQVFTDSEYQLPYVLGSAHQGCLPPFPADVFMVPQYGYLTLNNGSQAVGRSSFYCLEYFPSQMLRTGNNFTFSYTFEDVPFHSSYAHSQSLDRLMNPLIDQYLYYLNRTQSNSGTLQQSRLLFSQAGPTSMSLQAKNWLPGPCYRQQRLSKQANDNNNSNFPWTAATKYHLNGRDSLVNPGPAMASHKDDEEKFFPMHGTLIFGKQGTNANDADLEHVMITDEEEIRTTNPVATEQYGNVSNNLQNSNTGPTTENVNHQGALPGMVWQDRDVYLQGPIWAKIPHTDGHFHPSPLMGGFGLKHPPPQIMIKNTPVPANPPTNFSAAKFASFITQYSTGQVSVEIEWELQKENSKRWNPEIQYTSNYNKSVNVDFTVDTNGVYSEPRPIGTRYLTRNL

SEQ ID NO: 2813 - protein, 735 aa, synthetic construct
  REGION 1..735: note = source = /note="Description of Artificial Sequence: Synthetic polypeptide"
MAADGYLPDWLEDTLSEGIRQWWKLKPGPPPPKPAERHQDDSRGLVLPGYKYLGPFNGLDKGEPVNEADAAALEHDKAYDRQLDSGDNPYLKYNHADAEFQERLKEDTSFGGNLGRAVFQAKKRVLEPLGLVEEPVKTAPGKKRPVEHSPAEPDSSSGTGKAGQQPARKRLNFGQTGDADSVPDPQPLGQPPAAPTSLGSTTMATGSGAPMADNNEGADGVGNSSGNWHCDSQWLGDRVITTSTRTWALPTYNNHLYKQISSQSGASNDNHYFGYSTPWGYFDFNRFHCHFSPRDWQRLINNNWGFRPKRLNFKLFNIQVKEVTQNDGTTTIANNLTSTVQVFTDSEYQLPYVLGSAHQGCLPPFPADVFMVPQYGYLTLNNGSQAVGRSSFYCLEYFPSQMLRTGNNFTFSYTFEDVPFHSSYAHSQSLDRLMNPLIDQYLYYLNRTQSNSGTLQQSRLLFSQAGPTSMSLQAKNWLPGPCYRQQRLSKQANDNNNSNFPWTAATKYHLNGRDSLVNPGPAMASHKDDEEKFFPMHGTLIFGKQGTNANDADLEHVMITDEEEIRTTNPVATEQYGNVSNNLQNSNTGPTTENVNHQGALPGMVWQDRDVYLQGPIWAKIPHTDGHFHPSPLMGGFGLKHPPPQIMIKNTPVPANPPTNFSAAKFASFITQYSTGQVSVEIEWELQKENSKRWNPEIQYTSNYNKSVNVDFTVDTNGAYSEPRPIGTRYLTRNL

SEQ ID NO: 2814 - protein, 735 aa, synthetic construct
  REGION 1..735: note = source = /note="Description of Artificial Sequence: Synthetic polypeptide"
MAADGYLPDWLEDTLSEGIRQWWKLKPGPPPPKPAERHKDDSRGLVLPGYKYLGPFNGLDKGEPVNEADAAALEHDKAYDRQLDSGDNPYLKYNHADAEFQERLKEDTSFGGNLGRAVFQAKKRVLEPLGLVEEPVKTAPGKKRPVEHSPVEPDSSSGTGKAGQQPARKRLNFGQTGDADSVPDPQPLGQPPAAPTSLGSTTMATGSGAPMADNNEGADGVGNSSGNWHCDSQWSGDRVITTSTRTWALPTYNNHLYKQISSQSGASNDNHYFGYSTPWGYFDFNRFHCHFSPRDWQRLINNNWGFRPKRLNFKLFNIQVKEVTQNDGTTTIANNLTSTVQVFTDSEYQLPYVLGSAHQGCLPPFPADVFMVPQYGYLTLNNGSQAVGRSSFYCLEYFPSQMLRTGNNFTFSYTFEDVPFHSSYAHSQSLDRLMNPLIDQYLYYLNKTQSNSGTLQQSRLLFSQAGPTSMSLQAKNWLPGPCYRQQRLSKQANDNNNSNFPWTAATKYHLNGRDSLVNPGPAMASHKDDEEKFFPMHGTLIFGKQGTNANDADLDNVMITDEEEIRTTNPVATEQYGTVSNNLQNSNTGPTTGTVNHQGALPGMVWQDRDVYLQGPIWAKIPHTDGHFHPSPLMGGFGLKHPPPQIMIKNTPVPANPPTNFSSAKFASFITQYSTGQVSVEIEWELQKENSKRWNPEIQYTSNYNKSVNVDFTVDTNGVYSEPRPIGTRYLTRNL

SEQ ID NO: 2815 - protein, 735 aa, synthetic construct
  REGION 1..735: note = source = /note="Description of Artificial Sequence: Synthetic polypeptide"
MAADGYLPDWLEDALSEGIRQWWKLKPGPPPPKPAERHKDDSRGLVLPGYKYLGPFNGLDKGEPVNEADAAALEHDKAYDRQLDSGDNPYLKYNHADAEFQERLKEDTSFGGNLGRAVFQAKKRVLEPLGLVEEPVKTAPGKKRPVEHSPVEPDSSSGTGKAGQQPARKRLNFGQTGDADSVPDPQPLGQPPAAPTSLGSTTMATGSGAPMADNNEGADGVGNSSGNWHCDSQWSGDRVITTSTRTWALPTYNNHLYKQISSQSGASNDNHYFGYSTPWGYFDFNRFHCHFSPRDWQRLINNNWGFRPKRLNFKLFNIQVKEVTQNDSTTTIANNLTSTVQVFTDSEYQLPYVLGSAHQGCLPPFPADVFMVPQYGYLTLNNGSQAVGRSSFYCLEYFPSQMLRTGNNFTFSYTFEDVPFHSSYAHSQSLDRLMNPLIDQYLYYLNKTQSNSGTLQQSRLLFSQAGPTSMSPQAKNWLPGPCYRQQRLSKQANDNNNSNFPWTAATKYHLNGRDSLVNPGPAMASHKDDEEKFFPMHGTLIFGKQGTNANDADLDNVMITDEEEIRTTNPVATEQYGTVSNNLQNSNTGPTTGTVNHQGALPGMVWQDRDVYLQGPIWAKIPHTDGHFHPSPLMGGFGLKHPPPQIMIKNTPVPANPPTNFSSAKFASFITQYSTGQVSVEIEWELQKENSKRWNPEIQYTSNYNKSVNVDFTVDTNGVYSEPRPIGTRYLTRNL

SEQ ID NO: 2816 - protein, 735 aa, synthetic construct
  REGION 1..735: note = source = /note="Description of Artificial Sequence: Synthetic polypeptide"
MAADGYLPDWLEDTLSEGIRQWWKLKPGPPPPKPAERHKDDSRGLVLPGYKYLGPFNGLDKGEPVNEANAAALEHDKAYDRQLDSGDNPYLKYDHADAEFQERLKEDTSFGGNLGRAVFQAKKRVLEPLGLVEEPVKTAPGKKRSVEHSPVEPDSSSGTGKAGQQPARKRLNFGQTGDADSVPDPQPLGQPPAAPTSLGSTTMATGSGAPMADNNEGADGVGNSSGNWHCDSQWSGDRVITTSTRTWALPTYNNHLYKQISSQSGASNDNHYFGHSTPWGYFDFNRFHCHFSPRDWQRLINNNWGFRPKRLNFKLFNIQVKEVTQNDGTTTIANNLTSTVQVFTDSEYRLPYVLGSAHQGCLPPFPADVFMVPQYGYLTLNNGSQAVGRSSFYCLEYFPSQMLRTGNNFTFSYTFEDVPFHSSYAHSQSLDRLMNPLIDQYLYYLNKTQSNSGTLQQSRLLFSQAGPTSMSLQAKNWLPGPCYRQQRLSKQANDNNNSNFPWTVATKYHLNGRDSLVNPGPAMASHKDDEEKFFPMHGTLIFGKQGTNANDADLDNVMITDEEEIRTTNPVATEQYGTVSNNLQNSNTGPTTGTVNHQGALPGMVWQDRDVYLQGPIWAKIPHTDGHFHPSPLMGGFGLKHPPPQIMIKNTPVPANPPTNFSSAKFASFITQYSTGQVSVEIEWELQKENSKRWNPETQYTSNYNKSVNVDFTVDTNGVYSEPRPIGTRYLTRNL

SEQ ID NO: 2817 - protein, 735 aa, synthetic construct
  REGION 1..735: note = source = /note="Description of Artificial Sequence: Synthetic polypeptide"
MAADGYLPDWLEDTLSEGIRQWWKLKPGPPPPKPAERHKDDSRGLVLPGYKYLGPFNGLDKGEPVNEANAAALEHDKAYDRQLDSGDNPYLKYNHADAEFQERLKEDTSFGGNLGRAVFQAKKRVLEPLGLVEEPVKTAPGKKRPVEHSPVEPDSSSGTGKAGQQPARKRLNFGQTGDADSVPDPQPLGQPPAAPTSLGSTTMATGSGAPMADNNEGADGVGNSSGNWHCDSQWSGDRVITTSTRTWALPTYNNHLYKQISSQSGASNDNHYFGYSTPWGYFDFNRFHCRFSPRDWQRLINNNWGFRPKRLNFKLLNIQVKEVTQNDGTTTIANNLTSTVQVFTDSEYQLPYVLGSAHQGCLPPFPADVFMVPQYGYLTLNNGSQAVGRSSFYCLEYFPSQMLRTGNNFTFSYTFEDVPFHSSYAHSQSLDRLMNPLIDQYLYYLNKTQSNSGTLQQSRLLFSQAGPTSMSLQAKNWLPGPCYRQQRLSKQANDNNNSNFPWTAATKYHLNGRDSLVNPGPAMASHKDDEEKFFPMHGTLIFGKQGTNANDADLDNVMVTDEEEIRTTNPVATEQYGTVSNNLQNSNTGPTTGTVNHQGALPGMVWQDRDVYLQGPIWAKIPHTDGHFHPSPLMGGFGLKHPPPQIMIKNTPVPANPPTNFSSAKFASFITQYSTGQVSVEIEWELQKENSKRWNPETQYTSNYNKSVNVDFTVDTNGVYSEPRPIGTRYLTRNL

SEQ ID NO: 2818 - protein, 735 aa, synthetic construct
  REGION 1..735: note = source = /note="Description of Artificial Sequence: Synthetic polypeptide"
MAADGYLPDWLEDTLSEGIRQWWKLKPGPPPPKPAERHKDDSRGLVLPGYKYLGPFNGLDKGEPVNEADAAALEHDKAYDRQLDSGDNPYLKYNHADAEFQERLKEDTSFGGNLGRAVFQAKKRVLEPLGLVEEPVKTAPGKKRPVEHSPVEPDSSSGTGKAGQQPARKGLNFGQTGDADSVPDPRPLGQPPAAPASLGSTTMATGSGAPMADNNEGADGVGNSSGNWHCDSQWLGDRVITTSTRTWALPTYNNHLYKQISSQSGASNDNHYFGYSTPWGYFDFNRFHCHFSPRDWQRLINNNWGFRPKRLNFKLFNIQVKEVTQNDGTTTIANNLTSTVPVFTDSEYQLPYVLGSAHQGCLPPFPADVFMVPQYGYLTLNNGSQAVGRSSFYCLEYFPSQMLRTGNNFTFSYTFEDVPFHSSYAHSQSLDRLMNPLIDQYLYYLNKTQSNSGTLQQSRLLFSQAGPTSMSLQAKNWLPGPYYRQQRLSKQANDNNNSNFPWTAATKYHPNGRDSLVDPGPAMASHKDDEEKFFPMHGTLIFGKQGTNANDADLDNVMITDEEEIRTTNPVATGQYGTVSNNLQNSNTGPTTGTVNHQGALPGMVWQDRDVYLQGPIWAKIPHTDGHFHPSPLMGGFGLKHPPPQIMVKNTPVPANPPTNFSSAKFVSFITRYSTGQVSVEIEWELQKENSKRWNPEIQYTSNYNKSVNVDFTVDTNGVYSEPRPIGTRYLTRNL

SEQ ID NO: 2819 - protein, 735 aa, synthetic construct
  REGION 1..735: note = source = /note="Description of Artificial Sequence: Synthetic polypeptide"
MAADGYLPDWLEDTLSEGIRQWWKLKPGPPPPKPAERHKDDSRGLVLPGYKYLGPFNGPDKGEPVNEADAAALEHDKAYDRQLDSGDNPYLKYNHADAEFQERLKEDTSFGGNLGRAVFQAKKRVLEPLGLVEEPVKTAPGKKRPVEHSPVEPDSSSGTGKAGQQPARKRLNFGQTGDADSVPDPQPLGQPPAAPTSLGSTTMATGSGAPMADNNEGADGVGNSSGNWHCDSQWSGDRVITTSTRTWALPTYNNHLYKQISSQSGASNDNHYFGYSTPWGYFDFNRFHCHFSPRDWQRLINNNWGFRPKRLNFKLFNIQVKEVTQNDGTTTIANNLTSTVQVFTDSEYQLPYVLGSAHQGCLPPFPADVFMVPQYGYLTLNNGSQAVGRSSFYCLEYFPSQMLRTGNNFTFSYTFEDVPFHSSYAHSQSLDRLMNPLIDQYLYYLNKTQSNSGTLQQSRLLFSQAGPTSMSLQAKNWLPGPCYRQQRLSKQANDNNNSNFPWTAATKYHLNGRDSLVNPGPAMASHKDDEEKFFPMHGTLIFGKQGTNANDADLDNVMITDEEEIRTTNPVATEQYGTVSNNLQNSNTGPTTGTVNHQGALPGMVWQDRDVYLQGPIWAKIPHTDGHFHPSPLMGGFGLKHPPPQIMIKNTPVPANPPTNFSSAKFASFITQYSTGQVSVEIEWELQKENSKRWNPEIQYTSNYNKSVNVDFTVDTNGVYSEPRPIGTRYLTRNL

SEQ ID NO: 2820 - protein, 735 aa, synthetic construct
  REGION 1..735: note = source = /note="Description of Artificial Sequence: Synthetic polypeptide"
MAADGYLPDWLEDTLSEGIRQWWKLKPGPPPPKPAERHKDDSRGLVLPGYKYLGPFNGLDKGEPVNEADAAALEHDKAYDRQLDSGDNPYLKYNHADAEFQERLKEDTSFGGNLGRAVFQAKKRVLEPLGLVEEPVKTAPGKKRPVEHSPVEPDSSSGTGKAGQQPARKRLNFGQTGDADSVPDPQPLGQPPAAPTSLGSTTMATGSGAPMADNNEGADGVGNSSGNWHCDSQWSGDRVITTSTRTWALPTYNNHLYKQISSQSGASNDNHYFGYSTPWGYFDFNRFHCHFSPRDWQRLINNNWGFRPKRLNFKLFNIQVKEVTQNDGTTTIANNLTSTVQVFTDSEYQLPYVLGSAHQGCLPPFPADVFMVPQYGYLTLNNGSQAVGRSSFYCLEYFPSQMLRTGNNFTFSYTFEDVPFHSSYAHSQSLDRLMNPLIDQYLYYLNKTQSNSGTLQQSRLLFSQAGPTSMSLQAKNWLPGPCYRQQRLSKQANDNNNSNFPWTAATKYHLNGRDSLVNPGPAMASHKDDEEKFFPMHGTLIFGKQGTNANDADLDNVMITDEEEIRTTNPVATEQYGTVSNNLQNSNTGPTTGTVNHQGALPGMVWQDRDVYLQGPIWAKIPHTDGHFHPSPLMGGFGLKHPPPQIMIKNTPVPANPPTNFSSAKFASFITQYSTGQVSVEIEWELQKENSKRWNPETQYTSNYNKSVNVDFTVDTNGVYSEPRPIGTRYLTRNL

SEQ ID NO: 2821 - protein, 735 aa, synthetic construct
  VARIANT 574: note = Any naturally occurring amino acid
  REGION 1..735: note = source = /note="Description of Artificial Sequence: Synthetic polypeptide"
MAADGYLPDWLEDTLSEGIRQWWKLKPGPPPPKPAERHKDDSRGLVLPGYKYLGPFNGLDKGEPVNEADAAALEHDKAYDRQLDSGDNPYLKYNHADAEFQERLKEDTSFGGNLGRAVFQAKKRVLEPLGLVEEPVKTAPGKKRPVEHSPVEPDSSSGTGKAGQQPARKGLNFGQTGDADSVPDPRPLGQPPAAPASLGSTTMATGSGAPMADNNEGADGVGNSSGNWHCDSQWLGDRVITTSTRTWALPTYNNHLYKQISSQSGASNDNHYFGYSTPWGYFDFNRFHCHFSPRDWQRLINNNWGFRPKRLNFKLFNIQVKEVTQNDGTTTIANNLTSTVPVFTDSEYQLPYVLGSAHQGCLPPFPADVFMVPQYGYLTLNNGSQAVGRSSFYCLEYFPSQMLRTGNNFTFSYTFEDVPFHSSYAHSQSLDRLMNPLIDQYLYYLNKTQSNSGTLQQSRLLFSQAGPTSMSLQAKNWLPGPYYRQQRLSKQANDNNNSNFPWTAATKYHPNGRDSLVDPGPAMASHKDDEEKFFPMHGTLIFGKQGTNANDADLDNVMITDEEEIRTTNPVATXQYGTVSNNLQNSNTGPTTGTVNHQGALPGMVWQDRDVYLQGPIWAKIPHTDGHFHPSPLMGGFGLKHPPPQIMVKNTPVPANPPTNFSSAKFASFITRYSTGQVSVEIEWELQKENSKRWNPEIQYTSNYNKSVNVDFTVDTNGVYSEPRPIGTRYLTRNL

SEQ ID NO: 2822 - protein, 735 aa, synthetic construct
  REGION 1..735: note = source = /note="Description of Artificial Sequence: Synthetic polypeptide"
MAADGYLPDWLEDTLSEGIRQWWKLKPGPPPPKPAERHKDDSRGLVLPGYKYLGPFNGLDKGEPVNEADAAAPEHDKAYDRQLDSGDNPYPKYNHADAEFQERLKEDTSFGGNLGRAVFQAKKRVLEPLGLVEEPVKTAPGKKRPVEHSPVEPDSSSGTGKAGQQPARKRLNFGQTGDADSVPDPQPLGQPPAAPTSLGSTTMATGSGAPMADNNEGADGVGNSSGNWHCDSQWSGDRVITTSTRTWALPTYNNHLYKQISSQSGASNDNHYFGYSTPWGYFDFNRFHCHFSPRDWQRLINNNWGFRPKRLNFKLFNIQVKEVTQNDGTTTIANNLTSTVQVFTDSEYQLPYVLGSAHQGCLPPFPADVFMVPQYGYLTLNNGSQAVGRSSFYCLEYFPSQMLRTGNNFTFSYTFEDVPFHSSYAHSQSLDRLMNPLIDQYLYYLNKTQSNSGTLQQSRLLFSQAGPTSMSLQAKNWLPGPCYRQQRLSKQANDNNNSNFPWTAATKYHLNGRDSLVNPGPAMASHKDDEEKFFPMHGTLIFGKQGTNANDADLDNVMITDEEEIRTTNPVATEQYGTVSNNLQNSNTGPTTGTVNHQGALPGMVWQDRDVYLQGPIWAKIPHTDGHFHPSPLMGGFGLKHPPPQIMIKNTPVPANPPTNFSSAKFASFITQYSTGQVSVEIEWELQKENSKRWNPEIQYTSNYNKSVNVDFTVDTNGVYSEPRPIGTRYLTRNL

SEQ ID NO: 2823 - protein, 735 aa, synthetic construct
  REGION 1..735: note = source = /note="Description of Artificial Sequence: Synthetic polypeptide"
MAADGYLPDWLEDTLSEGIRQWWKLKPGPPPPKPAERHKDDSRGLVLPGYKYLGPFNGLDKGEPVNEADAAALEHDKAYDRQLDSGDNPYLKYNHADAEFQERLKEDTSFGGNLGRAVFQAKKRVLEPLGLVVEPVKTAPGKKRPVEHSPVEPDSSSGTGKAGQQPARKRLNFGQTGDADSVPDPQPLGQPPAAPTSLGSTTMATGSGAPMADNNEGADGVGNSSGNWHCDSQWSGDRVITTSTRTWALPTYNNHLYKQISSRSGASNDNHYFGYSTPWGYFDFNGFHCHFSPRDWQRLINNNWGFRPKRLNFKLFNIQVKEVTQNDGTTTIANNLTSTVQVFTDSEYQLPHVLGSAHQGCLPPFPADVFMVPQYGYLTLNNGSQAVGRSSFYCPEYFPSQMLRTGNNFTFSYTFEDVPFHSSYAHSQSLDRLMNPLIDQYLYYLNKTQSNSGTLQQSRLLFSQAGPTSMSLQAKNWLPGPCYRQQRLSKQANGNNNSNFPWTAATKYHLNGRDSLVNPGPAMASHKDDEEKFFPMHGTLIFGKQGTNANDADLDNVMITDEEEIRTTNPVATEQYGTVSNNLQNSNTGPTTGTVNHQGALPGMVWQDRDVYLQGPIWAKIPHTDGHFHPSPLMGGFGLKHPPPQIMIKNTPVPANPPTNFSSAKFASFITQYSTGQVSVEIEWELQKENSKRWNPEIQYTSNYNKSVNVDFTVDTNGVYSEPRPIGTRYLTRNL

SEQ ID NO: 2824 - protein, 735 aa, synthetic construct
  REGION 1..735: note = source = /note="Description of Artificial Sequence: Synthetic polypeptide"
MAADGYLPDWLEDTLSEGIRQWWKLKPGPPPPKPAERHKDDSRGLVLPGYKYLGPFNGLDKGEPVNEADAAALEHDKAYDRQLDSGDNPYLKYNHADAEFQERLKEDTSFGGNLGRAVFQAKKRVLEPLGLVEEPVKTVPGKKRPVEHSPVEPDSSSGTGKAGQQPARKRLNFGQTGDADSVPDPQPLGQPPAAPTSLGSTTMATGSGAPMADNNEGADGVGNSSGNWHCDSQWSGDRVITTSTRTWALPTYNNHPYKQISSQSGASNDNHYFGYSTPWGYFDFNRFHCHFSPRDWQRLINNNWGFRPKRLNFKLFNIQVKEVTQNDGTTTIANNLTSTVQVFTDSEYQLPYVLGSAHQGRLPPFPADVFMVPQYGYLTLNNGSQAVGRSSFYCLEYFPSQMLRTGNNFTFSYTFEDVPFHSSYAHSQSLDRLMNPLIDQYLYYLNKTQSNSGTLQQSRLLFSQAGPTSMSLQAKNWLPGPCYRQQRLSKQADDNNNSNFPWTAATKYHLNGRDSLVNPGPAMASHKDDEEKFFPMHGTLIFGKQGTNANDADLDNVMITDEEEIRTTNPVATEQYGTVSNNLQNSNTGPTTGTVNHQGALPGMVWQDRDVYLQGPIWAKIPHTDGHFHPSPLMGGFGLKHPPPQIMIKNTPVPANPPTNFSSAKFASFITQYSTGQVSVEIEWELQKENSKRWNPEIQYTSNYNKSVNVDFTVDANGVYSEPRPIGTRYLTRNL

SEQ ID NO: 2825 - protein, 735 aa, synthetic construct
  REGION 1..735: note = source = /note="Description of Artificial Sequence: Synthetic polypeptide"
MAADGYLPDWLEDTLSEGIRQWWKLKPGPPPPKPAERHKDDSRGLVLSGYKYLGPFNGLDKGEPVNEADAAALEHDKAYDRQLDSGDNPYLKYNHADAEFQERLKEDTSFGGNLGRAVFQAKKRVLEPLGLVEEPVKTAPGKKRPVEHSPVEPDSSSGTGKAGQQPARKRLNFGQTGDADSVPDPQPLGQPPAAPTSLGSTTMATGSGAPMADNNEGADGVGNSSGNWHCDSQWSGDRVITTSTRTWALPTYNNHLYKQISSQSGASNDNHYFGYSTPWGYFDFNRFHCHFSPRDWQRLINNNWGFRPKRLNFKLFNIQVKEVTQNDGTTTIANNLTSTVQVFTDSEYQLPYVLGSAHQGCLPPFPADVFMVPQYGYLTLNNGSQAVGRSSFYCLEYFPSQMLRTGNNFTFSYTFEDVPFHSSYAHSQSLDRLMNPLIDQYLYYLNKTQSNSGTLQQSRLLFSQAGPTSMSLQAKNWLPGPCYRQQRLSKQANDNNNSNFPWTAATKYHLNGRDSLVNPGPAMASHKDDEEKFFPMHGTLIFGKQGTNANDADLDNVMITDEEEIRTTNPVATEQYGTVSNNLQNSNTGPTTGTVNHQGALPGMVWQDRDVYLQGPIWAKIPHTDGHFHPSPLMGGFGLKHPPPQIMIKNTPVPANPPTNFSSAKFASFITQYSTGQVSVEIEWELQKENSKRWNPEIQYTSNYNKSVNVDFTVDTNGVYSEPRPIGTRYLTRNL

SEQ ID NO: 2826 - protein, 735 aa, synthetic construct
  REGION 1..735: note = source = /note="Description of Artificial Sequence: Synthetic polypeptide"
MAADGYLPDWLEDTLSEGIRQWWKLKPGPPPPKPAERHKDDSRGLVLPGYKYLGPFNGLDKGEPVNEADAAALEHDKAYDRQLDSGDNPYLKYNHADAEFQERLKEDTSFGGNLGRAVFQAKKRVLEPLGLVEEPVKTAPGKKRPVEHSPVEPDSSSGTGKAGQQPARKRLNFGQTGDADSVPDPQPLGQPPAAPTSLGSTTMATGSGAPMADNNEGADGVGNSSGNWHCDSQWSGDRVITTSTRTWALPTYNNHLYKQISSQSGASNDNHYFGYSTPWGYFDFNRFHCHFSPRDWQRLINNNWGFRPKRLNFKLFNIQVKEVTQNDGTTTIANNLTSTVQVFTDSEYQLPYVLGSAHQGCLPPFPADVFMVPQYGYLTLNNGSQAVGRSSFYCLEYFPSQMLRTGNNFTFSYTFEDVPFHSSCAHSQSLDRLMNPLIDQYLYYLNKTQSNSGTLQQSRLLFSQAGPTSMSLQAKNWLPGPCYRQQRLSKQANDNNNSNFPWTAATKYHLNGRDSLVNPGPAMASHKDDEEKFFPMHGTLIFGKQGTNANDADLDNVMITDEEEIRTTNPVATEQYGTVSNNLQNSNTGPTTGTVNHQGALPGMVWQDRDVYLQGPIWAKIPHTDGHFHPSPLMGGFGLKHPPPQIMIKNTPVPANPPTNFSSAKFASFITQYSTGQVSVEIEWELQKENSKRWNPEIQYTSNYNKSVNVDFTVDTNGVYSEPRPIGTRYLTRNL

SEQ ID NO: 2827 - protein, 735 aa, synthetic construct
  REGION 1..735: note = source = /note="Description of Artificial Sequence: Synthetic polypeptide"
MAADGYLPDWLEDTLSEGIRQWWKLKPGPPPPKPAERHKDDSRGLVLPGYKYLGPFNGLDKGEPVNEADAAALEHDKAYDRQLDSGDNPYLKYNHADAEFQERLKEDTSFGGNLGRAVFQAKKRVLEPLGLVEEPVKTAPGKKRPVEHSPVEPDSSSGTGKAGQQPARKRLNFGQTGDADSVPDPQPLGQPPAAPTSLGSTTMATGSGAPMADNNEGADGVGNSSGNWHCDSQWSGDRVITTSTRTWALPTYNNHLYKQISSQSGASNDNHYFGYSTPWGYFDFNRFHCHFSPRDWQRLINNNWGFRPKRLNFKLFNIQVKEVTQNDGTTTIANNLTSTVPVFTDSEYQLPYVLGSAHQGCLPPFPADVFMVPQYGYLTLNNGSQAVGRSSFYCLEYFPSQMLRTGNNFTFSYTFEDVPFHSSYAHSQSLDRLMNPLIDQYLYYLNKTQSNSGTLQQSRLLFSQAGPTSMSLQAKNWLPGPYYRQQRLSKQANDNNNSNFPWTAATKYHPNGRDSLVDPGPAMASHKDDEEKFFPMHGTLIFGKQGTNANDADLDNVMITDEEEIRTTNPVATGQYGTVSNNLQNSNTGPTTGTVNHQGALPGMVWQDRDVYLQGPIWAKIPHTDGHFHPSPLMGGFGLKHPPPQIMVKNTPVPANPPTNFSSAKFASFITRYSTGQVSVEIEWELQKENSKRWNPEIQYTSNYNKSVNVDFTVDTNGVYSEPRPIGTRYLTRNL

SEQ ID NO: 2828 - protein, 735 aa, synthetic construct
  REGION 1..735: note = source = /note="Description of Artificial Sequence: Synthetic polypeptide"
MAADGYLPDWLEDTLSEGIRQWWKLKPGPPPPKPAERHKDDSRGLVLPGYKYLGPFNGPDKGEPVNEADAAALEHDKAYDRQLDSGDNPYLKYNHADAEFQERLKEDTSFGGNLGRAVFQAKKRVLEPLGLVEEPVKTAPGKKRPVEHSPVEPDSSSGTGKAGQQPARKRLNFGQTGDADSVPDPQPLGQPPAAPTSLGSTTMATGSGAPMADNNEGADGVGNSSGNWHCDSQWSGDRVITTSTRTWALPTYNNHLYKQISSQSGASNDNHYFGYSTPWGYFDFNRFHCHFSPRDWQRLINNNWGFRPKRLNFRLFNIQVKEVTQNDGTTTIANNLTSTVQVFTDSEYQLPYVLGSAHQGCLPPFPADVFMVPQYGYLTLNNGSQAVGRSSFYCLEYFPSQMLRTGNNFTFSYTFEDVPFHSSYAHSQSLDRLMNPLIDQYLYYLNKTQSNSGTLQQSRLLFSQAGPTSMSLQAKNWLPGPCYRQQRLSKQANDNNNSNFPWTAATKYHLNGRDSLVNPGPAMASHKDDEEKFFPMHGTLIFGKQGTNANDADLDNVMITDEEEIRTTNPVATEQYGTVSNNLQNSNTGPTTGTVNHQGALPGMVWQDRDVYLQGPIWAKIPHTDGHFHPSPLMGGFGLKHPPPQIMIKNTPVPANPPTNFSSAKFASFITQYSTGQVSVEIEWELQKENSKRWNPEIQYTSNYNKSVNVDFTVDTNGVYSEPRPIGTRYLTRNL

SEQ ID NO: 2829 - protein, 735 aa, synthetic construct
  REGION 1..735: note = source = /note="Description of Artificial Sequence: Synthetic polypeptide"
MAADGYLPDWLEDTLSEGIRQWWKLKPGPPPPKPAERHKDDSRGLVLPGYKYLGPFNGPDKGEPVNEADAAALEHDKAYDRQLDSGDNPYLKYNHADAEFQERLKEDTSFGGNLGRAVFQAKKRVLEPLGLVEEPVKTAPGKKRPVEHSPVEPDSSSGTGKAGQQPARKRLNFGQTGDADSVPDPQPLGQPPAAPTSLGSTTMATGSGAPMADNNEGADGVGNSSGNWHCDSQWSGDRVITTSTRTWALPTYNNHLYKQISSQSGASNDNHYFGYSTPWGYFDFNRFHCHFSPRDWQRLINNNWGFRPKRLNFRLFNIQVKEVTQNDGTTTIANNLTSTVQVFTDSEYQLPYVLGSAHQGCLPPFPADVFMVPQYGYLTLNNGGQAVGRSSFYCLEYFPSQMLRTGDNFTFSYTFEDVPFHSSYAHSQSLDRLMNPLIDQYLYYLNKTQSNSGTLQQSRLLFSQAGPTSMSLQAKNWLPGPCYRQQRLSKQANDNNNSNFPWTAATKYHLNGRDSLVNPGPAMASHKDDEEKFFPMHGTLIFGKQGTNANDADLDNVMITDEEEIRTTNPVATEQYGTVSNNLQNSNTGPTTGTVNHQGALPGMVWQDRDVYLQGPIWAKIPHTDGHFHPSPLMGGFGLKHPPPQIMIKNTPVPANPPTNFSSAKFASFITQYSTGQVSVEIEWELQKENSKRWNPEIQYTSNYNKSVNVDFTVDTNGVYSEPRPIGTRYLTRNL

SEQ ID NO: 2830 - protein, 735 aa, synthetic construct
  REGION 1..735: note = source = /note="Description of Artificial Sequence: Synthetic polypeptide"
MAADGYLPDWLEDTLSEGIRQWWKLKPGPPPPKPAERHKDDSRGLVLPGYKYLGPFNGLDKGEPVNEADAAALEHDKAYDRQLDSGDNPYLKYNHADAEFQERLKEDTSFGGNLGRAVFQAKKRVLEPLGLVEEPVKTAPGKKRPVEHSPVEPDSSSGTGKAGQQPARKRLNFGQTGDADSVPDPQPLGQPPAAPTSLGSTTMATGSGAPMADNNEGADGVGNSSGNWHCDSQWSGDRVITTSTRTWALPTYNNHLYKQISSQSGASNDNHYFGYSTPWGYFDFNRFHCHFSPRDWQRLINNNWGFRPKRLNFKLFNIQVKEVTQNDGTTTIANNLTSTVQVFTDSEYQLPYVLGSAHQGCLPPFPADVFMVPQYGYLTLNNGSQAVGRSSFYCLEYFPSQMLRTGNNFTFSYTFEDVPFHSSYAHSQSLDRLMNPLIDQYLYYLNKTQSNSGTLQQSRLLFSQAGPTSMSLQAKNWLPGPCYRQQRLSKQANDNNNSNFPWTAATKYHLNGRDSLVNPGPAMASHKDDEEKFFPMHGTLIFGKQGTNANDADLDNAMITDEEEIRTTNPVATEQYGTVSNNLQNSNTGPTTGTVNHQGALPGMVWQDRDVYLQGPIWAKIPHTDGHFHPSPLMGGFGLKHPPPQIMIKNTPVPANPPTNFSSAKFASFITQYSTGQVSVEIEWELQKENSKRWNPEIQYTSNYNKSVNVDFTVDTNGVYSEPRPIGTRYLTRNL

SEQ ID NO: 2831 - protein, 735 aa, synthetic construct
  REGION 1..735: note = source = /note="Description of Artificial Sequence: Synthetic polypeptide"
MAADGYLPDWLEDTLSEGIRQWWKLKPGPPPPKPAERHKDDSRGLVLPGYKYLGPFNGLDKGEPVNEANAAALEHDKAYDRQLDSGDNPYLKYNHADAEFQERLKEDTSFGGNLGRAVFQAKKRVLEPLGLVEEPVKTAPGKKRPVEHSPVEPDSSSGTGKAGQQPARKRLNFGQTGDADSVPDPQPLGQPPAAPTSLGSTTMATGSGAPMADNNEGADGVGNSSGNWHCDSQWSGDRVITTSTRTWALPTYNNHLYKQISSQSGASNDNHYFGYSTPWGYFDFNRFHCHFSPRDWQRLINNNWGFRPKRLNFKLFNIQVKEVTQNDGTTTIANNLTSTVQVFTDSEYQLPYVLGSAHQGCLPPFPADVFMVPQYGYLTLNNGSQAVGRSSFYCLEYFPSQMLRTGNNFTFSYTFEDVPFHSSYAHSQSLDRLMNPLIDQYLYYLNKTQSNSGTLQQSRLLFSQAGPTSMSLQAKNWLPGPCYRQQRLSKQANDNNNSNFPWTAATKYHLNGRDSLVNPGPAMASHKDDEEKFFPMHGTLIFGKQGTNANDADLDNVMITDEEEIRTTNPVATEQYGTVSNNLQNSNTGPTTGTVNHQGALPGMVWQDRDVYLQGPIWAKIPHTDGHFHPSPLMGGFGLKHPPPQIMIKNTPVPANPPTNFSSAKFASFITQYSTGQVSVEIEWELQKENSKRWNPETQYTSNYNKSVNVDFTVDTNGVYSEPRPIGTRYLTRNL

SEQ ID NO: 2832 - protein, 735 aa, synthetic construct
  REGION 1..735: note = source = /note="Description of Artificial Sequence: Synthetic polypeptide"
MAADGYLPDWLEDTLSEGIRQWWKLKPGPPPPKPAERHKDDSRGLVLPGYKYLGPFNGPDKGEPVNEADAAALEHDKAYDRQLDSGDNPYLKYNHADAEFQERLKEDTSFGGNLGRAVFQAKKRVLEPLGLVEEPVKTAPGKKRPVEHSPVEPDSSSGTGKAGQQPARKRLNFGQTGDADSVPDPQPLGQPPAAPTSLGSTTMATGSGAPMADNNEGADGVGNSSGNWHCDSQWSGDRVITTSTRTWALPTYNNHLYKQISSQSGASNDNHYFGYSTPWGYFDFNRFHCHFSPRDWQRLINNNWGFRPKRLNFRLFNIQVKEVTQNDGTTTIANNLTSTVQVFTDSEYQLPYVLGSAHQGCLPPFPADVFMVPQYGYLTLNNGSQAVGRSSFYCLEYFPSQMLRTGDNFTFSYTFEDVPFHSSYAHSQSLDRLMNPLIDQYLYYLNKTQSNSGTLQQSRLLFSQAGPTSMSLQAKNWLPGPCYRQQRLSKQANDNNNSNFPWTAATKYHLNGRDSLVNPGPAMASHKDDEEKFFPMHGTLIFGKQGTNANDADLDNVMITDEEEIRTTNPVATEQYGTVSNNLQNSNTGPTTGTVNHQGALPGMVWQDRDVYLQGPIWAKIPHTDGHFHPSPLMGGFGLKHPPPQIMIKNTPVPANPPTNFSSAKFASFITQYSTGQVSVEIEWELQKENSKRWNPEIQYTSNYNKSVNVDFTVDTNGVYSEPRPIGTRYLTRNL

SEQ ID NO: 2833 - protein, 735 aa, synthetic construct
  REGION 1..735: note = source = /note="Description of Artificial Sequence: Synthetic polypeptide"
MAADGYLPDWLEDTLSEGIRQWWKLKPGPPPPKPAERHKDDSRGLVLPGYKYLGPFNGLDKGEPVNEADAAALEHDKAYDRQLDSGDNPYLKYNHADAEFQERLKEDTSFGGNLGRAVFQAKKRVLEPLGLVEEPVKTAPGKKRPVEHSPVEPDSSSGTGKAGQQPARKGLNFGQTGDADSVPDPRPLGQPPAAPASLGSTTMATGSGAPMADNNEGADGVGNSSGNWHCDSQWLGDRVITTSTRTWALPTYNNHLYKQISSQSGASNDNHYFGYSTPWGYFDFNRFHCHFSPRDWQRLINNNWGFRPKRLNFKLFNIQVKEVTQNDGTTTIANNLTSTVPVFTDSEYQLPYVLGSAHQGCLPPFPADVFMVPQYGYLTLNNGSQAVGRSSFYCLEYFPSQMLRTGNNFTFSYTFEDVPFHSSYAHSQSLDRLMNPLIDQYLYYLNKTQSNSGTLQQSRLLFSQAGPTSMSLQAKNWLPGPYYRQQRLSKQANDNNNSNFPWTAATKYHPNGRDSLVDPGPAMASHKDDEEKFFPMHGTLIFGKQGTNANDADLDNVMITDEEEIRTTNPVATGQYGTVSNNLQNSNTGPTTGTVNHQGALPGMVWQDRDVYLQGPIWAKIPHTDGHFHPSPLMGGFGLKHPPPQIMVKNTPVPANPPTNFSSAKFASFITRYSTGQVSVEIEWELQKENSKRWNPEIQYTSNYNKSVNVDFTVDTNGVYSEPRPIGTRYLTRNL

SEQ ID NO: 2834 - protein, 735 aa, synthetic construct
  REGION 1..735: note = source = /note="Description of Artificial Sequence: Synthetic polypeptide"
MAADGYLPDWLEDTLSEGIRQWWKLKPGPPPPKPAERHKDDSRGLVLPGYKYLGPFNGLDKGEPVNEADAAALEHDKAYDRQLDSGDNPYLKYNHADAEFQERLKEDTSFGGNLGRAVFQAKKRVLEPLGLVEEPVKTVPGKKRPVEHSPVEPDSSSGTGKAGQQPARKRLNFGQTGDADSVPDPQPLGQPPAAPTSLGSTTMATGSGAPMADNNEGADGVGNSSGNWHCDSQWSGDRVITTSTRTWALPTYNNHPYKQISSQSGASNDNHYFGYSTPWGYFDFNRFHCHFSPRDWQRLINNNWGFRPKRLNFKLFNIQVKEVTQNDGTTTIANNLTSTVQVFTDSEYQLPYVLGSAHQGRLPPFPADVFMVPQYGYLTLNNGSQAVGRSSFYCLEYFPSQMLRTGNNFTFSYTFEDVPFHSSYAHSQSLDRLMNPLIDQYLYYLNKTQSNSGTLQQSRLLFSQAGPTSMSLQAKNWLPGPCYRQQRLSKQADDNNNSNFPWTAATKYHLNGRDSLVNPGPAMASHKDDEEKFFPMHGTLIFGKQGTNANDADLDNVMITDEEEIRTTNPVATEQYGTVSNNLQNSNTGPTTGTVNHQGALPGMVWQDRDVYLQGPIWAKIPHTDGHFHPSPLMGGFGLKHPPPQIMIKNTPVPANPPTNFSSAKFASFITQYSTGQVSVEIEWELQKENSKRWNPEIQYTSNYNKSVNVDFTVDTNGVYSEPRPIGTRYLTRNL

SEQ ID NO: 2835 - protein, 735 aa, synthetic construct
  REGION 1..735: note = source = /note="Description of Artificial Sequence: Synthetic polypeptide"
MAADGYLPDWLEDTLSEGIRQWWKLKPGPPPPKPAERHKDDSRGLVLPGYKYLGPFNGLDKGEPVNEADAAALEHDKAYDRQLDSGDNPYLKYNHADAEFQERLKEDTSFGGNLGRAVFQAKKRVLEPLGLVEEPVKTAPGKKRPVEQSPAEPDSSSGTGKAGNQPARKRLNFGQTGDADSVPDPQPLGQPPAAPSGLGSTTMATGSGAPMADNNEGADGVGNSSGNWHCDSQWLGDRVITTSTRTWALPTYNNHLYKQISSQSGASNDNHYFGYSTPWGYFDFNRFHCHFSPRDWQRLINNNWGFRPKRLNFKLFNIQVKEVTQNDGTTTIANNLTSTVQVFTDSEYQLPYVLGSAHQGCLPPFPADVFMVPQYGYLTLNNGSQAVGRSSFYCLEYFPSQMLRTGNNFTFSYTFEDVPFHSSYAHSQSLDRLMNPLIDQYLYYLNKTQSNSGTLQQSRLLFSQAGPTSMSLQAKNWLPGPCYRQQRLSKQANDNNNSNFPWTAATKYHLNGRDSLVNPGPAMASHKDDEEKFFPMHGTLIFGKQGTNANDADLDNVMITDEEEIRTTNPVATEQYGTVSNNLQNSNTGPTTGTVNHQGALPGMVWQDRDVYLQGPIWAKIPHTDGHFHPSPLMGGFGLKHPPPQIMIKNTPVPANPPTNFSSAKFASFITQYSTGQVSVEIEWELQKENSKRWNPEIQYTSNYNKSVNVDFTVDTNGVYSEPRPIGTRYLTRNL

SEQ ID NO: 2836 - protein, 734 aa, synthetic construct
  REGION 1..734: note = source = /note="Description of Artificial Sequence: Synthetic polypeptide"
MAADGYLPDWLEDTLSEGIRQWWKLKPGPPPKPAERHKDDSRGLVLPGYKYLGPFNGLDKGEPVNEADAAALEHDKAYDRQLDSGDNPYLKYNHADAEFQERLKEDTSFGGNLGRAVFQAKKRVLEPLGLVEEPVKTAPGKKRPVEQSPAEPDSSSGTGKAGNQPARKRLNFGQTGDADSVPDPQPLGQPPAAPSGLGSTTMATGSGAPMADNNEGADGVGNSSGNWHCDSQWLGDRVITTSTRTWALPTYNNHLYKQISSQSGASNDNHYFGYSTPWGYFDFNRFHCHFSPRDWQRLINNNWGFRPKRLNFKLFNIQVKEVTQNDGTTTIANNLTSTVQVFTDSEYQLPYVLGSAHQGCLPPFPADVFMVPQYGYLTLNNGSQAVGRSSFYCLEYFPSQMLRTGNNFTFSYTFEDVPFHSSYAHSQSLDRLMNPLIDQYLYYLNKTQSNSGTLQQSRLLFSQAGPTSMSLQAKNWLPGPCYRQQRLSKQANDNNNSNFPWTAATKYHLNGRDSLVNPGPAMASHKDDEEKFFPMHGTLIFGKQGTNANDADLDNVMITDEEEIRTTNPVATEQYGTVSNNLQNSNTGPTTGTVNHQGALPGMVWQDRDVYLQGPIWAKIPHTDGHFHPSPLMGGFGLKHPPPQIMIKNTPVPANPPTNFSSAKFASFITQYSTGQVSVEIEWELQKENSKRWNPEIQYTSNYNKSVNVDFTVDTNGVYSEPRPIGTRYLTRNL

SEQ ID NO: 2837 - protein, 735 aa, synthetic construct
  REGION 1..735: note = source = /note="Description of Artificial Sequence: Synthetic polypeptide"
MAADGYLPDWLEDTLSEGIRQWWKLKPGPPPPKPAERHKDDSRGLVLPGYKYLGPFNGLDKGEPVNEADAAALEHDKAYDRQLDSGDNPYLKYNHADAEFQERLKEDTSFGGNLGRAVFQAKKRVLEPLGLVEEPVKTAPGKKRPVEQSPAEPDSSSGTGKAGNQPARKRLNFGQTGDADSVPDPQPLGQPPAAPSGLGSTTMATGSGAPMADNNEGADGVGNSSGNWHCDSQWLGDRVITTSTRTWALPTYNNHLYKQISSQSGASNDNHYFGYSTPWGYFDFNRFHRHFSPRDWQRLINNNWGFRPKRLNFKLFNIQVKEVTQNDGTTTIANNLTSTVQVFTDSEYQLPYVLGSAHQGCLPPFPADVFMVPQYGYLTLNNGSQAVGRSSFYCLEYFPSQMLRTGNNFTFSYTFEDVPFHSSYAHSQSLDRLMNPLIDQYLYYLNKTQSNSGTLQQSRLLFSQAGPTSMSLQAKNWLPGPCYRQQRLSKQANDNNNSNFPWTAATKYHLNGRDSLVNPGPAMASHKDDEEKFFPMHGTLIFGKQGTNANDADLDNVMITDEEEIRTTNPVATEQYGTVSNNLQNSNTGPTTGTVNHQGALPGMVWQDRDVYLQGPIWAKIPHTDGHFHPSPLMGGFGLKHPPPQIMIKNTPVPANPPTNFSSAKFASFITQYSTGQVSVEIEWELQKENSKRWNPEIQYTSNYNKSVNVDFTVDTNGVYSEPRPIGTRYLTRNL

SEQ ID NO: 2838 - protein, 734 aa, synthetic construct
  REGION 1..734: note = source = /note="Description of Artificial Sequence: Synthetic polypeptide"
MAADGYLPDWLEDTLSEGIRQWWKLKPGPPPPKPAERHKDDSRGLVLPGYKYLGPFNGLDKGEPVNEADAAALEHDKAYDRQLDSGDNPYLKYNHADAEFQERLKEDTSFGGNLGRAVFQAKKRVLEPLGLVEEPVKTAPGKKRPVEQSPAEPDSSSGTGKAGNQPARKRLNFGQTGDADSVPDPQPLGQPPAAPSGLGSTTMATGSGAPMADNNEGADGVGNSSGNWHCDSQWLGDRVITTSTRTWALPTYNNHLYKQISSQSGASNDNHYFGYSTPWGYFDFNRFHCHFSPRDWQRLINNNWGFRPKRLNFKLFNIQVKEVTQNDGTTTIANNLTSTVQVFTDSEYQLPYVLGSAHQGCLPPFPADVFMVPQYGYLTLNNGSQAVGRSSFYCLEYFPSQMLRTGNNFTFSYTFEDVPFHSSYAHSQSLDRLMNPLIDQYLYYLNKTQSNSGTLQQSRLLFSQAGPTSMSLQAKNWLPGPCYRQQRLSKQANDNNSNFPWTAATKYHLNGRDSLVNPGPAMASHKDDEEKFFPMHGTLIFGKQGTNANDADLDNVMITDEEEIRTTNPVATEQYGTVSNNLQNSNTGPTTGTVNHQGALPGMVWQDRDVYLQGPIWAKIPHTDGHFHPSPLMGGFGLKHPPPQIMIKNTPVPANPPTNFSSAKFASFITQYSTGQVSVEIEWELQKENSKRWNPEIQYTSNYNKSVNVDFTVDTNGVYSEPRPIGTRYLTRNL

SEQ ID NO: 2839 - protein, 735 aa, synthetic construct
  REGION 1..735: note = source = /note="Description of Artificial Sequence: Synthetic polypeptide"
MAADGYLPDWLEDTLSEGIRQWWKLKPGPPPPRPAERHQDDSRGLVLPGYKYLGPFNGLDKGEPVNEADAAALEHDKAYDRQLDSGDNPYLKYNHADAEFQERLKEDTSFGGNLGRAVFQAKKRVLEPLGLVEEPVKTAPGKKRPVEHSPAEPDSSSGTGKAGQQPARKRLNFGQTGDADSVPDPQPLGQPPAAPTSLGSTTMATGSGAPMADNNEGADGVGNSSGNWHCDSQWLGDRVITTSTRTWALPTYNNHLYKQISSQSGASNDNHYFGYSTPWGYFDFNRFHCHFSPRDRQRLINNNWGFRPKRLNFKLFNIQVKEVTQNDGTTTIANNLTSTVQVFTDSEYQLPYVLGSAHQGCLPPFPADVFMVPQYGYLTLNNGSQAVGRSSFYCLEYFPSQMLRTGNNFTFSYTFEDVPFHSSYAHSQSLDRLMNPLIDQYLYYLNRTQSNSGTLQQSRLLFSQAGPTSMSLQAKNWLPGPCYRQQRLSKQANDNNNSNFPWTAATKYHLNGRDSLVNPGPAMASHKDDEEKFFPMHGTLIFGKQGTNANDADLEHVMITDEEEIRTTNPVATEQYGNVSNNLQNSNTGPTTENVNHQGALPGMVWQDRDVYLQGPIWAKIPHTDGHFHPSPLMGGFGLKHPPPQIMIKNTPVPANPPTNFSAAKFASFITQYSTGQVSVEIEWELQKENSKRWNPEIQYTSNYNKSVNVDFTVDANGVYSEPRPIGTRYLTRNL

SEQ ID NO: 2840 - protein, 735 aa, synthetic construct
  REGION 1..735: note = source = /note="Description of Artificial Sequence: Synthetic polypeptide"
MAADGYLPDWLEDTLSEGIRQWWKLKPGPPPPRPAERHQDDSRGLVLPGYKYLGPFNGLDKGEPVNEADAAALEHDKAYDRQLDSGDNPYLKYNHADAEFQERLKEDTSFGGNLGRAVFQAKKRVLEPLGLVEEPVKTAPGKKRPVEHSPAEPDSSSGTGKAGQQPARKRLNFGQTGDADSVPDPQPLGQPPAAPTSLGSTTMATGSGAPMADNNEGADGVGNSSGNWHCDSQWLGDRVITTSTRTWALPTYNNHLYKQISSQSGASNDNHYFGYSTPWGYFDFNRFHCHFSPRDWQRLINNNWGFRPKRLNFKLFNIQVKEVTQNDGTTTIANNLTSTVQVFTDSEYQLPYVLGSAHQGCLPPFPADVFMVPQYGYLTLNNGSQAVGRSSFYCLEYFPSQMLRTGNNFTFSYTFEDVPFHSSYAHSQSLDRLMNPLIDQYLYYLNRTQSNSGTLQQSRLLFSQAGPTSMSLQAKNWLPGPCYRQQRLSKQANDNNNSNFPWTAATKYRLNGRDSLVNPGPAMASHKDDEEKFFPMHGTLIFGKQGTNANDADLEHVMITDEEEIRTTNPVATEQYGNVSNNLQNSNTGPTTENVNHQGALPGMVWQDRDVYLQGPIWAKIPHTDGHFHPSPLMGGFGLKHPPPQIMIKNTPVPANPPTNFSAAKFASFITQYSTGQVSVEIEWELQKENSKRWNPEIQYTSNYNKSVNVDFTVDANGVYSEPRPIGTRYLTRNL

SEQ ID NO: 2841 - protein, 735 aa, synthetic construct
  REGION 1..735: note = source = /note="Description of Artificial Sequence: Synthetic polypeptide"
MAADGYLPDWLEDTLSEGIRQWWKLKPGPPPPRPAERHQDDSRGLVLPGYKYLGPFNGLDKGEPVNEADAAALEHDKAYDRQLDSGDNPYLKYNHADAEFQERLKEDTSFGGNLGRAVFQAKKRVLEPLGLVEEPVKTAPGKKRPVEHSPAEPDSSSGTGKAGQQPARKRLNFGQTGDADSVPDPQPLGQPPAAPTSLGSTTMATGSGAPMADNNEGADGVGNSSGNWHCDSQWLGVRVITTSTRTWALPTYNNHLYKQISSQSGASNDNHYFGYSTPWGYFDFNRFHCHFSPRDRQRLINNNWGFRPKRLNFKLFNIQVKEVTQNDGTTTIANNLTSTVQVFTDSEYQLPYVLGSAHQGCLPPFPADVFMVPQYGYLTLNNGSQAVGRSSFYCLEYFPSQMLRTGNNFTFSYTFEDVPFHSSYAHSQSLDRLMNPLIDQYLYYLNRTQSNSGTLQQSRLLFSQAGPTSMSLQAKNWLPGPCYRQQRLSKQANDNNNSNFPWTAATKYHLNGRDSLVNPGPAMASHKDDEEKFFPMHGTLIFGKQGTNANDADLEHVMITDEEEIRTTNPVATEQYGNVSNNLQNSNTGPTTENVNHQGALPGMVWQDRDVYLQGPIWAKIPHTDGHFHPSPLMGGFGLKHPPPQIMIKNTPVPANPPTNFSAAKFASFITQYSTGQVSVEIEWELQKENSKRWNPEIQYTSNYNKSVNVDFTVDANGVYSEPRPIGTRYLTRNL

SEQ ID NO: 2842 - protein, 735 aa, synthetic construct
  REGION 1..735: note = source = /note="Description of Artificial Sequence: Synthetic polypeptide"
MAADGYLPDWLEDTLSEGIRQWWKLKPGPPPPRPAERHQDDSRGLVLPGYKYLGPFNGLDKGEPVNEADAAALEHDKAYDRQLDSGDNPYLKYNHADAEFQERLKEDTSFGGNLGRAVFQAKKRVLEPLGLVEEPVKTAPGKKRPVEHSPAEPDSSSGTGKAGQQPARKRLNFGQTGDADSVPDPQPLGQPPAAPTSLGSTTMAIGSGAPMADNNEGADGVGNSSGNWHCDSQWLGDRVITTSTRTWALPTYNNHLYKQISSQSGASNDNHYFGYSTPWGYFDFNRFHCHFSPRDWQRLINNNWGFRPKRLNFKLFNIQVKEVTQNDGTTTIANNLTSTVQVFTDSEYQLPYVLGSAHQGCLPPFPADVFMVPQYGYLTLNNGSQAVGRSSFYCLEYFPSQMLRTGNNFTFSYTFEDVPFHSSYAHSQSLDRLMNPLIDQYLYYLNRTQSNSGTLQQSRLLFSQAGPTSMSLQAKNWLPGPCYRQQRLSKQANDNNNSNFPWTAATKYHLNGRDSLVNPGPAMASHKDDEEKFFPMHGTLIFGKQGTNANDADLEHVMITDEEEIRTTNPVATEQYGNVSNNLQNSNTGPTTENVNHQGALPGMVWQDRDVYLQGPIWAKIPHTDGHFHPSPLMGGFGLKHPPPQIMIKNTPVPANPPTNFSAAKFASFITQYSTGQVSVEIEWELQKENSKRWNPEIQYTSNYNKSVNVDFTVDANGVYSEPRPIGTRYLTRNL

SEQ ID NO: 2843 - protein, 735 aa, synthetic construct
  REGION 1..735: note = source = /note="Description of Artificial Sequence: Synthetic polypeptide"
MAADGYLPDWLEDTLSEGIRQWWKLKPGPPPPRPAERHQDDSRGLVLPGYKYLGPFNGLDKGEPVNEADAAALEHDKAYDRQLDSGDNPYLKYNHADAEFQERLKEDTSFGGNLGRAVFQAKKRVLEPLGLVEEPVKTAPGKKRPVEHSPAEPDSSSGTGKAGQQPARKRLNFGQTGDADSVPDPQPLGQPPAAPTSLGSTTMATGSGAPMADNNEGADGVGNSSGNWHCDSQWLGDRVITTSTRTWALPTYNNHLYKQISSQSGASNDNHYFGYSTPWGYLDFNRFHCHFSPRDWQRLINNNWGFRPKRLNFKLFNIQVKEVTQNDGTTTIANNLTSTVQVFTDSEYQLPYVLGSAHQGCLPPFPADVFMVPQYGYLTLNNGSQAVGRSSFYCLEYFPSQMLRTGNNFTFSYTFEDVPFHSSYAHSQSLDRLMNPLIDQYLYYLNRTQSNSGTLQQSRLLFSQAGPTSMSLQAKNWLPGPCYRQQRLSKQANDNNNSNFPWTAATKYHLNGRDSLVNPGPAMASHKDDEEKFFPMHGTLIFGKQGTNANDADLEHVMITDEEEIRTTNPVATEQYGNVSNNLQNSNTGPTTENVNHQGALPGMVWQDRDVYLQGPIWAKIPHTDGHFHPSPLMGGFGLKHPPPQIMIKNTPVPANPPTNFSAAKFASFITQYSTGQVSVEIEWELQKENSKRWNPEIQYTSNYNKSVNVDFTVDANGVYSEPRPIGTRYLTRNL

SEQ ID NO: 2844 - protein, 735 aa, synthetic construct
  REGION 1..735: note = source = /note="Description of Artificial Sequence: Synthetic polypeptide"
MAADGYLPDWLEDTLSEGIRQWWKLKPGPPPPKPAERHKDDSRGLVLPGYKYLGPFNGLDKGEPVNEADAAALEHDKAYDRQLDSGDNPYLKYNHADAEFQERLKEDTSFGGNLGRAVFQAKKRVLEPLGLVEEPVKTAPGKKRPVEHSPVEPDSSSGTGKAGQQPARKRLNFGQTGDADSVPDPQPLGQPPAAPTSLGSTTMATGSGAPMADNNEGADGVGNSSGNWHCDSQWLGDRVITTSTRTWALPTYNNHLYKQISSQSGAANDNHYFGYSTPWGYFDFNRFHCHFSPRDWQRLINNNWGFRPKRLNFKLFNIQVKEVTQNDGTTTIANNLTSTVQVFTDSEYQLPYVLGSAHQGCLPPFPADVFMVPQYGYLTLNNGSQAVGRSSFYCLEYFPSQMLRTGNNFTFSYTFEDVPFHSSYAHSQSLDRLMNPLIDQYLYYLNKTQSNSGTLQQSRLLFSQAGPTSMSLQAKNWLPGPCYRQQRLSKQANDNNNSNFPWTAATKYHLNGRDSLVNPGPAMASHKDDEEKFFPMHGTLIFGKQGTNANDADLDNVMITDEEEIRTTNPVATEQYGTVSNNLQNSNTGPTTGTVNHQGALPGMVWQDRDVYLQGPIWAKIPHTDGHFHPSPLMGGFGLKHPPPQIMIKNTPVPANPPTNFSSAKFASFITQYSTGQVSVEIEWELQKENSKRWNPEIQYTSNYNKSVNVDFTVDTNGVYSEPRPIGTRYLTRNL

SEQ ID NO: 2845 - protein, 735 aa, synthetic construct
  REGION 1..735: note = source = /note="Description of Artificial Sequence: Synthetic polypeptide"
MAADGYLPDWLEDTLSEGIRQWWKLKPGPPPPRPAERHQDDSRGLVLPGYKYLGPFNGLDKGEPVNEADAAALEHDKAYDRQLDSGDNPYLKYNHADAEFQERLKEDTSFGGNLGRAVFQAKKRVLEPLGLVEEPVKTAPGKKRPVEHSPAEPDSSSGTGKAGQQPARKRLNFGQTGDADSVPDPQPLGQPPAAPTSLGSTTMATGSGAPMADNNEGADGVGNSSGNWHCDSQWLGDRVITTSTRTWALPTYNNHLYKQISSQSGASNDNHYFGYSTPWGYFDFNRFHCHFSPRDWQRLINNNWGFRPKRLNFKLFNIQVKEVTQNDGTTTIANNLTSTVQVFTDSEYQLPYVLGSAHQGCLPPFPADVFMVPQYGYLTLNNGSQAVGRSSFYCLEYFPSQMLRTGNNFTFSYTFEDVPFHSSYAHSQSLDRLMNPLIDQYLYYLNRTQSNSGTLQQSRLLFSQAGPTSMSLQAKDWLPGPCYRQQRLSKQANDNNNSNFPWTAATKYHLNGRDSLVNPGPAMASHKDDEEKFFPMHGTLIFGKQGTNANDADLEHVMITDEEEIRTTNPVATEQYGNVSNNLQNSNTGPTTENVNHQGALPGMVWQDRDVYLQGPIWAKIPHTDGHFHPSPPMGGFGLKHPPPQIMIKNTPVPANPPTNFSAAKFASFITQYSTGLVSVEIEWELQKENSKRWNPEIQYTSNYNKSVNVDFTVDANGVYSEPRPIGTRYLTRNL

SEQ ID NO: 2846 - protein, 735 aa, synthetic construct
  REGION 1..735: note = source = /note="Description of Artificial Sequence: Synthetic polypeptide"
MAADGYLPDWLEDTLSEGIRQWWKLKPGPPPPKPAERHKDDSRGLVLPGYKYLGPFNGLDKGEPVNEADAAALEHDKAYDRQLDSGDNPYLKYNHADAEFQERLKEDTSFGGNLGRAVFQAKKRVLEPLGLVEEPVKTAPGKKRPVEHSPVEPDSSSGTGKAGQQPARKRLNFGQTGDADSVPDPQPLGQPPAAPSGLGTNTMATGSGAPMADNNEGADGVGNSSGNWHCDSTWMGDRVITTSTRTWALPTYNNHLYKQISSQSGASNDNHYFGYSTPWGYFDFNRFHCHFSPRDWQRLINNNWGFRPKRLSFKLFNIQVKEVTQNDGTTTIANNLTSTVQVFTDSEYQLPYVLGSAHQGCLPPFPADVFMVPQYGYLTLNNGSQAVGRSSFYCLEYFPSQMLRTGNNFTFSYTFEDVPFHSSYAHSQSLDRLMNPLIDQYLYYLSKTNAPSGTHQMSRLQFSQAGASDMSGPARNWLPGPCYRQQRVSKQAADNNNSDLPWTGATKYHLNGRDSLVNPGPAMASHKDDEEKFFLMSGVLIFGKQGSNENNVDIEKVMITDEEEIRTTNPVATEQYGSVSTNLQSANTSPATSDVNHQGVLPGMVWQDRDVYLQGPIWAKIPHTDGHFHPSPLMGGFGLKHPPPQILIKNTPVPANPSTTFSAAKFASFITQYSTGQVSVEIEWELQKENSKRWNPEIQYTSNYNKSVNVDFTVDTNGVYSEPRPIGTRYLTRNL

SEQ ID NO: 2847 - protein, 735 aa, synthetic construct
  REGION 1..735: note = source = /note="Description of Artificial Sequence: Synthetic polypeptide"
MAADGYLPDWLEDTLSEGIRQWWKLKPGPPPPRPAERHQDDSRGLVLPGYKYLGPFNGLDKGEPVNEADAAALEHDKAYDRQLDSGDNPYLKYNHADAEFQERLKEDTSFGGNLGRAVFQAKKRVLEPLGLVEEPVKTAPGKKRPVEHSPAEPDSSSGTGKAGQQPARKRLNFGQTGDADSVPDPQPLGQPPAAPTSLGSTTMATGSGAPMADNNEGADGVGNSSGNWHCDSQWLGDRVITTSTRTWALPTYNNHLYKQISSQSGASNDNHYFGYSTPWGYFDFNRFHCHFSPRDWQRLINNNWGFRPKRLNFKLFNIQVKEVTQNDGTTTIANNLTSTVQVFTDSEYQLPYVLGSAHQGCLPPFPADVFMVPQYGYLTLNNGSQAVGRSSFYCLEYFPSQMLRTGNNFTFSYTFEDVSFHSSYAHSQSLDRLMNPLIDQYLYYLNRTQSNSGTLQQSRLLFSQAGPTSMSLQAKNWLPGPCYRQQRLSKQANDNNNSNFPWTAATKYHLNGRDSLVNPGPAMASHKDDEEKFFPMHGTLIFGKQGTNANDADLEHVMITDEEEIRTTNPVATEQYGNVSNNLQNSNTGPTTENVNHQGALPGMVWQDRDVYLQGPIWAKIPHTDGHFHPSPLMGGFGLKHPPPQIMIKNTPVPANPPTNFSAAKFASFITQYSTGQVSVEIEWELQKENSKRWNPEIQYTSNYNKSVNVDFTVDANGVYSEPRPIGTRYLTRNL

SEQ ID NO: 2848 - protein, 735 aa, synthetic construct
  REGION 1..735: note = source = /note="Description of Artificial Sequence: Synthetic polypeptide"
MAADGYLPDWLEDTLSEGIRQWWKLKPGPPPPRPAERHQDDSRGLVLPGYKYLGPFNGLDKGEPVNEADAAALEHDKAYDRQLDSGDNPYLKYNHADAEFQERLKEDTSFGGNLGRAVFQAKKRVLEPLGLVEEPVKTAPGKKRPVEHSPAEPDSSSGTGKAGQQPARKRLNFGQTGDADSVPDPQPLGQPPAAPTSLGSTTMATGSGAPMADNNEGADGVGNSSGNWHCDSQWLGDRVITTSTRTWALPTYNNHLYKQISSQSGASNDNHYFGYSTPWGYFDFNRFHCHFSPRDWQRLINNNWGFRPKRLNFKLFNIQVKEVTQNDGTTTIANNLTSTVQVFTDSEYQLPYVLGSAHQGCLPPFPADVFMVPQYGYLTLNNGSQAVGRSSFYCLEYFPSQMLRTGNNFTFSYTFEDVPFHSSYAHSQSLDRLMNPLIDQYLYYLNRTQSNSGTLQQSRLLFSQAGPTSMSLQAKNWLPGPCYRQQRLSKQANDNNNSNFPWTAATKYHLNGRDSLVNPGPAMASHKDDEEKFFPMHGTLIFGKQGTNANDADLEHVMITDEEEIRTTNPVATEQYGNVSNNLQNSNTGPTTENVNHQGALLGMVWQDRDVYLQGPIWAKIPHTDGHFHPSPLMGGFGLKHPPPQIMIKNTPVPANPPTNFSAAKFASFITQYSTGQVSVEIEWELQKENSKRWNPEIQYTSNYNKSVNVDFTVDANGVYSEPRPIGTRYLTRNL

SEQ ID NO: 2849 - protein, 735 aa, synthetic construct
  REGION 1..735: note = source = /note="Description of Artificial Sequence: Synthetic polypeptide"
MAADGYLPDWLEDTLSEGIRQWWKLKPGPPPPRPAERHQDDSRGLVLPGYKYLGPFNGLDKGEPVNEADAAALEHDKAYDRQLDSGDNPYLKYNHADAEFQERLKEDTSFGGNLGRAVFQAKKRVLEPLGLVEEPVKTAPGKKRPVEHSPAEPDSSSGTGKAGQQPARKRLNFGQTGDADSVPDPQPLGQPPAAPTSLGSTTMATGSGAPMADNNEGADGVGNSSGNWHCDSQWLGDRVITTSTRTWALPTYNNHLYKQISSQSGASNDNHYFGYSTPWGYFDFNRFHCHFSPRDWQRLINNNWGFRPKRLNFKLFNIQVKEVTQNDGTATIANNLTSTVQVFTDSEYQLPYVLGSAHQGCLPPFPADVFMVPQYGYLTLNNGSQAVGRSSFYCLEYFPSQMLRTGNNFTFSYTFEDVPFHSSYAHSQSLDRLMNPLIDQYLYYLNRTQSNSGTLQQSRLLFSQAGPTSMSLQAKNWLPGPCYRQQRLSKQANDNNNSNFPWTAATKYHLNGRDSLVNPGPAMASHKDDEEKFFPMHGTLIFGKQGTNANDADLEHVMITDEEEIRTTNPVATEQYGNVSNNLQNSNTGPTTENVNHQGALPGMVWQDRDVYLQGPIWAKIPHTDGHFHPSPLMGGFGLKHPPPQIMIKNTPVPANPPTNFSAAKFASFITQYSTGQVSVEIEWELQKENSKRWNPEIQYTSNYNKSVNVDFTVDANGVYSEPRPIGTRYLTRNL

SEQ ID NO: 2850 - protein, 735 aa, synthetic construct
  REGION 1..735: note = source = /note="Description of Artificial Sequence: Synthetic polypeptide"
MAADGYLPDWLEDTLSEGIRQWWKLKPGPPPPKPAERHKDDSRGLVLPGYKYLGPFNGLDKGEPVNEADAAALEHDKAYDRQLDSGDNPYLKYNHADAEFQERLKEDTSFGGNLGRAVFQAKKRVLEPLGLVEEPVKTAPGKKRPVEHSPVEPDSSSGTGKAGQQPARKRLNFGQTGDADSVPDPQPLGQPPAAPTSLGSTTMATGSGAPMADNNEGADGVGNSSGNWHCDSQWLGDRVITTSTRTWALPTYNNHLYKQISSQSGASNDNHYFGYSTPWGYFDFNRFHCHFSPRDWQRLINNNWGFRPKRLNFKLFNIQVKEVTQNDGTTTIANNLTSTVQVFTDSEYQLPYVLGSAHQGCLPPFPADVFMVPQYGYLTLNNGSQAVGRSSFYCLEYFPSQMLRTGNNFTFSYTFEDVPFHSSYAHSQSLDRLMNPLIDQYLYYLNKTQSNSGTLQQSRLLFSQAGPTSMSLQAKNWLPGPCYRQQRLSKQANDNNNSNFPWTAATKYHLNGRDSLVNPGPAMASHKDDEEKFFPMHGTLIFGKQGTNANDADLDNVMITDEEEIRTTNPVATEQYGTVSNNLQNSNTGPTTGTVNHQGALPGMVWQDRDVYLQGPIWAKIPHTDGHFHPSPLMGGFGLKHPPPQIMIKNTPVPANPPTNFSSAKFASFITQYSTGQVSVEIEWELQKENSKRWNPEIQYTSNYNKSVNVDFTVDTNGVYSEPRPIGTRYLTRNL

SEQ ID NO: 2851 - protein, 735 aa, synthetic construct
  REGION 1..735: note = source = /note="Description of Artificial Sequence: Synthetic polypeptide"
MAADGYLPDWLEDTLSEGIRQWWKLKPGPPPPKPAERHKDDSRGLVLPGYKYLGPFNGLDKGEPVNEADAAALEHDKAYDRQLDSGDNPYLKYNHADAEFQERLKEDTSFGGNLGRAVFQAKKRVLEPLGLVEEPVKTAPGKKRPVEHSPVEPDSSSGTGKAGQQPARKRLNFGQTGDADSVPDPQPLGQPPAAPTSLGSTTMATGSGAPMADNNEGADGVGNSSGNWHCDSQWLGDRVITTSTRTWALPTYNNHLYKQISSQSGASNDNHYFGYSTPWGYFDFNRFHCHFSPRDWQRLINNNWGFRPKRLNFKLFNIQVKEVTQNDGTTTIANNLTSTVQVFTDSEYQLPYVLGSAHQGCLPPFPADVFMVPQYGYLTLNNGSQAVGRSSFYCLEYFPSQMLRTGNNFTLSYTFEDVPFHSSYAHSQSLDRLMNPLIDQYLYYLNKTQSNSGTLQQSRLLFSQAGPTSMSLQAKNWLPGPCYRQQRLSKQANDNNNSNFPWTAATKYHLNGRDSLVNPGPAMASHKDDEEKFFPMHGTLIFGKQGTNANDADLDNVMITDEEEIRTTNPVATEQYGTVSNNLQNSNTGPTTGTVNHQGALPGMVWQDRDVYLQGPIWAKIPHTDGHFHPSPLMGGFGLKHPPPQIMIKNTPVPANPPTNFSSAKFASFITQYSTGQVSVEIEWELQKENSKRWNPEIQYTSNYNKSVNVDFTVDTNGVYSEPRPIGTRYLTRNL

SEQ ID NO: 2852 - protein, 735 aa, synthetic construct
  REGION 1..735: note = source = /note="Description of Artificial Sequence: Synthetic polypeptide"
MAADGYLPDWLEDTLSEGIRQWWKLKPGPPPPKPAERHKDDSRGLVLPGYKYLGPFNGLDKGEPVNEADAAALEHDKAYDRQLDSGDNPYLKYNHADAEFQERLKEDTSFGGNLGRAVFQAKRRVLEPLGLVEEPVKTAPGKKRPVEHSPVEPDSSSGTGKAGQQPARKRLNFGQTGDADSVPDPQPLGQPPAAPTSLGSTTMATGSGAPMADNNEGADGVGNSSGNWHCDSQWLGDRVITTSTRTWALPTYNNHLYKQISSQSGASNDNHYFGYSTPWGYFDFNRFHCHFSPRDWQRLINNNWGFRPKRLNFKLFNIQVKEVTQNDGTTTIANNLTSTVQVFTDSEYQLPYVLGSAHQGCLPPFPADVFMVPQYGYLTLNNGSQAVGRSSFYCLEYFPSQMLRTGNNFTFSYTFEDVPFHSSYAHSQSLDRLMNPLIDQYLYYLNKTQSNSGTLQQSRLLFSQAGPTSMSLQAKNWLPGPCYRQQRLSKQANDNNNSNFPWTAATKYHLNGRDSLVNPGPAMASHKDDEEKFFPMHGTLIFGKQGTNANDADLDNVMITDEEEIRTTNPVATEQYGTVSNNLQNSNTGPTTGTVNHQGALPGMVWQDRDVYLQGPIWAKIPHTDGHFHPSPLMGGFGLKHPPPQIMIKNTPVPANPPTNFSSAKFASFITQYSTGQVSVEIEWELQKENSKRWNPEIQYTSNYNKSVNVDFTVDTNGVYSEPRPIGTRYLTRNL

SEQ ID NO: 2853 - protein, 735 aa, synthetic construct
  REGION 1..735: note = source = /note="Description of Artificial Sequence: Synthetic polypeptide"
MAADGYLPDWLEDTLSEGIRQWWKLKPGPPPPKPAERHKDDSRGLVLPGYKYLGPFNGLDKGEPVNEADAAALEHDKAYDRQLDSGDNPYLKYNHADAEFQERLKEDTSFGGNLGRAVFQAKKRVLEPLGLVEEPVKTAPGKKRPVEHSPVEPDSSSGTGKAGQQPARKRLNFGQTGDADSVPDPQPLGQPPAAPTSLGSTTMATGSGAPMADNNEGADGVGNSSGNWHCDSQWLGGRVITTSTRTWALPTYNNHLYKQISSQSGASNDNHYFGYSTPWGYFDFNRFHCHFSPRDWQRLINNNWGFRPKRLNFKLFNIQVKEVTQNDGTTTIANNLTSTVQVFTDSEYQLPYVLGSAHQGCLPPFPADVFMVPQYGYLTLNNGSQAVGRSSFYCLEYFPSQMLRTGNNFTFSYTFEDVPFHSSYAHSQSLDRLMNPLIDQYLYYLNKTQSNSGTLQQSRLLFSQAGPTSMSLQAKNWLPGPCYRQQRLSKQANDNNNSNFPWTAATKYHLNGRDSLVNPGPAMASHKDDEEKFFPMHGTLIFGKQGTNANDADLDNVMITDEEEIRTTNPVATEQYGTVSNNLQNSNTGPTTGTVNHQGALPGMVWQDRDVYLQGPIWAKIPHTDGHFHPSPLMGGFGLKHPPPQIMIKNTPVPANPPTNFSSAKFASFITQYSTGQVSVEIEWELQKENSKRWNPEIQYTSNYNKSVNVDFTVDTNGVYSEPRPIGTRYLTRNL

SEQ ID NO: 2854 - protein, 734 aa, synthetic construct
  REGION 1..734: note = source = /note="Description of Artificial Sequence: Synthetic polypeptide"
MAADGYLPDWLEDTLSEGIRQWWKLKPGPPPPKPAERHKDDSRGLVLPGYKYLGPFNGLDKGEPVNEADAAALEHDKAYDRQLDSGDNPYLKYNHADAEFQERLKEDTSFGGNLGRAVFQAKKRVLEPLGLVEEPVKTAPGKKRPVEHSPVEPDSSSGTGKAGQQPARKRLNFGQTGDADSVPDPQPLGQPPAAPTSLGSTTMATGSGAPMADNNEGADGVGNSSGNWHCDSQWLGDRVITTSTRTWALPTYNNHLYKQISSQSGASNDNHYFGYSTPWGYFDFNRFHCHFSPRDWQRLINNNWGFRPKRLNFKLFNIQVKEVTQNDGTTTIANNLTSTVQVFTDSEYQLPYVLGSAHQGCLPPFPADVFMVPQYGYLTLNNGSQAVGRSSFYCLEYFPSQMLRTGNNFTFSYTFEDVPFHSSYAHSQSLDRLMNPLIDQYLYYLNKTQSNSGTLQQSRLLFSQAGPTSMSLQAKNWLPGPCYRQQRLSKQANDNNSNFPWTAATKYHLNGRDSLVNPGPAMASHKDDEEKFFPMHGTLIFGKQGTNANDADLDNVMITDEEEIRTTNPVATEQYGTVSNNLQNSNTGPTTGTVNHQGALPGMVWQDRDVYLQGPIWAKIPHTDGHFHPSPLMGGFGLKHPPPQIMIKNTPVPANPPTNFSSAKFASFITQYSTGQVSVEIEWELQKENSKRWNPEIQYTSNYNKSVNVDFTVDTNGVYSEPRPIGTRYLTRNL

SEQ ID NO: 2855 - protein, 735 aa, synthetic construct
  REGION 1..735: note = source = /note="Description of Artificial Sequence: Synthetic polypeptide"
MAADGYLPDWLEDTLSEGIRQWWKLKPGPPPPKPAERHKDDSRGLVLPGYKYLGPFNGLDKGEPVNEADAAALEHDKAYDRQLDSGDNPYLKYNHADAEFQERLKEDTSFGGNLGRAVFQAKKRVLEPLGLVEEPVKTAPGKKRPVEHSPVEPDSSSGTGKAGQQPARKRLNFGQTGDADSVPDPQPLGQPPAAPTSLGSTTMATGSGAPMADNNEGADGVGNSSGNWHCDSQWLGDRVITTSTRTWALPTYNNHLYKQISSQSGASNDNHYFGYSTPWGYFDFNRFHCHFSPRDWQRLINNNWGFRPKRLNFKLFNIQVKEVTQNDGTTTIANNLTSTVQVFTDSEYQLPYVLGSAHQGCLPPFPADVFMVPQYGYLTLNNGSQAVGRSSFYCLEYFPSQMLRTGNNFTFSYTFEDVPFHSSYAHSQSLDRLMNPLIDQYLYYLNKTQSNSGTLQQPRLLFSQAGPTSMSLQAKNWLPGPCYRQQRLSKQANDNNNSNFPWTAATKYHLNGRDSLVNPGPAMASHKDDEEKFFPMHGTLIFGKQGTNANDADLDNVMITDEEEIRTTNPVATEQYGTVSNNLQNSNTGPTTGTVNHQGALPGMVWQDRDVYLQGPIWAKIPHTDGHFHPSPLMGGFGLKHPPPQIMIKNTPVPANPPTNFSSAKFASFITQYSTGQVSVEIEWELQKENSKRWNPEIQYTSNYNKSVNVDFTVDTNGVYSEPRPIGTRYLTRNL

SEQ ID NO: 2856 - protein, 735 aa, synthetic construct
  REGION 1..735: note = source = /note="Description of Artificial Sequence: Synthetic polypeptide"
MAADGYLPDWLEDTLSEGIRQWWKLKPGPPPPKPAERHKDDSRGLVLPGYKYLGPFNGLDKGEPVNEADAAALEHDKAYDRQLDSGDNPYLKYNHADAEFQERLKEDTSFGGNLGRAVFQAKKRVLEPLGLVEEPVKTAPGKKRPVEHSPVEPDSSSGTGKAGQQPARKRLNFGQTGDADSVPDPQPLGQPPAAPTSLGSTTMATGSGAPMADNNEGADGVGNSSGNWHCDSQWLGDRVITTSTRTWALPTYNNHLYKQISSQSGASNDNHYFGYSTPWGYFDFNRFHCHFSPRDWQRLINNNWGFRPKRLNFKLFNIQVKEVTQNDGTTTIANNLTSTVQVFTDSEYQLPYVLGSAHQGCLPPFPADVFMVPQYGYLTLNNGSQAVGRSSFYCLEYFPSQMLRTGNNFTFSCTFEDVPFHSSYAHSQSLDRLMNPLIDQYLYYLNKTQSNSGTLQQSRLLFSQAGPTSMSLQAKNWLPGPCYRQQRLSKQANDNNNSNFPWTAATKYHLNGRDSLVNPGPAMASHKDDEEKFFPMHGTLIFGKQGTNANDADLDNVMITDEEEIRTTNPVATEQYGTVSNNLQNSNTGPTTGTVNHQGALPGMVWQDRDVYLQGPIWAKIPHTDGHFHPSPLMGGFGLKHPPPQIMIKNTPVPANPPTNFSSAKFASFITQYSTGQVSVEIEWELQKENSKRWNPEIQYTSNYNKSVNVDFTVDTNGVYSEPRPIGTRYLTRNL

SEQ ID NO: 2857 - protein, 735 aa, synthetic construct
  REGION 1..735: note = source = /note="Description of Artificial Sequence: Synthetic polypeptide"
MAADGYLPDWLEDTLSEGIRQWWKLKPGPPPPKPAERHKDDSRGLVLPGYKYLGPFNGLDKGEPVNEADAAALEHDKAYDRQLDSGDNPYLKYNHADAEFQERLKEDTSFGGNLGRAVFQAKKRVLEPLGLVEEPVKTAPGKKRPVEHSPVEPDSSSGTGKAGQQPARKRLNFGQTGDADSVPDPQPLGQPPAAPTSLGSTTMATGSGAPMADNNEGADGVGNSSGNWHCDSQWLGDRVITTSTRTWALPTYNNHLYKQISSQSGASNDNHYFGYSTPWGYFDFNRFHCHFSPRDWQRLIDNNWGFRPKRLNFKLFNIQVKEVTQNDGTTTIANNLTSTVQVFTDSEYQLPYVLGSAHQGCLPPFSADVFMVPQYGYLTLNNGSQAVGRSSFYCLEYFPSQMLRTGNNFTFSYTFEDVPFHSSYAHSQSLDRLMNPLIDQYLYYLNKTQSNSGTLQQSRLLFSQAGPTSMSLQAKNWLPGPCYRQQRLSKQANDNNNSNFPWTAATKYHLNGRDSLVNPGPAMASHKDDEEKFFPMHGTLIFGKQGTNANDADLDNVMITDEEEIRTTNPVATEQYGTVSNNLQNSNTGPTTGTVNHQGALPGMVWQDRDVYLQGPIWAKIPHTDGHFHPSPLMGGFGLKHPPPQIMIKNTPVPANPPANFSSAKFASFITQYSTGQVSVEIEWELQKENSKRWNPEIQYTSNYNKSVNVDFTVDTNGVYSEPRPIGTRYLTRNL

SEQ ID NO: 2858 - protein, 744 aa, synthetic construct
  REGION 1..744: note = source = /note="Description of Artificial Sequence: Synthetic polypeptide"
MITTLDKSGMAADGYLPDWLEDTLSEGIRQWWKLKPGPPPPKPAERHKDDSRGLVLPGYKYLGPFNGLDKGEPVNEADAAALEHDKAYDRQLDSGDNPYLKYNHADAEFQERLKEDTSFGGNLGRAVFQAKKRVLEPLGLVEEPVKTAPGKKRPVEHSPVEPDSSSGTGKAGQQPARKRLNFGQTGDADSVPDPQPLGQPPAAPTSLGSTTMATGSGAPMADNNEGADGVGNSSGNWHCDSQWLGDRVITTSTRTWALPTYNNHLYKQISSQSGASNDNHYFGYSTPWGYFDFNRFHCHFSPRDWQRLINNNWGFRPKRLNFKLFNIQVKEVTQNDGTTTIANNLTGTVQVFTDSEYQLPYVLGSAHQGCLPPFPADVFMVPQYGYLTLNNGSQAVGRSSFYCLEYFPSQMLRTGNNFTFSYTFEDVPFHSSYAHSQSLDRLMNPLIDQYLYYLNKTQSNSGTLQQSRLLFSQAGPTSMSLQAKNWLPGPCYRQQRLSKQANDNNNSNFPWTAATKYHLNGRDSLVNPGPAMASHKDDEEKFFPMHGTLIFGKQGTNANDADLDNVMITDEEEIRTTNPVATEQYGTVSNNLQNSNTGPTTGTVNHQGALPGMVWQDRDVYLQGPIWAKIPHTDGHFHPSPLMGGFGLKHPPPQIMIKNTPVPANPPTNFSSAKFASFITQYSTGQVSVEIEWELQKENSKRWNPEIQYTSNYNKSVNVDFTVDTNGVYSEPRPIGTRYLTRNL

SEQ ID NO: 2859 - protein, 744 aa, synthetic construct
  REGION 1..744: note = source = /note="Description of Artificial Sequence: Synthetic polypeptide"
MITTLDKSGMAADGYLPDWLEDTLSEGIRQWWKLKPGPPPPKPAERHKDDSRGLVLPGYKYLGPFNGLDKGEPVNEADAAALEHDKAYDRQLDSGDNPYLKYNHADAEFQERLKEDTSFGGNLGRAVFQAKKRVLEPLGLVEEPVKTAPGKKRPVEHSPVEPDSSSGTGKAGQQPARKRLNFGQTGDADSVPDPQPLGQPPAAPTSLGSTTMATGSGAPMADNNEGADGVGNSSGNWHCDSQWLGDRVITTSTRTWALPTYNNHLYKQISSQSGASNDNHYFGYSTPWGYFDFNRFHCHFSPRDWQRLINNNWGFRPKRLNFKLFNIQVKEVTQNDGTTTIANNLTSTVQVFTDSEYQLPYVLGSAHQGCLPPFPADVFMVPQYGYLTLNNGSQAVGRSSFYCLEYFPSQMLRTGNNFTFSYTFEDVPFHSSYAHSQSLDRLMNPLIDQYLYYLNKTQSNSGTLQQSRLLFSQAGPTSMSLQAKNWLPGPCYRQQRLSKQANDNNNSNFPWTAATKYHLNGRDSLVNPGPAMASHKDDEEKFFPMHGTLIFGKQGTNANDADLDNVMITDEEEIRTTNPVATEQYGTVSNNLQNSNTGPTTGTVNHQGALPGMVWQDRDVYLQGPIWAKIPHTDGHFHPSPLMGGFGLKHPPPQIMIKNTPVPANPPTNFSSAKFASFITQYSTGQVSVEIEWELQKENSKRWNPEIQYTSNYNKSVNVDFSVDTNGVYSEPRPIGTRYLTRNL

SEQ ID NO: 2860 - protein, 735 aa, synthetic construct
  REGION 1..735: note = source = /note="Description of Artificial Sequence: Synthetic polypeptide"
MAADGYLPDWLEDTLSEGIRQWWKLKPGPPPPKPAERHKDDSRGLVLPGYKYLGPFNGLDKGEPVNEADAAALEHDKAYDRQLDSGDNPYLKYNHADAEFQERLKEDTSFGGNLGRAVFQAKKRVLEPLGLAEEPVKTAPGKKRPVEHSPVEPDSSSGTGKAGQQPARKRLNFGQTGDADSVPDPQPLGQPPAAPTSLGSTTMATGSGAPMADNNEGADGVGNSSGNWHCDSQWLGDRVITTSTRTWALPTYNNHLYKQISSQSGASNDNHYFGYSTPWGYFDFNRFHCHFSPRDWQRLINNNWGFRPKRLNFKLFNIQVKEVTQNDGTTTIANNLTSTVQVFTDSEYQLPYVLGSAHQGCLPPFPADVFMVPQYGYLTLNNGSQAVGRSSFYCLEYFPSQMLRTGNNFTFSYTFEDVPFHSSYAHSQSLDRLMNPLIDQYLYYLNKTQSNSGTLQQSRLLFSQAGPTSMSLQAKNWLPGPCYRQQRLSKQANDNNNSNFPWTAATKYHLNGRDSLVNPGPAMASHKDDEEKFFPMHGTLIFGKQGTNANDADLDNVMITDEEEIRTTNPVATEQYGTVSNNLQNSNTGPTTGTVNHQGALPGMVWQDRDVYLQGPIWAKIPHTDGHFHPSPLMGGFGLKHPPPQIMIKNTPVPANPPTNFSSAKFASFITQYSTGQVSVEIEWELQKENSKRWNPEIQYTSNYNKSVNVDFTVDTNGVYSEPRPIGTRYLTRNL

SEQ ID NO: 2861 - protein, 735 aa, synthetic construct
  REGION 1..735: note = source = /note="Description of Artificial Sequence: Synthetic polypeptide"
MAADGYLPDWLEDTLSEGIRQWWKLKPGPPPPKPAERHKDDSRGLVLPGYKYLGPFNGLDKGEPVNEADAAALEHDKAYDRQLDSGDNPYLKYNHADAEFQERLKEDTSFGGNLGRAVFQAKKRVLEPLGLVEEPVKTAPGKKRPVEHSPVEPDSSSGTGKAGQQPARKRLNFGQTGDADSVPDPQPLGQPPAAPTSLGSTTMATGSGAPMADNNEGADGVGNSSGNWHCDSQWLGDRVITTSTRTWALPTYNNHLYKQISSQSGASNDNHYFGYSTPWGYFDFNRFHCHFSPRDWQRLINNNWGFRPKRLNFKLFNIQVKEVTQNDGTTTIANNLTSTVQVFTDSEYQLPYVLGSAHQGCLPPFPADVFMVPQYGYLTLNNGSQAVGRSSFYCLEYFPSQMLRTGNNFTFSYTFEDVPFHSSYAHSQSLDRLMNPLIDQYLYYLNKTQSNSGTLQQSRLLFSQAGPTSMSLQAKNWLPGPCYRQQRLSKQANDNNNSNFPWAAATKYHLNGRDSLVNPGPAMASHKDDEEKFFPMHGTLIFGKQGTNANDADLDNVMITDEEEIRTTNPVATEQYGTVSNNLQNSNTGPTTGTVNHQGALPGMVWQDRDVYLQGPIWAKIPHTDGHFHPSPLMGGFGLKHPPPQIMIKNTPVPANPPTNFSSAKFASFITQYSTGQVSVEIEWELQKENSKRWNPEIQYTSNYNKSVNVDFTVDTNGVYSEPRPIGTRYLTRNL

SEQ ID NO: 2862 - protein, 734 aa, synthetic construct
  REGION 1..734: note = source = /note="Description of Artificial Sequence: Synthetic polypeptide"
MAADGYLPDWLEDTLSEGIRQWWKLKPGPPPPKPAERHKDDSRGLVLPGYKYLGPFNGLDKGEPVNEADAAALEHDKAYDRQLDSGDNPYLKYNHADAEFQERLKEDTSFGGNLGRAVFQAKKRVLEPLGLVEEPVKTAPGKKRPVEHSPVEPDSSSGTGKAGQQPARKRLNFGQTGDADSVPDPQPLGQPPAAPTSLGSTTMATGSGAPMADNNEGADGVGNSSGNWHCDSQWLGDRVITTSTRTWALPTYNNHLYKQISSQSGASNDNHYFGYSTPWGYFDFNRFHCHFSPRDWQRLINNNWGFRPKRLNFKLFNIQVKEVTQNDGTTTIANNLTSTVQVFTDSEYQLPYVLGSAHQGCLPPFPADVFMVPQYGYLTLNNGSQAVGRSSFYCLEYFPSQMLRTGNNFTFSCTFEDVPFHSSYAHSQSLDRLMNPLIDQYLYYLNKTQSNSGTLQQSRLLFSQAGPTSMSLQAKNWLPGPCYRQQRLSKQANDNNSNFPWTAATKYHLNGRDSLVNPGPAMASHKDDEEKFFPMHGTLIFGKQGTNANDADLDNVMITDEEEIRTTNPVATEQYGTVSNNLQNSNTGPTTGTVNHQGALPGMVWQDRDVYLQGPIWAKIPHTDGHFHPSPLMGGFGLKHPPPQIMIKNTPVPANPPTNFSSAKFASFITQYSTGQVSVEIEWELQKENSKRWNPEIQYTSNYNKSVNVDFTVDTNGVYSEPRPIGTRYLTRNL

SEQ ID NO: 2863 - protein, 735 aa, synthetic construct
  REGION 1..735: note = source = /note="Description of Artificial Sequence: Synthetic polypeptide"
MAADGYLPDWLEDTLSEGIRQWWKLKPGPPPPKPAERHKDDSRGLVLPGYKYLGPFNGLDKGEPVNEADAAALEHDKAYDRQLDSGDNPYLKYNHADAEFQERLKEDTSFGGNLGRAVFQAKKRVLEPLGLVEEPVKTAPGKKRPVEHSPVEPDSSSGTGKAGQQPARKRLNFGQTGDADSVPDPQPLGQPPAAPTSLGSTTMATGSGAPMADNNEGADGVGNSSGNWHCDSQWLGDRVITTSTRTWALPTYNNHLYKQISSQSGASNDNHYFGYSTPWGYFDFNRFHCHFSPRDWQRLINNNWGFRPKRLNFKLFNIQVKEVTQNDGTTTIANNLTSTVQVFTDSEYQLPYVLGSAHQGCLPPFPADVFMVPQYGYLTLNNGSQAVGRSSFYCLEYFPSQMLRTGNNFTFSCTFEDVPFHSSYAHSQSLDRLMNPLIDQYLYYLNKTQSNSGTLQQSRLLFSQAGPTSMSLQAKNWLPGPCYRQQRLSKQANDNNNSNFPWTAATKYHLNGRDSLVNPGPAMASHKDDEEKFFPMHGTLIFGKQGTNANDADLDNVMITDEEEIRTTNPVATEQYGTVSNNLQNSNTGPTTGTVNHQGALPGMVWQDRDVYLQGPIWAKIPHTDGHFHPSPLMGGFGLKHPPPQIMIKNTPVPANPPTNFSSAKFASFITQYSTGQVSVEIEWELQKENSKRWNPEIQYTSNYNKSVNVDFSVDTNGVYSEPRPIGTRYLTRNL

SEQ ID NO: 2864 - protein, 735 aa, synthetic construct
  REGION 1..735: note = source = /note="Description of Artificial Sequence: Synthetic polypeptide"
MAADGYLPDWLEDTLSEGIRQWWKLKPGPPPPKPAERHKDDSRGLVLPGYKYLGPFNGLDKGEPVNEADAAALEHDKAYDRQLDSGDNPYLKYNHADAEFQERLKEDTSFGGNLGRAVFQAKKRVLEPLGLVEEPVKTAPGKKRPVEHSPVEPDSSSGTGKAGQQPARKRLNFGQTGDADSVPDPQPLGQPPAAPTSLGSTTMATGSGAPMADNNEGADGVGNSSGNWHCDSQWLGDRVITTSTRTWALPTYNNHLYKQISSQSGASNDNHYFGYSTPWGYFDFNRFHCHFSPRDWQRLINNNWGFRPKRLNFKLFNIQVKEVTQNDGTTTIANNLTSTVQVFTDSEYQLPYVPGSAHQGCLPPFPADVFMVPQYGYLTLNNGSQAVGRSSFYCLEYFPSQMLRTGNNFTFSCTFEDVPFHSSYAHSQSLDRLMNPLIDQYLYYLNKTQSNSGTLQQPRLLFSQAGPTSMSLQAKNWLPGPCYRQQRLSKQANDNNNSNFPWTAATKYHLNGRDSLVNPGPAMASHKDDEEKFFPMHGTLIFGKQGTNANDADLDNVMITDEEEIRTTNPVATEQYGTVSNNLQNSNTGPTTGTVNHQGALPGMVWQDRDVYLQGPIWAKIPHTDGHFHPSPLMGGFGLKHPPPQIMIKNTPVPANPPTNFSSAKFASFITQYSTGQVSVEIEWELQKENSKRWNPEIQYTSNYNKSVNVDFTVDTNGVYSEPRPIGTRYLTRNL

SEQ ID NO: 2865 - protein, 735 aa, synthetic construct; identical to SEQ ID NO: 2794
  REGION 1..735: note = source = /note="Description of Artificial Sequence: Synthetic polypeptide"

SEQ ID NO: 2866 - protein, 735 aa, synthetic construct
  REGION 1..735: note = source = /note="Description of Artificial Sequence: Synthetic polypeptide"
MAADGYLPDWLEDTLSEGIRQWWKLKPGPPPPRPAERHQDDSRGLVLPGYKYLGPFNGLDKGEPVNEADAAALEHDKAYDRQLDSGDNPYLKYNHADAEFQERLKEDTSFGGNLGRAVFQAKKRVLEPLGLVEEPVKTAPGKKRPVEHSPAEPDSSSGTGKAGQQPARKRLNFGQTGDADSVPDPQPLGQPPAAPTSLGSTTMATGSGAPMADNNEGADGVGNSSGNWHCDSQWLGDRVITTSTRTWALPTYNNHLYKQISSQSGASNDNHYFGYSTPWGYFDFNRFHCHFSPRDWQRLINNNWGFRPKRLNFKLFNIQVKEVTQNDGTTTIANNLTSTVQVFTDSEYQLPYVLGSAHQGCLPPFPADVFMVPQYGYLTLNNGSQAVGRSSFYCLEYFPSQMLRTGNNFTFSYTFEDVPFHSSYAHSQSLDRLMNPLIDQYLYYLNRTQSNSGTLQQSRLLFSQAGPTSMSLQAKNWLPGPCYRQQRLSKQANDNNNSNFPWTAATKYHLNGRDSLVNPGPAMASHKDDEEKFFPMHGTLIFGKQGTNANDADLEHVMITGEEEIRTTNPVATEQYGNVSNNLQNSNTGPTTENVNHQGALPGMVWQDRDVYLQGPIWAKIPHTDGHFHPSPLMGGFGLKHPPPQIMIKNTPVPANPPTNFSAAKFASFITQYSTGQVSVEIEWELQKENSKRWNPEIQYTSNYNKSVNVDFTVDANGVYSEPRPIGTRYLTRNL

SEQ ID NO: 2867 - protein, 735 aa, synthetic construct
  REGION 1..735: note = source = /note="Description of Artificial Sequence: Synthetic polypeptide"
MAADGYLPDWLEDTLSEGIRQWWKLKPGPPPPRPAERHQDDSRGLVLPGYKYLGPFNGLDKGEPVNEADAAALEHDKAYDRQLDSGDNPYLKYNHADAEFQERLKEDTSFGGNLGRAVFQAKKRVLEPLGLVEEPVKTAPGKKRPVEHSPAEPDSSSGTGKAGQQPARKRLNFGQTGDADSVPDPQPLGQPPAAPTSLGSTTMATGSGAPMADNNEGADGVGNSSGNWHCDSQWLGDRVITTSTRTWALPTYNNHLYKQISSQSGASNDNHYFGYSTPLGYFDFNRFHCHFSPRDWQRLINNNWGFRPKRLNFKLFNIQVKEVTQNDGTTTIANNLTSTVQVFTDSEYQLPYVLGSAHQGCLPPFPADVFMVPQYGYLTLNNGSQAVGRSSFYCLEYFPSQMLRTGNNFTFSYTFEDVPFHSSYAHSQSLDRLMNPLIDQYLYYLNRTQSNSGTLQQSRLLFSQAGPTSMSLQAKNWLPGPCYRQQRLSKQANDNNNSNFPWTAATKYHLNGRDSLVNPGPAMASHKDDEEKFFPMHGTLIFGKQGTNANDTDLEHVMITDEEEIRTTNPVATEQYGNVSNNLQNSNTGPTTENVNHQGALPGMVWQDRDVYLQGPIWAKIPHTDGHFHPSPLMGGFGLKHPPPQIMIKNTPVPANPPTNFSAAKFASFITQYSTGQVSVEIEWELQKENSKRWNPEIQYTSNYNKSVNVDFTVDANGVYSEPRPIGTRYLTRNL

SEQ ID NO: 2868 - protein, 735 aa, synthetic construct
  REGION 1..735: note = source = /note="Description of Artificial Sequence: Synthetic polypeptide"
MAADGYLPDWLEDTLSEGIRQWWKLKPGPPPPRPAERHQDDSRGLVLPGYKYLGPFNGLDKGEPVNEADAAALEHDKAYDRQLDSGDNPYLKYNHADAEFQERLKEDTSFGGNLGRAVFQAKKRVLEPLGLVEEPVKTAPGKKRPVEHSPAEPDSSSGTGKAGQQPARKRLNFGQTGDADSVPDPQPLGQPPAAPTSLGSTTMATGSGAPMADNNEGADGVGNSSGNWHCDSQWLGDRVITTSTRTWALPTYNNHLYKQISSQSGASNDNHYFGYSTPWGYFDFNRFHCHFSPRDWQRLINNNWGFRPKRLNFKLFNIQVKEVTQNDGTTTIANNLTSTVQVFTDSEYQLPYVLGSAHQGCLPPFPADVFMVPQYGYLTLNNGSQAVGRSSFYCLEYFPSQMLRTGNNFTFSYTFEDVPFHSSYAHSQSLDRLMNPLIDQYLYYLNRTQSNSGTLQQSRLLFSQAGPTSMSLQAKNWLPGPCYRQQRLSKQANDNNNSNFPWTAATKYHLNGRDSLVNPGPAMASHKDDEEKFFPMHGTLIFGKQGTNANDADLERVMITDEEEIRTTNPVATEQYGNVSNNLQNSNTGPTTENVNHQGALPGMVWQDRDVYLQGPIWAKIPHADGHFHPSPLMGGFGLKHPPPQIMIKNTPVPANPPTNFSAAKFASFITQYSTGQVSVEIEWELQKENSKRWNPEIQYTSNYNKSVNVDFTVDANGVYSEPRPIGTRYLTRNL

SEQ ID NO: 2869 - protein, 735 aa, synthetic construct
  REGION 1..735: note = source = /note="Description of Artificial Sequence: Synthetic polypeptide"
MAADGYLPDWLEDTLSEGIRQWWKLKPGPPPPRPAERHQDDSRGLVLPGYKYLGPFNGLDKGEPVNEADAAALEHDKAYDRQLDSGDNPYLKYNHADAEFQERLKEDTSFGGNLGRAVFQAKKRVLEPLGLVEEPVKTAPGKKRPVEHSPAEPDSSSGTGKAGQQPARKRLNFGQTGDADSVPDPQPLGQPPAAPTSLGSTTMATGSGAPMADNNEGADGVGNSSGNWHCDSQWLGDRVITTSTRTWALPTYNNHLYKQISSQSGASNDNHYFGYSTPWGYFDFNRFHCHFSPRDWQRLINNNWGFRPKRLNFKLFNIQVKEVTQNDGTTTIANNLTSTVQVFTDSEYQLPYVLGSAHQGCLPPFPADVFMVPQYGYLTLNNGSQAVGRSSFYCLEYFPSQMLRTGNNFTFSYTFEDVPFHSSYAHSQSLDRLMNPLIDQYLYYLNRTQSNSGTLQQSRLLFSQAGPTSMSLQAKNWLPGPCYRQQRLSKQANDNNNSNFPWTAATKYHLNGRDSLVNPGPAMASHKDDEEKFFPMHGTLIFGKQGTNANDADLEHVMITDEEEIRTTNPVATEQYGNVSNNLQNSNTGPTTENVNHQGALPGMVWQDRDVYLQGPIWAKIPHTDGHFHPSPLMGGFGLKHPPPQIMIKNTPVPANPPTNFSAAKFASFITRYSTGQVSAEIEWELQKENSKRWNPEIQYTSNYNKSVNVDFTVDANGVYSEPRPIGTRYLTRNL

SEQ ID NO: 2870 - protein, 735 aa, synthetic construct
  REGION 1..735: note = source = /note="Description of Artificial Sequence: Synthetic polypeptide"
MAADGYLPDWLEDILSEGIRQWWKLKPGPPPPKPAERHKDDSRGLVLPGYKYLGPFNGLDKGEPVNEADAAALEHDKAYDRQLDSGDNPYLKYNHADAEFQERLKEDTSFGGNLGRAVFQAKKRVLEPLGLVEEPVKTAPGKKRPVEQSPAEPDSSSGTGKAGNQPARKRLNFGQTGDADSVPDPQPLGQPPAAPSGLGSTTMATGSGAPMADNNEGADGVGNSSGNWHCDSQWLGDRVITTSTRTWALPTYNNHLYKQISSQSGAANDNHYFGYSTPWGYFDFNRFHCHFSPRDWQRLINNNWGFRPKRLNFKLFNIQVKEVTQNDGTTTIANNLTSTVQVFTDSEYQLPYVLGSAHQGCLPPFPADVFMVPQYGYLTLNNGSQAVGRSSFYCLEYFPSQMLRTGNNFTFSYTFEDVPFHSSYAHSQSLDRLMNPLIDQYLHYLNKTQSNSGTLQQSRLLFSQAGPTSMSLQAKNWLPGPCYRQQRLSKQANDNNNSNFPWTAATKYHLNGRDSLVNPGPAMASHKDDEEKFFPMHGTLIFGKQGTNANDADLDNVMITDEEEIRTTNPVATEQYGTVSNNLQNSNTGPTTGTVNHQGALPGMVWQDRDVYLQGPIWAKIPHTDGHFHPSPLMGGFGLKHPPPQIMIKNTPVPANPPTNFSSAKFASFITQYSTGQVSVEIEWELQKENSKRWNPEIQYTSNYNKSVNVDFTVDTNGVYSEPRPIGTRYLTRNL

SEQ ID NO: 2871 - protein, 735 aa, synthetic construct
  REGION 1..735: note = source = /note="Description of Artificial Sequence: Synthetic polypeptide"
MAADGYLPDWLEDTLSEGIRQWWKLKPGPPPPRPAERHQDDSRGLVLPGYKYLGPFNGLDKGEPVNEADAAALEHDKAYDRQLDSGDNPYLKYNHADAEFQERLKEDTSFGGNLGRAVFQAKKRVLEPLGLVEEPVKTAPGKKRPVEHSPAEPDSSSGTGKAGQQPARKRLNFGQTGDADSVPDPQPLGQPPAAPTSLGSTTMATGSGAPMADNNEGADGVGNSSGNWHCDSQWLGDRVITTSTRTWALPTYNNHLYKQISSQSGASNDNHYFGYSTPWGYFDFNRFHCHFSPRDWQRLINNNWGFRPKRLNFKLFNIQVKEVTQNDGTTTIANNLTSTVQVFTDSEYQLPYVLGSAHQGCLPPFPADVFMVPQYGYLTLNNGSQAVGRSSFYCLEYFPSQMLRTGNNFTFSYTFEDVPFHSSYAHSQSLDRLMNPLIDQYLYYLNRTQSNSGTLQQSRLLFSQAGPTSMSLQAKNWLPGPCYRQQRLSKQANDNNNSNFPWTAATKYHLNGRDSLVNPGPAMASHKDDEEKFFPMHGTLIFGKQGTNANDADLEHVMITDEEEIRTTNPVATEQYGNVSNNLQNSNTGPTTENVNRQGALPGMVWQDRDVYLQGPIWAKIPHTDGHFHPSPLMGGFGLKHPPPQIMIKNTPVPANPPTNFSAAKFASFITQYSTGQVSVEIEWELQKENSKRWNPEIQYTSNYNKSVNVDFTVDANGVYSEPRPIGTRYLTRNL

SEQ ID NO: 2872 - protein, 735 aa, synthetic construct
  REGION 1..735: note = source = /note="Description of Artificial Sequence: Synthetic polypeptide"
MAADGYLPDWLEDTLSEGIRQWWKLKPGPPPPRPAERHQDDSRGLVLPGYKYLGPFNGLDKGEPVNEADAAALEHDKAYDRQLDSGDNPYLKYNHADAEFQERLKEDTSFGGNLGRAVFQAKKRVLEPLGLVEEPVKTAPGKKRPVEHSPAEPDSSSGTGKAGQQPARKRLNFGQTGDADSVPDPQPLGQPPAAPTSLGSTTMATGSGAPMADNNEGADGVGNSSGNWHCDSQWLGDRVITTSTRTWALPTYNNHLYKQISSQSGASNDNHYFGYSTPWGYFDFNRFHCHFSPRDWQRLINNNWGFRPKRLNFKLFNIQVKEVTQNDGTTTIANNLTSTVQVFTDSEYQLPYVLGSAHQGCLPPFPADVFMVPQYGYLTLNNGSQAVGRSSFYCLEYFPSQMLRTGNNFTFSYTFEDVPFHSSYAHSQSLDRLMNPLIDQYLYYLNRTQSNSGTLQQSRLLFSQAAPTSMSLQAKNWLPGPCYRQQRLSKQANDNNNSNFPWTAATKYHLNGRDSLVNPGPAMASHKDDEEKFFPMHGTLIFGKQGTNANDTDLEHVMITDEEEIRTTNPVATEQYGNVSNNLQNSNTGPTTENVNHQGALPGMVWQDRDVYLQGPIWAKIPHTDGHFHPSPLMGGFGLKHPPPQIMIKNTPVPANPPTNFSAAKFASFITQYSTGQVSVEIEWELQKENSKRWNPEIQYTSNYNKSVNVDFTVDANGVYSEPRPIGTRYLTRNL

SEQ ID NO: 2873 - protein, 735 aa, synthetic construct
  REGION 1..735: note = source = /note="Description of Artificial Sequence: Synthetic polypeptide"
MAADGYLPDWLEDILSEGIRQWWKLKPGPPPPKPAERHKDDSRGLVLPGYKYLGPFNGLDKGEPVNEADAAALEHDKAYDRQLDSGDNPYLKYNHADAEFQERLKEDTSFGGNLGRAVFQAKKRVLEPLGLVEEPVKTAPGKKRPVEQSPAEPDSSSGTGKAGNQPARKRLNFGQTGDADSVPDPQPLGQPPAAPSGLGSTTMATGSGAPMADNNEGADGVGNSSGNWHCDSQWLGDRVITTSTRTWALPTYNNHLYKQISSQSGAANDNHYFGYSTPWGYFDFNRFHCHFSPRDWQRLINNNWGFRPKRLNFKLFNIQVKEVTQNDGTTTIANNLTSTVQVFTDSEYQLPYVLGSAHQGCLPPFPADVFMVPQYGYLTLNNGSQAVGRSSFYCLEYFPSQMLRTGNNFTFSYTFEDVPFHSSYAHSQSLDRLMNPLIDQYLYYLNKTQSNSGTLQQSRLLFSQAGPTSMSLQAKNWLPGPCYRQQRLSKQANDNNNSNFPWTAATKYHLNGRDSLVNPGPAMASHKDDEEKFFPMHGTLIFGKQGTNANDADLDNVMITDEEEIRTTNPVATEQYGTVSNNLQNSNTGPTTGTVNHQGALPGMVWQDRDVYLQGPIWAKIPHTDGHFHPSPLMGGFGLKHPPPQIMIKNTPVPANPPTNFSSAKFASFVTQYSTGQVSVEIEWELQKENSKRWNPEIQYTSNYNKSVNVDFTVDTNGVYSEPRPIGTRYLTRNL

SEQ ID NO: 2874 - protein, 735 aa, synthetic construct
  REGION 1..735: note = source = /note="Description of Artificial Sequence: Synthetic polypeptide"
MAADGYLPDWLEDTLSEGIRQWWKLKPGPPPPRPAERHQDDSRGLVLPGYKYLGPFNGLDKGEPVNEADAAALEHDKAYDRQLDSGDNPYLKYNHADAEFQERLKEDTSFGGNLGRAVFQAKKRVLEPLGLVEEPVKTAPGKKRPVEHSPAEPDSSSGTGKAGQQPARKRLNFGQTGDADSVPDPQPLGQPPAAPTSLGSTTMATGSGAPMADNNEGADGVGNSSGNWHCDSQWLGDRVITTSTRTWALPTYNNHLYKQISSQSGASNDNHYFGYSTPWGYFDFNRFHCHFSPRDWQRLINNNWGFRPKRLNFKLFNIQVKEVTQNDGTTTIANNLTSTVQVFTDSEYQLPYALGSAHQGCLPPFPADVFMVPQYGYLTLNNGSQAVGRSSFYCLEYFPSQMLRTGNNFTFSYTFEDVPFHSSYAHSQSLDRLMNPLIDQYLYYLNRTQSNSGTLQQSRLLFSQAGPTSMSLQAKNWLPGPCYRQQRLSKQANDNNNSNFPWTAATKYHLNGRDSLVNPGPAMASHKDDEEKFFPMHGTLIFGKQGTNANDTDLEHVMITDEEEIRTTNPVATEQYGNVSNNLQNSNTGPTTENVNHQGALPGMVWQDRDVYLQGPIWAKIPHTDGHFHPSPLMGGFGLKHPPPQIMIKNTPVPANPPTNFSAAKFASFITQYSTGQVSVEIEWELQKENSKRWNPEIQYTSNYNKSVNVDFTVDANGVYSEPRPIGTRYLTRNL

SEQ ID NO: 2875 - protein, 735 aa, synthetic construct
  REGION 1..735: note = source = /note="Description of Artificial Sequence: Synthetic polypeptide"
MAADGYLPDWLEDILSEGIRQWWKLKPGPPPPKPAERHKDDSRGLVLPGYKYLGPFNGLDKGEPVNEADAAALEHDKAYDRQLDSGDNPYLKYNHADAEFQERLKEDTSFGGNLGRAVFQAKKRVLEPLGLVEEPVKTAPGKKRPVEQSPAEPDSSSGTGKAGNQPARKRLNFGQTGDADSVPDPQPLGQPPAAPSGLGSTTMATGSGAPMADNNEGADGVGNSSGNWHCDSQWLGDRVITTSTRTWALPTYNNHLYKQISSQSGAANDNHYFGYSTPWGYFDFNRFHCHFSPRDWQRLINNNWGFRPKRLNFKLFSIQVKEVTQNDGTTTIANNLTSTVQVFTDSEYQLPYVLGSAHQGCLPPFPADVFMVPQYGYLTLNNGSQAVGRSSFYCLEYFPSQMLRTGNNFTFSYTFEDVPFHSSYAHSQSLDRLMNPLIDQYLYYLNKTQSNSGTLQQSRLLFSQAGPTSMSLQAKNWLPGPCYRQQRLSKQANDNNNSNFPWTAATKYHLNGRDSLVNPGPAMASHKDDEEKFFPMHGTLIFGKQGTNANDADLDNVMITDEEEIRTTNPVATEQYGTVSNNLQNSNTGPTTGTVNHQGALPGMVWQDRDVYLQGPIWAKIPHTDGHFHPSPLMGGFGLKHPPPQIMIKNTPVPANPPTNFSSAKFASFITQYSTGQVSVEIEWELQKENSKRWNPEIQYTSNYNKSVNVDFTVDTNGVYSEPRPIGTRYLTRNL

SEQ ID NO: 2876 - protein, 735 aa, synthetic construct
  REGION 1..735: note = source = /note="Description of Artificial Sequence: Synthetic polypeptide"
MAADGYLPDWLEDTLSEGIRQWWKLKPGPPPPRPAERHQDDSRGLVLPGYKYLGPFNGLDKGEPVNEADAAALEHDKAYDRQLDSGDNPYLKYNHADAEFQERLKEDTSFGGNLGRAVFQAKKRVLEPLGLVEEPVKTAPGKKRPVEHSPAEPDSSSGTGKAGQQPARKRLNFGQTGDADSVPDPQPLGQPPAAPTSLGSTTMATGSGAPMADNNEGADGVGNSSGNWHCDSQWLGDRVITTSTRTWALPTYNNHLYKQISSQSGASNDNHYLGYSTPWGYFDFNRFHCHFSPRDWQRLINNNWGFRPKRLNFKLFNIQVKEVTQNDGTTTIANNLTSTVQVFTDSEYQLPYVLGSAHQGCLPPFPADVFMVPQYGYLTLNNGSQAVGRSSFYCLEYFPSQMLRTGNNFTFSYTFEDVPFHSSYAHSQSLDRLMNPLIDQYLYYLNRTQSNSGTLQQSRLLFSQAAPTSMSLQAKNWLPGPCYRQQRLSKQANDNNNSNFPWTAATKYPLNGRDSLVNPGPAMASHKDDEEKFFPMHGTLIFGKQGTNANDTDLEHVMITDEEEIRTTNPVATEQYGNVSNNLQNSNTGPTTENVNHQGALPGMVWQDRDVYLQGPIWAKIPHTDGHFHPSPLMGGFGLKHPPPQIMIKNTPVPANPPTNFSAAKFASFITQYSTGQVSVEIEWELQKENSKRWNPEIQYTSNYNKSVNVDFTVDANGVYSEPRPIGTRYLTRNL

SEQ ID NO: 2877 - protein, 735 aa, synthetic construct
  REGION 1..735: note = source = /note="Description of Artificial Sequence: Synthetic polypeptide"
MAADGYLPDWLEDILSEGIRQWWKLKPGPPPPKPAERHKDDSRGLVLPGYKYLGPFNGLDKGEPVNEADAAALEHDKAYDRQLDSGDNPYLKYNHADAEFQERLKEDTSFGGNLGRAVFQAKKRVLEPLGLVEEPVKTAPGKKRPVEQSPAEPDSSSGTGKAGNQPARKRLNFGQTGDADSVPDPQPLGQPPAAPSGLGSTTMATGSGAPMADNNEGADGVGNSSGNWHCDSQWLGDRVITTSTRTWALPTYNNHLYKQISSQSGAANDNHYFGYSTPWGYFDFNRFHCHFSPRDWQRLINNNWGFRPKRLNFKLFNIQVKEVTQNDGTTTIANNLTSTVQVFTDSEYQLPYVLGSAHQGCLPPFPADVFMVPQYGYLTLNNGSQAVGRSSFYCLEYFPSQMLRTGNNFTFSYAFEDVPFHSSYAHSQSLDRLMNPLIDQYLYYLNKTQSNSGTLQQSRLLFSQAGPTSMSLQAKNWLPGPCYRQQRLSKQANDNNNSNFPWTAATKYHLNGRDSLVNPGPAMASHKDDEEKFFPMHGTLIFGKQGTNANDADLDNVMITDEEEIRTTNPVATEQYGTVSNNLQNSNTGPTTGTVNHQGALPGMVWQDRDVYLQGPIWAKIPHTDGHFHPSPLMGGFGLKHPPPQIMIKNTPVPANPPTNFSSAKFAPFITQYSTGQVSVEIEWELQKENSKRWNPEIQYTSNYNKSVNVDFTVDTNGVYSEPRPIGTRYLTRNL

SEQ ID NO: 2878 - protein, 735 aa, synthetic construct
  REGION 1..735: note = source = /note="Description of Artificial Sequence: Synthetic polypeptide"
MAADGYLPDWLEDTLSEGIRQWWKLKPGPPPPRPAERHQDDSRGLVLPGYKYLGPFNGLDKGEPVNEADAAALEHDKAYDRQLDSGDNPYLKYNHADAEFQERLKEDTSFGGNLGRAVFQAKKRVLEPLGLVEEPVKTAPGKKRPVEHSPAEPDSSSGTGKAGQQPARKRLNFGQTGDADSVPDPQPLGQPPAAPTSLGSTTMATGSGAPMADNNEGADGVGNSSGNWHCDSQWLGDRVITTSTRTWALPTYNNHLYKQISSQSGASNDNHYFGYSTPWGYFDFNRFHCHFSPRDWQRLINNNWGFRPKRLNFKLFNIQVKEVTQNDGTTTIANNLTSTVQVFTDSEYQLPYVLGSAHQGCLPPFPADVFMVPQYGYLTLNNGSQAVGRSSFYCLEYFPSQMLRTGNNFTFSYTFEDVPFHSSYAHSQSLDRLMNPLIDQYLYYLNRTQSNSGTLQQSRLLFSQAGPTSMSLQAKNWLPGPCYRQQRLSKQANDNNNSNFPWTAATKYHLNGRDSLVNPGPAMASHKDDEEKFFPMHGTLIFGKQGTNANDADLEHVMITDEEEIRTTNPVATEQYGNVSNNLQNSNTGPTTENVNHQGALPGMVWQDRDVYLQGPIWAKIPHTDGHFHPSPLMGGFGLKHPPPQIMIKNTPVPANPPTNFSAAKFASFITRYSTGQVSVEIEWELQKENSKRWNPEIQYTSNYNKSVNVDFTVDANGVYSEPRPIGTRYLTRNL

SEQ ID NO: 2879 - protein, 735 aa, synthetic construct
  REGION 1..735: note = source = /note="Description of Artificial Sequence: Synthetic polypeptide"
MAADGYLPDWLEDTLSEGIRQWWKLKPGPPPPRPAERHQDDSRGLVLPGYKYLGPFNGLDKGEPVNEADAAALEHDKAYDRQLDSGDNPYLKYNRADAEFQERLKEDTSFGGNLGRAVFQAKKRVLEPLGLVEEPVKTAPGKKRPVEHSPAEPDSSSGTGKAGQQPARKRLNFGQTGDADSVPDPQPLGQPPAAPTSLGSTTMATGSGAPMADNNEGADGVGNSSGNWHCDSQWLGDRVITTSTRTWALPTYNNHLYKQISSQSGASNDNHYFGYSTPWGYFDFNRFHCHFSPRDWQRLINNNWGFRPKRLNFKLFNIQVKEVTQNDGTTTIANNLTSTVQVFTDSEYQLPYVLGSAHQGCLPPFPADVFMVPQYGYLTLNNGSQAVGRSSFYCLEYFPSQMLRTGNNFTFSYTFEDVPFHSSYAHSQSLDRLMNPLIDQYLYYLNRTQSNSGTLQQSRLLFSQAGPTSMSLQAKNWLPGPCYRQQRLSKQANDNNNSNFPWTAATKYHLNGRDSLVNPGPAMASHKDDEEKFFPMHGTLIFGKQGTNANDTDLEHVMITDEEEIRTTNPVATEQYGNVSNNLQNSNTGPTTENVNHQGALPGMVWQDRDVYLQGPIWAKIPHTDGHFHPSPLMGGFGLKHPPPQIMIKNTPVPANPPTNFSAAKFASFITQYSTGQVSVEIEWELQKENSKRWNPEIQYTSNYNKSVNVDFTVDANGVYSEPRPIGTRYLTRNL

SEQ ID NO: 2880 - protein, 735 aa, synthetic construct
  VARIANT 628: note = Any naturally occurring amino acid
  REGION 1..735: note = source = /note="Description of Artificial Sequence: Synthetic polypeptide"
MAADGYLPDWLEDTLSEGIRQWWKLKPGPPPPRPAERHQDDSRGLVLPGYKYLGPFNGLDKGEPVNEADAAALEHDKAYDRQLDSGDNPYLKYNHADAEFQERLKEDTSFGGNLGRAVFQAKKRVLEPLGLVEEPVKTAPGKKRPVEHSPAEPDSSSGTGKAGQQPARKRLNFGQTGDADSVPDPQPLGQPPAAPTSLGSTTMATGSGAPMADNNEGADGVGNSSGNWHCDSQWLGDRVITTSTRTWALPTYNNHLYKQISSQSGASNDNHYFGYSTPWGYFDFNRFHCHFSPRDWQRLINNNWGFRPKRLNFKLFNIQVKEVTQNDGTTTIANNLTSTVQVFTDSEYQLPYVLGSAHQGCLPPFPADVFMVPQYGYLTLNNGSQAVGRSSFYCLEYFPSQMLRTGNNFTFSYTFEDVPFHSSYAHSQSLDRLMNPLIDQYLYYLNRTQSNSGTLQQSRLLFSQAGPTSMSLQAKNWLPGPCYRQQRLSKQANDNNNSNFPWTAATKYHLNGRDSLVNPGPAMASHKDDEEKFFPMHGTLIFGKQGTNANDADLEHVMITDEEEIRTTNPVATEQYGNVSNNLQNSNTGPTTENVNHQGALPGMVWQDRDVYLQGPIWAKIPHTDGHXHPSPLMGGFGLKHPPPQIMIKNTPVPANPPTNFSAAKFASFITQYSTGQVSVEIEWELQKENSKRWNPEIQYTSNYNKSVNVDFTVDANGVYSEPRPIGTRYLTRNL

SEQ ID NO: 2881 - protein, 735 aa, synthetic construct
  REGION 1..735: note = source = /note="Description of Artificial Sequence: Synthetic polypeptide"
MAADGYLPDWLEDTLSEGIRQWWKLKPGPPPPRPAERHQDDSRGLVLPGYKYLGPFNGLDKGEPVNEADAAALEHDKAYDRQLDSGDNPYLKYNHADAEFQERLKEDTSFGGNLGRAVFQAKKRVLEPLGLVEEPVKTAPGKKRPAEHSPAEPDSSSGTGKAGQQPARKRLNFGQTGDADSVPDPQPLGQPPAAPTSLGSTTMATGSGAPMADNNEGADGVGNSSGNWHCDSQWLGDRVITTSTRTWALPTYNNHLYKQISSQSGASNDNHYFGYSTPWGYFDFNRFHCHFSPRDWQRLINNNWGFRPKRLNFKLFNIQVKEVTQNDGTTTIANNLTSTVQVFTDSEYQLPYVLGSAHQGCLPPFPADVFMVPQYGYLTLNNGSQAVGRSSFYCLEYFPSQMLRTGNNFTFSYTFEDVPFHSSYAHSQSLDRLMNPLIDQYLYYLNRTQSNSGTLQQSRLLFSQAGPTSMSLQAKNWLPGPCYRQQRLSKQANDNNNSNFPWTAATKYHLNGRDSLVNPGPAMASHKDDEEKFFPMHGTLIFGKQGTNANDADLEHVMITDEEEIRTTNPVATEQYGNVSNNLQNSNTGPTTENVNHQGALPGMVWQDRDVYLQGPIWAKIPHTDGHFHPSPLMGGFGLKHPPPQIMIKNTPVPANPPTNFSAAKFASFITQYSTGQVSVEIEWELQKENSKRWNPEIQYTSNYNKSVNVDFTVDANGVYSEPRPIGTRYLTRNL

SEQ ID NO: 2882 - protein, 735 aa, synthetic construct
  REGION 1..735: note = source = /note="Description of Artificial Sequence: Synthetic polypeptide"
MAADGYLPDWLEDTLSEGIRQWWKLKPGPPPPRPAERHQDDSRGLVLPGYKYLGPFNGLDKGEPVNEADAAALEHDKAYDRQLDSGDNPYLKYNHADAEFQERLKEDTSFGGNLGRAVFQAKKRVLEPLGLVEEPVKTAPGKKRPVEHSPAEPDSSSGTGKAGQQPARKRLNFGQTGDADSVPDPQPLGQPPAAPTSLGSTTMATGSGAPMADNNEGADGVGNSSGNWHCDSQWLGDRVITTSTRTWALPTYNNHLYKQISSQSGASNDNHYFGYSTPWGYFDFNRFHCHFSPRDWQRLINNNWGFRPKRLNFKLFNIQVKEVTQNDGTTTIANNLTSTVQVFTDSEYQLPYVLGSAHQGCLPPFPADVFMVPQYGYLTLNNGSQAVGRSSFYCLEYFPSQMLRTGNNFTFSYTFEDVPFHSSYAHSQSLDRLMNPLIDQYLYYLNRTQSNSGTLQQPRLLFSQAGPTSMSLQAKNWLPGPCYRQQRLSKQANDNNNSNFPWTAATKYHLNGRDSLVNPGPAMASHKDDEEKFFPMHGTLIFGKQGTNANDADLEHVMITDEEEIRTTNPVATEQYGNVSNNLQNSNTGPTTENVNHQGALPGMVWQDRDVYLQGPIWAKIPHTDGHFHPSPLMGGFGLKHPPPQIMIKNTPVPANPPTNFSAAKFASFITQYSTGQVSVEIEWELQKENSKRWNPEIQYTSNYNKSVNVDFTVDANGVYSEPRPIGTRYLTRNL

SEQ ID NO: 2883 - protein, 735 aa, synthetic construct
  VARIANT 552: note = Any naturally occurring amino acid
  REGION 1..735: note = source = /note="Description of Artificial Sequence: Synthetic polypeptide"
MAADGYLPDWLEDTLSEGIRQWWKLKPGPPPPRPAERHQDDSRGLVLPGYKYLGPFNGLDKGEPVNEADAAALEHDKAYDRQLDSGDNPYLKYNHADAEFQERLKEDTSFGGNLGRAVFQAKKRVLEPLGLVEEPVKTAPGKKRPVEHSPAEPDSSSGTGKAGQQPARKRLNFGQTGDADSVPDPQPLGQPPAAPTSLGSTTMATGSGAPMADNNEGADGVGNSSGNWHCDSQWLGDRVITTSTRTWALPTYNNHLYKQISSQSGASNDNHYFGYSTPWGYFDFNRFHCHFSPRDWQRLINNNWGFRPKRLNFKLFNIQVKEVTQNDGTTTIANNLTSTVQVFTDSEYQLPYVLGSAHQGCLPPFPADVFMVPQYGYLTLNNGSQAVGRSSFYCLEYFPSQMLRTGNNFTFSYTFEDVPFHSSYAHSQSLDRLMNPLIDQYLYYLNRTQSNSGTLQQSRLLFSQAGPTSMSLQAKNWLPGPCYRQQRLSKQANDNNNSNFPWTAATKYHLNGRDSLVNPGPAMASHKDDEEKFFPMHGTLIFGKQGTNANDXDLEHVMITDEEEIRTTNPVATEQYGNVSNNLQNSNTGPTTENVNHQGALPGMVWQDRDVYLQGPIWAKIPHTDGHFHPSPLMGGFGLKHPPPQIMIKNTPVPANPPTNFSAAKFASFITQYSTGQVSVEIEWELQKENSKRWNPETQYTSNYNKSVNVDFTVDANGVYSEPRPIGTRYLTRNL

SEQ ID NO: 2884 - protein, 735 aa, synthetic construct
  REGION 1..735: note = source = /note="Description of Artificial Sequence: Synthetic polypeptide"
MAADGYLPDWLEDTLSEGIRQWWKLKPGPPLPRPAERHQDDSRGLVLPGYKYLGPFNGLDKGEPVNEADAAALEHDKAYDRQLDSGDNPYLKYNHADAEFQERLKEDTSFGGNLGRAVFQAKKRVLEPLGLVEEPVKTAPGKKRPVEHSPAEPDSSSGTGKAGQQPARKRLNFGQTGDADSVPDPQPLGQPPAAPTSLGSTTMATGSGAPMADNNEGADGVGNSSGNWHCDSQWLGDRVITTSTRTWALPTYNNHLYKQISSQSGASNDNHYFGYSTPWGYFDFNRFHCHFSPRDWQRLINNNWGFRPKRLNFKLFNIQVKEVTQNDGTTTIANNLTSTVQVFTDSEYRLPYVLGSAHQGCLPPFPADVFMVPQYGYLTLNNGSQAVGRSSFYCLEYFPSQMLRTGNNFTFSYTFEDVPFHSSYAHSQSLDRLMNPLIDQYLYYLNRTQSNSGTLQQSRLLFSQAGPTSMSLQAKNWLPGPCYRQQRLSKQANDNNNSNFPWTAATKYHLNGRDSLVNPGPAMASHKDDEEKFFPMHGTLIFGKQGTNANDADLEHVMITDEEEIRTTNPVATEQYGNVSNNLQNSNTGPTTENVNHQGALPGMVWQDRDVYLQGPIWAKIPHTDGHFHPSPLMGGFGLKHPPPQIMIKNTPVPANPPTNFSAAKFASFITQYSTGQVSVEIEWELQKENSKRWNPEIQYTSNYNKSVNVDFTVDANGVYSEPRPIGTRYLTRNL

SEQ ID NO: 2885 - protein, 735 aa, synthetic construct
  REGION 1..735: note = source = /note="Description of Artificial Sequence: Synthetic polypeptide"
MAADGYLPDWLEDTLSEGIRQWWKLKPGPPPPRPAERHQDDSRGLVLPGYKYLGPFNGLDKGEPVNEADAAALEHDKAYDRQLDSGDNPYLKYNHADAEFQERLKEDTSFGGNLGRAVFQAKKRVLEPLGLVEEPVKTAPGKKRPVEHSPAEPDSSSGTGKAGQQPARKRLNFGQTGDADSVPDPQPLGQPPAAPTSLGSTTMATGSGAPMADNNEGADGVGNSSGNWHCDSQWLGDRVITTSTRTWALPTYNNHLYKQISSQSGASNDNHYFGYSTPWGYFDFNRFHCHFSPRDWQRLINNNWGFRPKRLNFKLFNIQVKEVTQNDGTTTIANNLTSTVQVFTDSEYQLPYVLGSAHQGCLPPFPADVFMVPQYGYLTLNNGSQAVGRSSFYCLEYFPSQMLRTGNNFTFSYTFEDVPFHSSYAHSQSLDRLMNPLTDQYLYYLNRTQSNSGTLQQSRLLFSQAGPTSMSLQAKNWLPGPCYRQQRLSKQANDNNNSNFPWTAATKYHLNGRDSLVNPGPAMASHKDDEEKFFPMHGTLIFGKQGTNANDTDLEHVMITDEEEIRTTNPVATEQYGNVSNNLQNSNTGPTTENVNHQGALPGMVWQDRDVYLQGPIWAKIPHTDGHFHPSPLMGGFGLKHPPPQIMIKNTPVPANPPTNFSAAKFASFITQYSTGQVSVEIEWELQKENSKRWNPEIQYTSNYNKSVNVDFTVDANGVYSEPRPIGTRYLTRNL

SEQ ID NO: 2886 - protein, 735 aa, synthetic construct
  REGION 1..735: note = source = /note="Description of Artificial Sequence: Synthetic polypeptide"
MAADGYLPDWLEDTLSEGIRQWWKLKPGPPPPRPAERHQDDSRGLVLPGYKYLGPFNGLDKGEPVNEADAAALEHDKAYDRQLDSGDNPYLKYNHADAEFQERLKEDTSFGGNLGRAVFQAKKRVLEPLGLVEEPVKTAPGKKRPVEHSPAEPDSSSGTGKAGQQPARKRLNFGQTGDADSVPDPQPLGQPPAAPTSLGSTTMATGSGAPMADNNEGADGVGNSSGNWHCDSQWLGDRVITTSTRTWALPTYNNHLYRQISSQSGASNDNHYFGYSTPWGYFDFNRFHCHFSPRDWQRLINNNWGFRPKRLNFKLFNIQVKEVTQNDGTTTIANNLTSTVQVFTDSEYQLPYVLGSAHQGCLPPFPADVFMVPQYGYLTLNNGSQAVGRSSFYCLKYFPSQMLRTGNNFTFSYTFEDVPFHSSYAHSQSLDRLMNPLIDQYLYYLNRTQSNSGTLQQSRLLFSQAGPTSMSLQAKNWLPGPCYRQQRLSKQANDNNNSNFPWTAATKYHLNGRDSLVNPGPAMASHKDDEEKFFPLHGTLIFGKQGTNANDTDLEHVMITDEEEIRTTNPVATEQYGNVSNNLQNSNTGPTTENVNHQGALPGMVWQDRDVYLQGPIWAKIPHTDGHFHPSPLMGGFGLKHPPPQIMIKNTPVPANPPTNFSAAKFASFITQYSTGQVSVEIEWELQKENSKRWNPEIQYTSNYNKSVNVDFTVDANGVYSEPRPIGTRYLTRNL

SEQ ID NO: 2887 - protein, 735 aa, synthetic construct
  REGION 1..735: note = source = /note="Description of Artificial Sequence: Synthetic polypeptide"
MAADGYLPDWLEDTLSEGIRQWWKLKPGPPPPRPAERHQDDSRGLVLPGYKYLGPFNGLDKGEPVNEADAAALEHDKAYDRQLDSGDNPYLKYNHADAEFQERLKEDTSFGGNLGRAVFQAKKRVLEPLGLVEEPVKTAPGKKRPVEHSPAEPDSSSGTGKAGQQPARKRLNFGQTGDADSVPDPQPLGQPPAAPTSLGSTTMATGSGAPMADNNEGADGVGNSSGNWHCDSQWLGDRVITTSTRTWALPTYNNHLYRQISSQSGASNDNHYFGYSTPWGYFDFNRFHCHFSPRDWQRLINNNWGFRPKRLNFKLFNIQVKEVTQNDGTTTIANNLTSTVQVFTDSEYQLPYVLGSAHQGCLPPFPADVFMVPQYGYLTLNNGSQAVGRSSFYCLEYFPSQMLRTGNNFTFSYTFEDVPFHSSYAHSQSLDRLMNPLIDQYLYYLNRTQSNSGTLQQSRLLFSQAGPTSMSLQAKNWLPGPCYRQQRLSKQANDNNNSNFPWTAATKYHLNGRDSLVNPGPAMASHKDDEEKFFPMHGTLIFGKQGTNANDTDLEHVMITDEEEIRTTNPVATEQYGNVSNNLQNSNTGPTTENVNHQGALPGMVWQDRDVYLQGPIWAKIPHTDGHFHPSPLMGGFGLKHPPPQIMIKNTPVPANPPTNFSAAKFASFITQYSTGQVSVEIEWVLQKENSKRWNPEIQYTSNYNKSVNVDFTVDANGVYSEPRPIGTRYLTRNL

SEQ ID NO: 2888 - protein, 735 aa, synthetic construct
  REGION 1..735: note = source = /note="Description of Artificial Sequence: Synthetic polypeptide"
MAADGYLPDWLEDTLSEGIRQWWKLKPGPPPPRPAERHQDDSRGLVLPGYKYLGPFNGLDKGEPVNEADAAALEHDKAYDRQLDSGDNPYLKYNHADAEFQERLKEDTSFGGNLGRAVFQAKKRVLEPLGLVEEPVKTAPGKKRPVEHSPAEPDSSSGTGKAGQQPARKRLNFGQTGDADSVPDPQPLGQPPAAPTSLGSTTMATGSGAPMADNNEGADGVGNSSGNWHCDSQWLGDRVITTSTRTWALPTYNNHLYKQISSQSGASNDNHYFGYSTPWGYFDFNRFHCHFSPRDWQRLINNNWGFRPKRLNFKLFNIQVKEVTQNDGTTTIANNLISTVQVFTDSEYQLPYVLGSAHQGCLPPFPADVFMVPQYGYLTLNNGSQAVGRSSFYCLEYFPSQMLRTGNNFTFSYTFEDVPFHSSYAHSQSLDRLMNPLIDQYLYYLNRTQSNSGTLQQSRLLFSQAGPTSMSLQAKNWLPGPCYRQQRLSKQANDNNNSNFPWTAATKYHLNGRDSLVNPGPAMASHKDDEEKFFPMHGTLIFGKQGTNANDADLEHVMITDEEEIRTTNPVATEQYGNVSNNLQNSNTGPTTENVNHQGALPGMVWQDRDVYLQGPIWAKIPHTDGHFHPSPLMGGFGLKHPPPQIMIKNTPVPANPPTNFSAAKFASFITQYSTGQVSVEIEWELQKENSKRWNPEIQYTSNYNKSVNVDFTVDANGVYSEPRPIGTRYLTRNL

SEQ ID NO: 2889 - protein, 734 aa, synthetic construct
  REGION 1..734: note = source = /note="Description of Artificial Sequence: Synthetic polypeptide"
MAADGYLPDWLEDILSEGIRQWWKLKPGPPPPKPAERHKDDSRGLVLPGYKYLGPFNGLDKGEPVNEADAAALEHDKAYDRQLDSGDNPYLKYNHADAEFQERLKEDTSFGGNLGRAVFQAKKRVLEPLGLVEEPVKTAPGKKRPVEQSPAEPDSSSGTGKAGNQPARKRLNFGQTGDADSVPDPQPLGQPPAAPSGLGSTTMATGSGAPMADNNEGADGVGNSSGNWHCDSQWLGDRVITTSTRTWALPTYNNHLYKQISSQSGAANDNHYFGYSTPWGYFDFNRFHCHFSPRDWQRLINNNWGFRPKRLNFKLFNIQVKEVTQNDGTTTIANNLTSTVQVFTDSEYQLPYVLGSAHQGCLPPFPADVFMVPQYGYLTLNNGSQAVGRSSFYCLEYFPSQMLRTGNNFTFSYTFEDVPFHSSYAHSQSLDRLMNPLIDQYLYYLNKTQSNSGTLQQSRLLFSQAGPTSMSLQAKNWLPGPCYRQQRLSKQANDNNSNFPWTAATKYHLNGRDSLVNPGPAMASHKDDEEKFFPMHGTLIFGKQGTNANDADLDNVMITDEEEIRTTNPVATEQYGTVSNNLQNSNTGPTTGTVNHQGALPGMVWQDRDVYLQGPIWAKIPHTDGHFHPSPLMGGFGLKHPPPQIMIKNTPVPANPPTNFSSAKFASFITQYSTGQVSVEIEWELQKENSKRWNPEIQYTSNYNKSVNVDFTVDTNGVYSEPRPIGTRYLTRNL

SEQ ID NO: 2890 - protein, 735 aa, synthetic construct
  REGION 1..735: note = source = /note="Description of Artificial Sequence: Synthetic polypeptide"
MAADGYLPDWLEDILSEGIRQWWKLKPGPPPPKPAERHKDDSRGLVLPGYKYLGPFNGLDKGEPVNEADAAALEHDKAYDRQLDSGDNPYLKYNHADAEFQERLKEDTSFGGNLGRAVFQAKKRVLEPLGLVEEPVKTAPGKKRPVEQSPAEPDSSSGTGKAGNQPARKRLNFGQTGDADSVPDPQPLGQPPAAPSGLGSTTMATGSGAPMADNNEGADGVGNSSGNWHCDSQWLGDRVITTSTRTWALPTYNNHLYKQISSQSGAANDSHYFGYSTPWGYFDFNRFHCHFSPRDWQRLINNNWGFRPKRLNFKLFNIQVKEVTQNDGTTTIANNLTSTVQVFTDSEYQLPYVLGSAHQGCLPPFPADVFMVPQYGYLTLNNGSQAVGRSSFYCLEYFPSQMLRTGNNFTFSYTFEDVPFHSSYAHSQSLDRLMNPLIDQYLYYLNKTQSNSGTLQQSRLLFSQAGPTSMSLQAKNWLPGPCYRQQRLSKQANDNNNSNFPWTAATKYHLNGRDSLVNPGPAMASHKDDEEKFFPMHGTLIFGKQGTNANDADLDNVMITDEEEIRTTNPVATEQYGTVSNNLQNSNTGPTTGTVNHQGALPGMVWQDRDVYLQGPIWAKIPHTDGHFHPSPLMGGFGLKHPPPQIMIKNTPVPANPPTNFSSAKFASFITQYSTGQVSVEIEWELQKENSKRWNPEIQYTSNYNKSVNVDFTVDTNGVYSEPRPIGTRYLTRNL

SEQ ID NO: 2891 - protein, 735 aa, synthetic construct
  REGION 1..735: note = source = /note="Description of Artificial Sequence: Synthetic polypeptide"
MAADGYLPDWLEDTLSEGIRQWWKLKPGPPPPRPAERHQDDSRGLVLPGYKYLGPFNGLDKGEPVNEADAAALEHDKAYDRQLDSGDNPYLKYNHADAEFQERLKEDTSFGGNLGRAVFQAKKRVLEPLGLVEEPVKTAPGKKRPVEHSPAEPDSSSGTGKAGQQPARKRLNFGQTGDADSVPDPQPLGQPPAAPTSLGSTTMATGSGAPMADNNEGADGVGNSSGNWHCDSQWLGDRVITTSTRTWALPTYNNHLYKQISSQSGASNDNHYFGYSTPWGYFDFNRFHCHFSPRDWQRLINNNWGFRPKRLNFKLFNIQVKEVTQNDGTTTIANNLTSTVQVFTDSEYQLPYVLGSAHQGCLPPFPADVFMVPQYGYLTLNNGSQAVGRSSFYCLEYFPSQMLRTGNNFTFSYTFEDVPFHSSYAHSQSLDRLMNPLIDQYLYYLNRTQSNSGTLQQSRLLFSQAGPTSMSLQAKNWLPGPCYRQQRLSKQANDNNNSNFPWTAATKYHLNGRDSLVNPGPAMASHKDDEEKFFPMHGTLIFGKQGTNANDTDLEHVMITDEEEIRTTNPVATEQYGNVSNNLQNSNTGPTTENVNHQGALPGMVWQDRDVYLQGPIWAKIPHTDGHFHPSPLMGGFGLKHPPPQIMIKNTPVPANPPTNFSAAKFASFITQYSTGQVSVEIEWELQKENSKRWNPEIQYTSNYNKSVNVDFTVDANGVYSEPRPIGTRYLTRNL

SEQ ID NO: 2892 - protein, 734 aa, synthetic construct
  REGION 1..734: note = source = /note="Description of Artificial Sequence: Synthetic polypeptide"
MAADGYLPDWLEDILSEGIRQWWKLKPGPPPKPAERHKDDSRGLVLPGYKYLGPFNGLDKGEPVNEADAAALEHDKAYDRQLDSGDNPYLKYNHADAEFQERLKEDTSFGGNLGRAVFQAKKRVLEPLGLVEEPVKTAPGKKRPVEQSPAEPDSSSGTGKAGNQPARKRLNFGQTGDADSVPDPQPLGQPPAAPSGLGSTTMATGSGAPMADNNEGADGVGNSSGNWHCDSQWLGDRVITTSTRTWALPTYNNHLYKQISSQSGAANDNHYFGYSTPWGYFDFNRFHCHFSPRDWQRLINNNWGFRPKRLNFKLFNIQVKEVTQNDGTTTIANNLTSTVQVFTDSEYQLPYVLGSAHQGCLPPFPADVFMVPQYGYLTLNNGSQAVGRSSFYCLEYFPSQMLRTGNNFTFSYTFEDVPFHSSYAHSQSLDRLMNPLIDQYLYYLNKTQSNSGTLQQSRLLFSQAGPTSMSLQAKNWLPGPCYRQQRLSKQANDNNNSNFPWTAATKYHLNGRDSLVNPGPAMASHKDDEEKFFPMHGTLIFGKQGTNANDADLDNVMITDEEEIRTTNPVATEQYGTVSNNLQNSNTGPTTGTVNHQGALPGMVWQDRDVYLQGPIWAKIPHTDGHFHPSPLMGGFGLKHPPPQIMIKNTPVPANPPTNFSSAKFASFITQYSTGQVSVEIEWELQKENSKRWNPEIQYTSNYNKSVNVDFTVDTNGVYSEPRPIGTRYLTRNL

SEQ ID NO: 2893 - protein, 735 aa, synthetic construct
  REGION 1..735: note = source = /note="Description of Artificial Sequence: Synthetic polypeptide"
MAADGYLPDWLEDTLSEGIRQWWKLKPGPPPPRPAERHQDDSRGLVLPGYKYLGPFNGLDKGEPVNEADAAALEHDKAYDRQLDSGDNPYLKYNHADAEFQERLKEDTSFGGNLGRAVFQAKKRVLEPLGLVEEPVKTAPGKKRPVEHSPAEPDSSSGTGKAGQQPARKRLNFGQTGDADSVPDPQPLGQPPAAPTSLGSTTMATGSGAPMADNNEGADGVGNSSGNWHCDSQWLGDRVITTSTRTWALPTYNNHLYKQISSQSGASNDNHYFGYSTPWGYFDFNRFHCHFSPRDWQRLINNNWGFRPKRLNFKLFNIQVKEVTQNDGTTTIANNLTSTVQVFTDSEYQLPYVLGSAHQGCLPPFPADVFMVPQYGYLTLNNGSQAVGRSSFYCLEYFPSQMLRTGNNFTFSYTFGDVPFHSSYAHSQSLDRLMNPLIDQYLYYLNRTQSNSGTLQQSRLLFSQAGPTSMSLQAKNWLPGPCYRQQRLSKQANDNNNSNFPWTAATKYHLNGRDSLVNPGPAMASHKDDEEKFFPMHGTLIFGKQGTNANDADLEHVMITDEEEIRTTNPVATEQYGNVSNNLQNSNTGPTTENVNHQGALPGMVWQDRDVYLQGPIWAKIPHTDGHFHPSPLMGGFGLKHPPPQIMIKNTPVPANPPTNFSAAKFASFITQYSTGQVSVEIEWELQKENSKRWNPEIQYTSNYNKSVNVDFTVDANGVYSEPRPIGTRYLTRNL

SEQ ID NO: 2894 - protein, 735 aa, synthetic construct
  REGION 1..735: note = source = /note="Description of Artificial Sequence: Synthetic polypeptide"
MAADGYLPDWLEDTLSEGIRQWWKLKPGPPPPRPAERHQDDSRGLVLPGYKYLGPFNGLDKGEPVNEADAAALEHDKAYDRQLDSGDNPYLKYNHADAEFQERLKEDTSFGGNLGRAVFQAKKRVLEPLGLVEEPVKTAPGKKRPVEHSPAEPDSSSGTGKAGQQPARKRLNFGQTGDADSVPDPQPLGQPPAAPTSLGSTTMATGSGAPMADNNEGADGVGNSSGNWHCDSQWLGDRVITTSTRTWALPTYNNHLYKQISSQSGASNDSHYFGYSTPWGYFDFNRFHCHFSPRDWQRLINNNWGFRPKRLNFKLFNIQVKEVTQNDGTTTIANNLTSTVQVFTDSEYQLPYVLGSAHQGCLPPFPADVFMVPQYGYLTLNNGSQAVGRSSFYCLEYFPSQMLRTGNNFTFSYTFEDVPFHSSYAHSQSLDRLMNPLIDQYLYYLNRTQSNSGTLQQSRLLFSQAGPTSMSLQAKNWLPGPCYRQQRLSKQANDNNNSNFPWTAATKYHLNGRDSLVNPGPAMASHKDDEEKFFPMHGTLIFGKQGTNANDADLEHVMITDEEEIRTTNPVATEQYGNVSNNLQNSNTGPTTENVNHQGALPGMVWQDRDVYLQGPIWAKIPHTDGHFHPSPLMGGFGLKHPPPQIMIKNTPVPANPPTNFSAAKFASFITQYSTGQVSVEIEWELQKENSKRWNPEIQYTSNYNKSVNVDFTVDANGVYSEPRPIGTRYLTRNL

SEQ ID NO: 2895 - protein, 735 aa, synthetic construct
  REGION 1..735: note = source = /note="Description of Artificial Sequence: Synthetic polypeptide"
MAADGYLPDWLEDTLSEGIRQWWKLKPGPPPPRPAERHQDDSRGLVLPGYKYLGPFNGLDKGEPVNEADAAALEHDKAYDRQLDSGDNPYLKYNHADAEFQERLKEDTSFGGNLGRAVFQAKKRVLEPLGLVEEPVKTAPGKKRPVEHSPAEPDSSSGTGKAGQQPARKRLNFGQTGDADSVPDPQPLGQPPAAPTSLGSTTMATGSGAPMADNNEGADGVGNSSGNWHCDSQWLGDRVITTSTRTWALPTYNNHLYKQISSQSGASNDNHYFGYSTPWGYFDFNRFHCHFSPRDWQRLINNNWGFRPKRLNFKLFNIQVKEVTQNDGTTTIANNLTSTIQVFTDSEYQLPYVLGSAHQGCLPPFPADVFMVPQYGYLTLNNGSQAVGRSSFYCLEYFPSQMLRTGNNFTFSYTFEDVPFHSSYAHSQSLDRLMNPLIDQYLYYLNRTQSNSGTLQQSRLLFSQAGPTSMSLQAKNWLPGPCYRQQRLSKQANDNNNSNFPWTAATKYHLNGRDSLVNPGPAMASHKDDEEKFFPMHGTLIFGKQGTNANDADLEHVMITDEEEIRTTNPVATEQYGNVSNNLQNSNTGPTTENVNHQGALPGMVWQDRDVYLQGPIWAKIPHTDGHFHPSPLMGGFGLKHPPPQIMIKNTPVPANPPTNFSAAKFASFITQYSTGQVSVEIEWELQKENSKRWNPEIQYTSNYNKSVNVDFTVDANGVYSEPRPIGTRHLTRNL

SEQ ID NO: 2896 - protein, 735 aa, synthetic construct
  REGION 1..735: note = source = /note="Description of Artificial Sequence: Synthetic polypeptide"
MAADGYLPDWLEDTLSEGIRQWWKLKPGPPPPRPAERHQDDSRGLVLPGYKYLGPFNGLDKGEPVNEADAAALEHDKAYDRQLDSGDNPYLKYNHADAEFQERLKEDTSFGGNLGRAVFQAKKRVLEPLGLVEEPVKTAPGKKRPVEHSPAEPDSSSGTGKAGQQPARKRLNFGQTGDADSVPDPQPLGQPPAAPTSLGSTTMATGSGAPMADNNEGADGVGNSSGNWHCDSQWLGDRVITTSTRTWALPTYNNHLYKQISSQSGASNDNHYFGYSTPWGYFDFNRFHCHFSPRDWQRLINNNWGFRPKRLNFKLFNIQVKEVTQNDGTTTIANNLTSTVQVFTDSEYQLPYVLGSAHQGCLPPFPADVFMVPQYGYLTLNNGSQAVGRSSFYCLEYFPSQMLRTGNNFTFSYTFEDVPFHSSYAHSQSLDRLMNPLIDQYLYYLNRTQSNSGTLQQSGLLFSQAGPTSMSLQAKNWLPGPCYRQQRLSKQANDNNNSNFPWTAATKYHLNGRDSLVNPGPAMASHKDDEEKFFPMHGTLIFGKQGTNANDTDLEHVMITDEEEIRTTNPVATEQYGNVSNNLQNSNTGPTTENVNHQGALPGMVWQDRDVYLQGPIWAKIPHTDGHFHPSPLMGGFGLKHPPPQIMIKNTPVPANPPTNFSAAKFASFITQYSTGQVSVEIEWELQKENSKRWNPEIQYTSNYNKSVNVDFTVDANGVYSEPRPIGTRYLTRNL

SEQ ID NO: 2897 - protein, 735 aa, synthetic construct
  REGION 1..735: note = source = /note="Description of Artificial Sequence: Synthetic polypeptide"
MAADGYLPDWLEDTLSEGIRQWWKLKPGPPPPRPAERHQDDSRGLVLPGYKYLGPFNGLDKGEPVNEADAAALEHDKAYDRQLDSGDNPYLKYNHADAEFQERPKEDTSFGGNLGRAVFQAKKRVLEPLGLVEEPVKTAPGKKRPVEHSPAEPDSSSGTGKAGQQPARKRLNFGQTGDADSVPDPQPLGQPPAAPTSLGSTTMATGSGAPMADNNEGADGVGNSSGNWHCDSQWLGDRVITTSTRTWALPTYNNHLYKQISSQSGASNDNHYFGYSTPWGYFDFNRFHCHFSPRDWQRLINNNWGFRPKRLNFKLFNIQVKEVTQNDGTTTIANNLTSTVQVFTDSEYQLPYVLGSAHQGCLPPFPADVFMVPQYGYLTLNNGSQAVGRSSFYCLEYFPSQMLRTGNNFTFSYTFEDVPFHSSYAHSQSLDRLMNPLIDQYLYYLNRTQSNSGTLQQSRLLFSQAGPTSMSLQAKNWLPGPCYRQQRLSKQANDNNNSNFPWTAATKYHLNGRDSLVNPGPAMASHKDDEEKFFPMHGTLIFGKQGTNANDADLEHVMITDEEEIRTTNPVATEQYGNVSNNLQNSNTGPTTENVNHQGALPGMVWQDRDVYLQGPIWAKIPHTDGHFHPSPLMGGFGLKHPPPQIMIKNTPVPANPPTNFSAAKFASFITRYSTGQVSVEIEWELQKENSKRWNPEIQYTSNYNKSVNVDFTVDANGVYSEPRPIGTRYLTRNL

SEQ ID NO: 2898 - protein, 735 aa, synthetic construct
  REGION 1..735: note = source = /note="Description of Artificial Sequence: Synthetic polypeptide"
MAADGYLPDWLEDTLSEGIRQWWKLKPGPPPPKPAERHKDDSRGLVLPGYKYLGPFNGLDKGEPVNEADAAALEHDKAYDRQLDSGDNPYLKYNHADAELQERLKEDTSFGGNLGRAVFQAKKRVLEPLGLVEEPVKTAPGKKRPVEHSPVEPDSSSGTGKAGQQPARKRLNFGQTGDADSVPDPQPLGQPPAAPTSLGSTTMATGSGAPMADNNEGADGVGNSSGNWHCDSQWSGDRVITTSTRTWALPTYNNHLYKQISSQSGASNDNHYFGYSTPWGYFDFNRFHCHFSPRDWQRLINNNWGFRPKRLNFKLFNIQVKGVTQNDGTTTIANNLTSTVQVFTDSEYQLPYVLGSAHQGCLPPFPADVFMVPQYGYLTLNNGSQAVGRSSFYCLEYFPSQMLRTGNNFTFSYTFEDVPFHSSYAHSQSLDRLMNPLIDQYLYYLNKTQSNSGTLQQSRLLFSQAGPTSMSLQAKNWLPGPCYRQQRLSKQANDNNNSNFPWTAATKYHLNGRDSLVNPGPAMASHKDDEEKFFPMHGTLIFGKQGTNANDADLDNVMITDEEEIRTTNPVATEQYGTVSNNLQNSNTGPTTGTVNHQGALPGMVWQDRDVYLQGPIWAKIPHTDGHFHPSPLMGGFGLKHPPPQIMIKNTPVPANPPTNFSSAKFASFITQYSTGQVSVEIEWELQKENSKRWNPEIQYTSNYNKSVNVDFTVDTNGVYSEPRPIGTRYLTRNL

SEQ ID NO: 2899 - protein, 735 aa, synthetic construct
  REGION 1..735: note = source = /note="Description of Artificial Sequence: Synthetic polypeptide"
MAADGYLPDWLEDILSEGIRQWWKLKPGPPPPKPAERHKDDSRGLVLPGYKYLGPFNGLDKGEPVNEADAAALEHDKAYDRQLDSGDNPYLKYNHADAEFQERLKEDTSFGGNLGRAVFQAKKRVLEPLGLVEEPVKTAPGKKRPVEQSPAEPDSSSGTGKAGNQPARKRLNFGQTGDADSVPDPQPLGHPPAAPSGLGSTTMATGSGAPMADNNEGADGVGNSSGNWHCDSQWLGDRVITTSTRTWALPTYNNHLYKQISSQSGASNDNHYFGYSTPWGYFDFNRFHCHFSPRDWQRLINNNWGFRPKRLNFKLFNIQVKEVTQNDGTTTIANNLTSTVQVFTDSEYQLPYVLGSAHQGCLPPFPADVFMVPQYGYLTLNNGSQAVGRSSFYCLEYFPSQMLRTGNNFTFSYTFEDVPFHSSYAHSQSLDRLMNPLIDQYLYYLNKTQSNSGTLQQSRLLFSQAGPTSMSLQAKNWLPGPCYRQQRLSKQANDNNNSNFPWTAATKYHLNGRDSLVNPGPAMASHKDDEEKFFPMHGTLIFGKQGTNANDADLDNVMITDEEEIRTTNPVATEQYGTVSNNLQNSNTGPTTGTVNHQGALPGMVWQDRDVYLQGPIWAKIPHTDGHFHPSPLMGGFGLKHPPPQIMIKNTPVPANPPTNFSSAKFASFITQYSTGQVSVEIEWELQKENSKRWNPEIQYTSNYNKSVNVDFTVDTNGVYSEPRPIGTRYLTRNL

SEQ ID NO: 2900 - protein, 735 aa, synthetic construct
  REGION 1..735: note = source = /note="Description of Artificial Sequence: Synthetic polypeptide"
MAADGYLPDWLEDILSEGIRQWWKLKPGPPPPKPAERHKDDSRGLVLPGYKYLGPFNGLDKGEPVNEADAAALEHDKAYDRQLDSGDNPYLKYNHADAEFQERLKEDTSFGGNLGRAVFQAKKRVLEPLGLVEEPVKTAPGKKRPVEQSPAEPDSSSGTGKAGNQPARKRLNFGQTGDADSVPDPQPLGQPPAAPSGLGSTTMATGSGAPMADNNEGADGVGNSSGNWHCDSQWLGDRVITTSTRTWALPTYNNHLYKQISSQSGASNDNHYFGYSTPWGYFDFNRFHCHFSPRDWQRLINNNWGFRPKRLNFKLFNIQVKEVTQNDGTTTIANNLTSTVQVFTDSEYQLPYVLGSAHQGCLPPFPADVFMVPQYGYLTLNNGSQAVGRSSFYCLEYFPSQMLRTGNNFTFSYTFEDVPFHSSYAHSQSLDRLMNPLIDQYLYYLNKTQSNSGTLQQSRLLFSQAGPTSMSLQAKNWLPGPCYRQQRLSKQVNDNNNSNFPWTAATKYHLNGRDSLVNPGPAMASHKDDEEKFFPMHGTLIFGKQGTNANDADLDNVMITDEEEIRTTNPVATEQYGTVSNNLQNSNTGPTTGTVNHQGALPGMVWQDRDVYLQGPIWAKIPHTDGHFHPSPLMGGFGLKHPPPQIMIKNTPVPANPPTNFSSAKFASFITQYSTGQVSVEIEWELQKENSKRWNPEIQYTSNYNKSVNVDFTVDTNGVYSEPRPIGTRYLTRNL

SEQ ID NO: 2901 - protein, 735 aa, synthetic construct
  REGION 1..735: note = source = /note="Description of Artificial Sequence: Synthetic polypeptide"
MAADGYLPDWLEDILSEGIRQWWKLKPGPPPPKPAERHKDDSRGLVLPGYKYLGPFNGLDKGEPVNEADAAALEHDKAYDRQLDSGDNPYLKYNHADAEFQERLKEDTSFGGNLGRAVFQAKKRVLEPLGLVEEPVKTAPGKKRPVEQSPAEPDSSSGAGKAGNQPARKRLNFGQTGDADSVPDPQPLGQPPAAPSGLGSTTMATGSGAPMADNNEGADGVGNSSGNWHCDSQWLGDRVITTSTRTWALPTYNNHLYKQISSQSGASNDNHYFGYSTPWGYFDFNRFHCHFSPRDWQRLINNNWGFRPKRLNFKLFNIQVKEVTQNDGTTTIANNLTSTVQVFTDSEYQLPYVLGSAHQGCLPPFPADVFMVPQYGYLTLNNGSQAVGRSSFYCLEYFPSQMLRTGNNFTFSYTFEDVPFHSSYAHSQSLDRLMNPLIDQYLYYLTKTQSNSGTLQQSRLLFSQAGPTSMSLQAKNWLPGPCYRQQRLSKQANDNNNSNFPWTAATKYHLNGRDSLVNPGPAMASHKDDEEKFFPMHGTLIFGKQGTNANDADLDNVMITDEEEIRTTNPVATEQYGTVSNNLQNSNTGPTTGTVDHQGALPGMVWQDRDVYLQGPIWAKIPHTDGHFHPSPLMGGFGLKHPPPQIMIKNTPVPANPPTNFSSAKFASFITQYSTGQVSVEIEWELQKENSKRWNPEIQYTSNYNKSVNVDFTVDTNGVYSEPRPIGTRYLTRNL

SEQ ID NO: 2902 - protein, 735 aa, synthetic construct
  REGION 1..735: note = source = /note="Description of Artificial Sequence: Synthetic polypeptide"
MAADGYLPDWLEDILSEGIRQWWKLKPGPPPPKPAERHKDDSRGLVLPGYKYLGPFNGLDKGEPVNEADAAALEHDKAYDRQLDSGDNPYLKYNHADAEFQERLKEDTSFGGNLGRAVFQAKKRVLEPLGLVEEPVKTAPGKKRPVEQSPAEPDSSSGTGKAGNQPARKRLNFGQTGDADSVPDPQPLGQPPAAPSGLGSTTMATGSGAPMADNNEGADGVGNSSGNWHCDSQWLGDRVITTSTRTWALPTYNNHLYKQISSQSGASNDNHYFGYSTPWGYFDFNRFHCHFSPRDWQRLINNNWGFRPKRLNFKLFNIQVKEVTQNDGTTTIANNLTSTVQVFTDSEYQLPYVLGSAHQGCLPPFPADVFMVPQYGYLTLNNGSQAVGRSSFYCLEYFPSQMLRTGNNFTFSYTFEDVPFHSSYAHSQSLDRLMNPLIDQYLYYLNKTQSNSGTLQQSRLLLSQAGPTSMSLQAKNWLPGPCYRQQRLSKQANDNNNSNFPWTAATKYHLNGRDSLVNPGPAMASHKDDEEKFFPMHGTLIFGKQGTNANDADLDNVMITDEEEIRTTNPVATEQYGTVSNNLQNSNTGPTTGTVNHQGALPGMVWQDRDVYLQGPIWAKIPHTDGHFHPSPLMGGFGLKHPPPQIMIKNTPVPANPPTNFSSAKFASFITQYSTGQVSVEIEWELQKENSKRWNPEIQYTSNYNKSVNVDFTVDTNGVYSEPRPIGTRYLTRNL

SEQ ID NO: 2903 - protein, 735 aa, synthetic construct
  REGION 1..735: note = source = /note="Description of Artificial Sequence: Synthetic polypeptide"
MAADGYLPDWLEDTLSEGIRQWWKLKPGPPPPKPAERHKDDSRGLVLPGYKYLGPFNGLDKGEPVNEADAAALEHDKAYDRQLDSGDNPYLKYNHADAEFQERLKEDTSFGGNLGRAVFQAKKRVLEPLGLVEEPVKTAPGKKRPVEHSPVEPDSSSGTGKAGQQPARKRLNFGQTGDADSVPDPQPLGQPPAAPTSLGSTTMATGSGAPMADNNEGADGVDNSSGNWHCDSQWSGDRVITTSTRTWALPTYNNHLYKQISSQSGASNDNHYFGYSTPWGYFDFNRFHCHFSPRDWQRLINNNWGFRPKRLNFKLFNIQVKEVTQNDGTTTIANNLTSTVQVSTDSEYQLPYVLGSAHQGCLPPFPADVFMVPQYGYLTLNNGSQAVGRSSFYCLEYFPSQMLRTGNNFTFSYTFEDVPFHSSYAHSQSLDRLMNPLIDQYLYYLNKTQSNSGTLQQSRLLFSQAGPTSMSLQAKNWLPGPCYRQQRLSKQANDNNNSNFPWTAATKYHLNGRDSLVNPGPAMASHKDDEEKFFPMHGTLIFGKQGTNANDADLDNVMITDEEEIRTTNPVATEQYGTVSNNLQNSNTGPTTGTVNHQGALPGMVWQDRDVYLQGPIWAKIPHTDGHFHPSPLMGGFGLKHPPPQIMIKNTPVPANPPTNFSSAKFASFITQYSTGQVSVEIEWELQKENSKRWNPEIQYTSNYNKSVNVDFTVDTNGVYSEPRPIGTRYLTRNL

SEQ ID NO: 2904 - protein, 735 aa, synthetic construct
  REGION 1..735: note = source = /note="Description of Artificial Sequence: Synthetic polypeptide"
MAADGYLPDWLEDTLSEGIRQWWKLKPGPPPPKPAERHKDDSRGLVLPGYKYLGPFNGLDKGEPVNEADAAALEHDKAYDRQLDSGDNPYLKYNHADAEFQERLKEDTSFGGNLGRAVFQAKKRVLEPLGLVEEPVKTAPGKKRPVEHSPVEPDSSSGTGKAGQQPARKRLNFGQTGDADSVPDPQPLGQPPAAPTSLGSTTMATGSGAPMADNNEGADGVGNSSGNWHCDSQWSGDRVITTSTRTWALPTYNNHLYKQISSQSGASNDNHYFGYSTPWGYFDFNRFHCHFSPRDWQRLINNNWGFRPKRLNFKLFNIQVKEVTQNDGTTTIANNLTSTVQVFTDSEYQLPYVLGSAHQGCLPPFPADVFMVPQYGYLTLNNGSQAVGRSSFYCLEYFPSQMLRTGNNFTFSYTFEDVPFHSSYAHSQSLDRLMNPLIDQYLYYLNKTQSNSGTLQQSRLLFSQAGPTSMSLQAKNWLPGPCCRQQRLSKQANDNNNSNFPWTAATKYHLNGRDSLVNPGPAMASHKDDEEKFFPMHGTLIFGKQGTNANDADLDNVMITDEEEIRTTNPVATEQYGTVSNNLQNSNTGPTTGTVNHQGALPGMVWQDRDVYLQGPIWAKIPHTDGHFHPSPLMGGFGLKHPPPQIMIKNTPVPANPPTNFSSAKFASFITQYSTGQVSVEIEWELQKENSKRWNPEIQYTSNYNKSVNVDFTVDTNGVYSEPRPIGTRYLTRNL

SEQ ID NO: 2905 - protein, 735 aa, synthetic construct
  REGION 1..735: note = source = /note="Description of Artificial Sequence: Synthetic polypeptide"
MAADGYLPDWLEDILSEGIRQWWKLKPGPPPPKPAERHKDDSRGLVLPGYKYLGPFNGLDKGEPVNEADAAALEHDKAYDRQLDSGDNPYLKYNHADAEFQERLKEDTSFGGNLGRAVFQAKKRVLEPLGLVEEPVKTAPGKKRPVEQSPAEPDSSSGTGKAGNQPARKRLNFGQTGDADSVPDPQPLGQPPAAPSGLGSTTMATGSGAPMADNNEGADGVGNSSGNWHCDSQWLGDRVITTSTRTWALPTYNNHLYKQISSQSGASNDNHYFGYSTPWGYFDFNRFHCHFSPRDWQRLINNNWGFRPKRLNFKLFNIQVKEVTQNDGTTTIANNLTSTVQVFTDSEYQLPYVLGSAHQGCLPPFPADVFMVPQYGYLTLNNGSQAVGRSSFYCLEYFPSQMLRTGNNFTFSYTFEDVPFHSSYAHSQSLDRLMNPLIDQYLYYLNKTQSNSGTLQQSRLLFSQAGPTSMSLQAKNWLPGPCYRQQRLSKQANDNNNSNFPWTAATKYHLNGRDSLVNPGPAMASHKDDEEKFFPMHGTLIFGKQGTNANDADLDNVMITDEEEIRTTNPVATEQYGTVSNNLQNSNTGPTTGTVNHQGALPGMVWQDRDVYLQGPIWAKIPHTDGHFHPSPLMGGFGLKHPPPQIMIKNTPVPANPPTNFSSAKFASFITQYSTGQVSVEIERELQKENSKRWNPEIQYTSNYNKSVNVDFTVDTNGVYSEPRPIGTRYLTRNL

SEQ ID NO: 2906 - protein, 735 aa, synthetic construct
  REGION 1..735: note = source = /note="Description of Artificial Sequence: Synthetic polypeptide"
MAADGYLPDWLEDILSEGVRQWWKLKPGPPPPKPAERHKDDSRGLVLPGYKYLGPFNGLDKGEPVNEADAAALEHDKAYDRQLDSGDNPYLKYNHADAEFQERLKEDTSFGGNLGRAVFQAKKRVLEPLGLVEEPVKTAPGKKRPVEQSPAEPDSSSGTGKAGNQPARKRLNFGQTGDADSVPDPQPLGQPPAAPSGLGSTTMATGSGAPMADNNEGADGVGNSSGNWHCDSQWLGDRVITTSTRTWALPTYNNHLYKQISSQSGASNDNHYFGYSTPWGYFDFNRFHCHFSPRDWQRLINNNWGFRPKRLNFKLFNIQVKEVTQNDGTTTIANNLTSTVQVFTDSEYQLPYVLGSAHQGCLPPFPADVFMVPQYGYLTLNNGSQAVGRSSFYCLEYFPSQMLRTGNNFTFSYTFEDVPFHSSYAHSQSLDRLMNPLIDQYLYYLNKTQSNSGTLQQSRLLFSQAGPTSMSLQAKNWLPGPCYRQQRLSKQANDNNNSNFPWTAATKYHLNGRDSLVNPGPAMASHKDDEEKFFPMHGTLIFGKQGTNANDADLDNVMITDEEEIRTTNPVATEQYGTVSNNLQNSNTGPTTGTVNHQGALPGMVWQDRDVYLQGPIWAKIPHTDGHFHPSPLMGGFGLKHPPPQIMIKNTPVPANPPTNFSSAKFASFITQYSTGQVSVEIEWELQKENSKRWNPEIQYTSNYNKSVNVDFTVDTNGVYSEPRPIGTRYLTRNL

SEQ ID NO: 2907 - protein, 735 aa, synthetic construct
  REGION 1..735: note = source = /note="Description of Artificial Sequence: Synthetic polypeptide"
MAADGYLPDWLEDTLSEGIRQWWKLKPGPPPPKPAERHKDDSRGLVLPGYKYLGPFNGLDKGEPVNEADAAALEHDKAYDRQLDSGDNPYLKYNHADAEFQERLKEDTSFGGNLGRAVFQAKKRVLEPLGLVEEPVKTAPGKKRPVEHSPVEPDSSSGTGKAGQQPARKRLNFGQTGDADSVPDPQPLGQPPAAPTSLGSTTMATGSGAPMADNNEGADGVGNSSGNWHCDSQWSGDRVITTSTRTWALPTYNNHLYKQISSQSGASNDNHYFGYSTPWGYFDFNRFHCHFSPRDWQRLINNNWGFRPKRLNFKLFNIQVKEVTQNDGTTTIANNLTSTVQVSTDSEYQLPYVLGSAHQGCLPPFPADVFMVPQYGYLTLNNGSQAVGRSSFYCLEYFPSQMLRTGNNFTFSYTFEDVPFHSSYAHSQSLDRLMNPLIDQYLYYLNKTQSNSGTLQQSRLLFSQAGPTSMSLQAKNWLPGPCYRQQRLSKQANDNNNSNFPWTAATKYHLNGRDSLVNPGPAMASHKDDEEKFFPMHGTLIFGKQGTNANDADLDNVMITDEEEIRTTNPVATEQYGTVSNNLQNSNTGPTTGTVNHQGALPGMVWQDRDVYLQGPIWAKIPHTDGHFHPSPLMGGFGLKHPPPQIMIKNTPVPANPPTNFSSAKFASFITQYSTGQVSVEIEWELQKENSKRWNPEIQYTSNYNKSVNVDFTVDTNGVYSEPRPIGTRYLTRNL

SEQ ID NO: 2908 - protein, 735 aa, synthetic construct
  REGION 1..735: note = source = /note="Description of Artificial Sequence: Synthetic polypeptide"
MAADGYLPDWLEDILSEGIRQWWKLKPGPPPPKPAERHKDDSRGLVLPGYKYLGPFNGLDKGEPVNEADAAALEHDKAYDRQLDSGDNPYLKYNHADAEFQERLKEDTSFGGNLGRAVFQAKKRVLEPLGLVEEPVKTAPGKKRPVEQSPAEPDSSSGTGKAGNQPARKRLNFGQTGDADSVPDPQPLGQPPAAPSGLGSTTMATGSGAPMADNNEGADGVGNSSGNWHCDSQWLGDRVITTSTRTWALPTYNNHLYKQISSQSGASNDNHYFGYSTPWGYFDFNRFHCHFSPRDWQRLINNNWGFRPKRLNFKLFNIQVKEVTQNDGTTTIANNLTSTVQVFTDSEYQLPYVLGSAHQGCLPPFPADVFMVPQYGYLTLNNGSQAVGRSSFYCLEYFPSQMLRTGNNFTFSYTFEDVPFHSSYAHSQSLDRLMNPLIDQYLYYLNKTQSNSGTLQQSRLLFSQAGPTSMSLQAKNWLPGPCYRQQRLSKQANDNNNSNFPWTAATKYHLNGRDSLVNPGPAMASHKDDEEKFFPMHGTLIFGKQGTNANDADLDNVMITDEEEIRTTNPVATEQYGTVSNNLQNSNTGPTTGTVNHQGALPGMVWQDRDVYLQGPIWAKIPHTDGHFHPSPLMGGFGLKHPPPQIMIKNTPVPVNPPTNFSSAKFASFITQYSTGQVSVEIEWELQKENSKRWNPEIQYTSNYNKSVNVDFTVDTNGVYSEPRPIGTRYLTRNL

SEQ ID NO: 2909 - protein, 735 aa, synthetic construct
  REGION 1..735: note = source = /note="Description of Artificial Sequence: Synthetic polypeptide"
MAADGYLPDWLEDTLSEGIRQWWKLKPGPPPPKPAERHKDDSRGLVLPGYKYLGPFNGLDKGEPVNEADAAALEHDKAYDRQLDSGDNPYLKYNHADAEFQERLKEDTSFGGNLARAVFQAKKRVLEPLGLVEEPVKTAPGKKRPVEHSPAEPDSSSGTGKSGQQPARKRLNFGQTGDADSVPDPQPLGQPPAAPSGLGSTTMATGSGAPMADNNEGADGVGNSSGNWHCDSQWLGDRVITTSTRTWALPTYNNHLYKQISSQSGASNDNHYFGYSTPWGYFDFNRFHCHFSPRDWQRLINNNWGFRPKRLNFKLFNIQVKEVTQNDGTTTIANNLTSTVQVFTDSEYQLPYVLGSAHQGCLPPFPADVFMVPQYGYLTLNNGSQAVGRSSFYCLEYFPSQMLRTGNNFTFSYTFEDVPFHSSYAHSQSLDRLMNPLIDQYLYYLNKTQSNSGTLQQSRLLFSQAGPTSMSLQAKNWLPGPCYRQQRLSKQANDNNNSNFPWTAATKYHLNGRDSLVNPGPAMASHKDDEEKFFPMHGTLIFGKQGTNANDADLDNVMITDEEEIRTTNPVATEQYGTVSNNLQNSNTGPTTGTVNHQGALPGMVWQDRDVYLQGPIWAKIPHTDGHFHPSPLMGGFGLKHPPPQIMIKNTPVPANPPTNFSSAKFASFITQYSTGQVSVEIEWELQKENSKRWNPEIQYTSNYNKSVNVDFTVDTNGVYSEPRPIGTRYLTRNL

SEQ ID NO: 2910 - protein, 735 aa, synthetic construct
  REGION 1..735: note = source = /note="Description of Artificial Sequence: Synthetic polypeptide"
MAADGYLPDWLEDILSEGIRQWWKLKPGPPPPKPAERHKDDSRGLVLPGYKYLGPFNGLDKGEPVNEADAAALEHDKAYDRQLDSGDNPYLKYNHADAEFQERLKEDTSFGGNLGRAVFQAKKRVLEPLGLVEEPVKTAPGKKRPVEQSPAEPDSSSGTGKAGNQPARKRLNFGQTGDADSVPDPQPLGQPPAAPSGLGSTTMATGSGAPMADNNEGADGVGNSSGNWHCDSQWLGDRVITTSTRTWALPTYNNHLYKQISSQSGASNDNHYFGYSTPWGYFDFNRFHCHFSPRDWQRLINNNWGFRPKRLNFKLFNIQVKEVTQNDGTTTIANNLTSTVQVFTDSEYQLPYVLGSAHQGCLPPFPADVFMVPQYGYLTLNNGSQAVGRSSFYCLEYFPSQMLRTGNNFTFSYTFEDVPFHSSYAHSQSLDRLMNPLIDQYLYYLNKTQSNSGTLQQSRLLFSQAGPTSMSLQAKNWLPGPCYRQQRLSKQANDNNNSNFPWTAATKYHLNGRDSLVNPGPAMASHKDDEEKFFPMHGTLIFGKQGTNANDADLDNVMITDEEEIRTTNPVATEQYGTVSNNLQNSNTGPTTGTVNHQGALPGMVWQDRDVYLQGPIWAKIPHTDGHFHPSPLMGGFGLKHPPPQIMIKNTPVPANPPTNFSSAKFASFITQYSTGQVSVGIEWELQKENSKRWNPEIQYTSNYNKSVNVDFTVDTNGVYSEPRPIGTRYLTRNL

SEQ ID NO: 2911 - protein, 734 aa, synthetic construct
  REGION 1..734: note = source = /note="Description of Artificial Sequence: Synthetic polypeptide"
MAADGYLPDWLEDILSEGIRQWWKLKPGPPPPKPAERHKDDSRGLVLPGYKYLGPFNGLDKGEPVNEADAAALEHDKAYDRQLDSGDNPYLKYNHADAEFQERLKEDTSFGGNLGRAVFQAKKRVLEPLGLVEEPVKTAPGKKRPVEQSPAEPDSSSGTGKAGNQPARKRLNFGQTGDADSVPDPQPLGQPPAAPSGLGSTTMATGSGAPMADNNEGADGVGNSSGNWHCDSQWLGDRVITTSTRTWALPTYNNHLYKQISSQSGASNDNHYFGYSTPWGYFDFNRFHCHFSPRDWQRLINNNWGFRPKRLNFKLFNIQVKEVTQNDGTTTIANNLTSTVQVFTDSEYQLPYVLGSAHQGCLPPFPADVFMVPQYGYLTLNNGSQAVGRSSFYCLEYFPSQMLRTGNNFTFSYTFEDVPFHSSYAHSQSLDRLMNPLIDQYLYYLNKTQSNSGTLQQSRLLFSQAGPTSMSLQAKNWLPGPCYRQQRLSKQANDNNSNFPWTAATKYHLNGRDSLVNPGPAMASHKDDEEKFFPMHGTLIFGKQGTNANDADLDNVMITDEEEIRTTNPVATEQYGTVSNNLQNSNTGPTTGTVNHQGALPGMVWQDRDVYLQGPIWAKIPHTDGHFHPSPLMGGFGLKHPPPQIMIKNTPVPANPPTNFSSAKFASFITQYSTGQVSVEIEWELQKENSKRWNPEIQYTSNYNKSVNVDFTVDTNGVYSEPRPIGTRYLTRNL

SEQ ID NO: 2912 - protein, 735 aa, synthetic construct
  REGION 1..735: note = source = /note="Description of Artificial Sequence: Synthetic polypeptide"
MAADGYLPDWLEDTLSEGIRQWWKLKPGPPPPKPAERHKDDSRGLVLPGYKYLGPFNGLDKGEPVNEADAAALEHDKAYDRQLDSGDNPYLKYNHADAEFQERLKEDTSFGGNLGRAVFQAKKRVLEPLGLVVEPVKTAPGKKRPVEHSPVEPDSSSGTGKAGQQPARKRLNFDQTGGADSVPDPQPLGQPPAAPTSLGSTTMATGSGAPMADNNEGADGVGNSSGNWHCDSQWSGDRVITTSTRTWALPTYNNHLYKQISSRSGASNDNHYFGYSTPWGYFDFNGFHCHFSPRDWQRLINNNWGFRPKRLNFKLFNIQVKEVTQNDGTTTIANNLTSTVQVFTDSEYQLPHVLGSAHQGCLPPFPADVFMVPQYGYLTLNNGSQAVGRSSFYCPGYFPSQMLRTGNNFTFSYTFEDVPFHSSYAHSQSLDRLMNPLIDQYLYYLNKTQSNSGTLQQSRLLFSQAGPTSMSLQAKNWLPGPCYRQQRLSKQANGNNNSNFPWTAATKYHLNGRDSLVNPGPAMASHKDDEEKFFPMHGTLIFGKQGTNANDADLDNVMITDEEEIRTTNPVATEQYGTVSNNLQNSNTGPTTGTVNHQGALPGMVWQDRDVYLQGPIWAKIPHTDGHFHPSPLMGGFGLKHPPPQIMIKNTPVPANPPTNFSSAKFASFITQYSTGQVSVEIEWELQKENSKRWNPEIQYTSNYNKSVNVDFTVDTNGVYSEPRPIGTRYLTRNL

SEQ ID NO: 2913 - protein, 734 aa, synthetic construct
  REGION 1..734: note = source = /note="Description of Artificial Sequence: Synthetic polypeptide"
MAADGYLPDWLEDTLSEGIRQWWKLKPGPPPPKPAERHKDDSRGLVLPGYKYLGPFNGLDKGEPVNEADAAALEHDKAYDRQLDSGDNPYLKYNHADAEFQERLKEDTSFGGNLGRAVFQAKKRVLEPLGLVEEPVKTAPGKKRPVEHSPVEPDSSSGTGKAGQQPARKRLNFGQTGDADSVPDPQPLGQPPAAPTSLGSTTMATGSGAPMADNNEGADGVGNSSGNWHCDSQWSGDRVITTSTRTWALPTYNNHLYKQISSQSGASNDNHYFGYSTPWGYFDFNRFHCHFSPRDWQRLINNNWGFRPKRLNFKLFNIQVKEVTQNDGTTTIANNLTSTVQVFTDSEYQLPYVLGSAHQGCLPPFPADVFMVPQYGYLTLNNGSQAVGRSSFYCLEYFPSQMLRTGNNFTFSYTFEDVPFHSSYAHSQSLDRLMNPLIDQYLYYLNKTQSNSGTLQQSRLLFSQAGPTSMSLQAKNWLPGPCYRQQRLSKQANDNNSNFPWTAATKYHLNGRDSLVNPGPAMASHKDDEEKFFPMHGTLIFGKQGTNANDADLDNVMITDEEEIRTTNPVATEQYGTVSNNLQNSNTGPTTGTVNHQGALPGMVWQDRDVYLQGPIWAKIPHTDGHFHPSPLMGGFGLKHPPPQIMIKNTPVPANPPTNFSSAKFASFITQYSTGQVSVEIEWELQKENSKRWNPEIQYTSNYNKSVNVDFTVDTNGVYSEPRPIGTRYLTRNL

SEQ ID NO: 2914 - protein, 735 aa, synthetic construct
  REGION 1..735: note = source = /note="Description of Artificial Sequence: Synthetic polypeptide"
MAADGYLPDWLEDILSEGIRQWWKLKPGPPPPKPAERHKDDSRGLVLPGYKYLGPFNGLDKGEPVNEADAAALEHDKAYDRQLDSGDNPYLKYNHADAEFQERLKEDTSFGGNLGRAVFQAKKRVLEPLGLVEEPVKTAPGKKRPVEQSPAEPDSSSGTGKAGNQPARKRLNFGQTGDADSVPDPQPLGQPPAAPSGLGSTTMATGSGAPMADNNEGADGVGNSSGNWHCDSQWLGDRVITTSTRTWALPTYNNHLYKQISSQSGASNDNHYFGYSTPWGYFDFNRFHCHFSPRDWQRLINNNWGFRPKRLNFKLFNIQVKEVTQNDGTTTIANNLTSTVQVFTDSEYQLPYVLGSAHQGCLPPFPADVFMVPQYGYLTLNNGSQAVGRSSFYCLEYFPSQMLRTGNNFTFSYTFEDVPFHSSYAHSQSLDRLMNPLIDQYLYYLNKTQSNSGTLQQSRLLFSQAGPTSMSLQAKNWLPGPCYRQQRLSKQANDNNNSNFPWTAATKYHLNGRDSLVNPGPAMASHKDDEEKFFPMHGTLIFGKQGTNANDADLDNVMITDEEEIRTTNPVATEQYGTVSNNLQNSNTGPTTGTVNHQGALPGMVWQDRDVYLQGPIWAKIPHTDGHFHPSPLMGGFGLKHPPPQIMIKNTPVPANPPTNFSSAKFASFITQYSTGQVSVGIEWVLQKENSKRWNPEIQYTSNYNKSVNVDFTVDTNGVYSEPRPIGTRYLTRNL

SEQ ID NO: 2915 - protein, 735 aa, synthetic construct
  REGION 1..735: note = source = /note="Description of Artificial Sequence: Synthetic polypeptide"
MAADGYLPDWLEDTLSEGIRQWWKLKPGPPPPKPAERHKDDSRGLVLPGYKYLGPFNGLDKGEPVNEADAAALEHDKAYDRQLDSGDNPYLKYNHADAEFQERLKEDTSFGGNLARAVFQAKKRVLEPLGLVEEPVKTAPGKKRPVEQSPAEPDSSSGTGKAGNQPARKRLNFGQTGDADSVPDPQPLGQPPAAPSGLGSTTMATGSGAPMADNNEGADGVGNSSGNWHCDSQWLGDRVITTSTRTWALPTYNNHLYKQISSQSGASNDNHYFGYSTPWGYFDFNRFHCHFSPRDWQRLINNNWGFRPKRLNFKLFNIQVKEVTQNDGTTTIANNLTSTVQVFTDSEYQLPYVLGSAHQGCLPPFPADVFMVPQYGYLTLNNGSQAVGRSSFYCLEYFPSQMLRTGNNFTFSYTFEDVPFHSSYAHSQSLDRLMNPLIDQYLYYLNKTQSNSGTLQQSRLLFSQAGPTSMSLQAKNWLPGPCYRQQRLSKQANDNNNSNFPWTAATKYHLNGRDSLVNPGPAMASHKDDEEKFFPMHGTLIFGKQGTNANDADLDNVMITDEEEIRTTNPVATEQYGTVSNNLQNSNTGPTTGTVNHQGALPGMVWQDRDVYLQGPIWAKIPHTDGHFHPSPLMGGFGLKHPPPQIMIKNTPVPANPPTNFSSAKFASFITQYSTGQVSVEIEWELQKENSKRWNPEIQYTSNYNKSVNVDFTVDTNGVYSEPRPIGTRYLTRNL

SEQ ID NO: 2916 - protein, 735 aa, synthetic construct
  REGION 1..735: note = source = /note="Description of Artificial Sequence: Synthetic polypeptide"
MAADGYLPDWLEDILSEGIRQWWKLKPGPPPPKPAERHKDDSRGLVLPGYKYLGPFNGLDKGEPVNEADAAALEHDKAYDRQLDSGDNPYLKYNHADAEFQERLKEDTSFGGNLGRAVFQAKKRVLEPLGLVEEPVKTAPGKKRPVEQSPAEPDSSSGAGKAGNQPARKRLNFGQTGDADSVPDPQPLGQPPAAPSGLGSTTMATGSGAPMADNNEGADGVGNSSGNWHCDSQWLGDRVITTSTRTWALPTYNNHLYKQISSQSGASNDNHYFGYSTPWGYFDFNRFHCHFSPRDWQRLINNNWGFRPKRLNFKLFNIQVKEVTQNDGTTTIANNLTSTVQVFTDSEYQLPYVLGSAHQGCLPPFPADVFMVPQYGYLTLNNGSQAVGRSSFYCLEYFPSQMLRTGNNFTFSYTFEDVPFHSSYAHSQSLDRLMNPLIDQYLYYLNKTQSNSGTLQQSRLLFSQAGPTSMSLQAKNWLPGPCYRQQRLSKQANDNNNSNFPWTAATKYHLNGRDSLVNPGPAMASHKDDEEKFFPMHGTLIFGKQGTNANDADLDNVMITDEEEIRTTNPVATEQYGTVSNNLQNSNTGPTTGTVNHQGALPGMVWQDRDVYLQGPIWAKIPHTDGHFHPSPLMGGFGLKHPPPQIMIKNTPVPANPPTNFSSAKFASFITQYSTGQVSVEIEWELQKENSKRWNPEIQYTSNYNKSVNVDFTVDTNGVYSEPRPIGTRYLTRNL

SEQ ID NO: 2917 - protein, 735 aa, synthetic construct
  REGION 1..735: note = source = /note="Description of Artificial Sequence: Synthetic polypeptide"
MAADGYLPDWLKDILSEGIRQWWKLKPGPPPPKPAERHKDDSRGLVLPGYKYLGPFNGLDKGEPVNEADAAALEHDKAYDRQLDSGDNPYLKYNHADAEFQERLKEDTSFGGNLGRAVFQAKKRVLEPLGLVEEPVKTAPGKKRPVEQSPAEPDSSSGTGKAGNQPARKRLNFGQTGDADSVPDPQPLGQPPAAPSGLGSTTMATGSGAPMADNNEGADGVGNSSGNWHRDSQWLGDRVITTSTRTWALPTYNNHLYKQISSQSGASNDNHYFGYSTPWGYFDFNRFHCHFSPRDWQRLINNNWGFRPKRLNFKLFNIQVKEVTQNDGTTTIANNLTSTVQVFTDSEYQLPYVLGSAHQGCLPPFPADVFMVPQYGYLTLNNGSQAVGRSSFYCLEYFPSQMLRTGNNFTFSYTFEDVPFHSSYAHSQSLDRLMNPLIDQYLYYLNKTQSNSGTLQQSRLLFSQAGPTSMSLQAKNWLPGPCYRQQRLSKQANDNNNSNFPWTAATKYHLNGRDSLVNPGPAMASHKDDEEKFFPMHGTLIFGKQGTNANDADLDNVMITDEEEIRTTNPVATEQYGTVSNNLQNSNTGPTTGTVNHQGALPGMVWQDRDVYLQGPIWAKIPHTDGHFHPSPLMGGFGLKHPPPQIMIKNTPVPVNPPTNFSSAKFASFITQYSTGQVSVEIEWELQKENSKRWNPEIQYTSNYNKSVNVDFTVDTNGVYSEPRPIGTRYLTRNL

SEQ ID NO: 2918 - protein, 735 aa, synthetic construct
  REGION 1..735: note = source = /note="Description of Artificial Sequence: Synthetic polypeptide"
MAADGYLPDWLEDILSEGIRRWWKLKPGPPPPKPAERHKDDSRGLVLPGYKYLGPFNGLDKGEPVNEADAAALEHDKAYDRQLDSGDNPYLKYNHADAEFQERLKEDTSFGGNLGRAVFQAKKRVLEPLGLVEEPVKTAPGKKRPVEQSPAEPDSSSGTGKAGNQPARKRLNFGQTGDADSVPDPQPLGQPPAAPSGLGSTTMATGSGAPMADNNEGADGVGNSSGNWHCDSQWLGDRVITTSTRTWALPTYNNHLYKQISSQSGASNDNHYFGYSTPWGYFDFNRFHCHFSPRDWQRLINNNWGFRPKRLNFKLFNIQVKEVTQNDGTTTIANNLTSTVQVFTDSEYQLPYVLGSAHQGCLPPFPADVFMVPQYGYLTLNNGSQAVGRSSFYCLEYFPSQMLRTGNNFTFSYTFEDVPFHSSYAHSQSLDRLMNPLIDQYLYYLNKTQSNSGTLQQSRLLFSQAGPTSMSLQAKNWLPGPCYRQQRLSKQANDNNNSNFPWTAATKYHLNGRDSLVNPGPAMASHKDDEEKFFPMHGTLIFGKQGTNANDADLDNVMITDEEEIRTTNPVATERYGTVSNNLQNSNTGPTTGTVNHQGALPGMVWQDRDVYLQGPIWAKIPHTDGHFHPSPLMGGFGLKHPPPQIMIKNTPVPANPPTNFSSAKFASFITQYSTGQVSVEIEWELQKENSKRWNPEIQYTSNYNKSVNVDFTVDTNGVYSEPRPIGTRYLTRNL

SEQ ID NO: 2919 - protein, 735 aa, synthetic construct
  REGION 1..735: note = source = /note="Description of Artificial Sequence: Synthetic polypeptide"
MAADGYLPDWLEDTLSEGIRQWWKLKPGPPPPKPAERHKDDSRGLVLPGYKYLGPFNGLDKGEPVNEADAAALEHDKAYDRQLDSGDNPYLKYNHADAEFQERLKEDTSFGGNLARAVFQAKKRVLEPLGLVEEPVKTAPGKKRPVEHSPAEPDSSSGTGKSGQQPARKRLNFGQTGDADSVPDPQPLGQPPAAPSGLGTNTMASGSGAPMADNNEGADGVGNSSGNWHCDSQWLGDRVITTSTRTWALPTYNNHLYKQISSQSGASNDNHYFGYSTPWGYFDFNRFHCHFSPRDWQRLINNNWGFRPKRLNFKLFNIQVKEVTQNDGTTTIANNLTSTVQVFTDSEYQLPYVLGSAHQGCLPPFPADVFMVPQYGYLTLNNGSQAVGRSSFYCLEYFPSQMLRTGNNFTFSYTFEDVPFHSSYAHSQSLDRLMNPLIDQYLYYLNKTQSNSGTLQQSRLLFSQAGPTSMSLQAKNWLPGPCYRQQRLSKQANDNNNSNFPWTAATKYHLNGRDSLVNPGPAMASHKDDEEKFFPMHGTLIFGKQGTNANDADLDNVMITDEEEIRTTNPVATEQYGTVSNNLQNSNTGPTTGTVNHQGALPGMVWQDRDVYLQGPIWAKIPHTDGHFHPSPLMGGFGLKHPPPQIMIKNTPVPANPPTNFSSAKFASFITQYSTGQVSVEIEWELQKENSKRWNPEIQYTSNYNKSVNVDFTVDTNGVYSEPRPIGTRYLTRNL

SEQ ID NO: 2920 - protein, 735 aa, synthetic construct
  REGION 1..735: note = source = /note="Description of Artificial Sequence: Synthetic polypeptide"
MAADGYLPDWLEDTLSEGIRQWWKLKPGPPPPKPAERHKDDSRGLVLPGYKYLGPFNGLDKGEPVNEADAAALEHDKAYDRQLDSGDNPYLKYNHADAEFQERLKEDTSFGGNLARAVFQAKKRVLEPLGLVEEPVKTAPGKKRPVEHSPAEPDSSSGTGKSGQQPARKRLNFGQTGDADSVPDPQPLGQPPAAPSGLGTNTMASGSGAPMADNNEGADGVGNSSGNWHCDSTWMGDRVITTSTRTWALPTYNNHLYKQISSQSGASNDNHYFGYSTPLGYFDFNRFHCHFSPRDWQRLINNNWGFRPKRLNFKLFNIQVKEVTQNDGTTTIANNLTSTVQVFTDSEYQLPYVLGSAHQGCLPPFPADVFMVPQYGYLTLNNGSQAVGRSSFYCLEYFPSQMLRTGNNFTFSYTFEDVPFHSSYAHSQSLDRLMNPLIDQYLYYLNKTQSNSGTLQQSRLLFSQAGPTSMSLQAKNWLPGPCYRQQRLSKQANDNNNSNFPWTAATKYHLNGRDSLVNPGPAMASHKDDEEKFFPMHGTLIFGKQGTNANDADLDNVMITDEEEIRTTNPVATEQYGTVSNNLQNSNTGPTTGTVNHQGALPGMVWQDRDVYLQGPIWAKIPHTDGHFHPSPLMGGFGLKHPPPQIMIKNTPVPANPPTNFSSAKFASFITQYSTGQVSVEIEWELQKENSKRWNPEIQYTSNYNKSVNVDFTVDTNGVYSEPRPIGTRYLTRNL

SEQ ID NO: 2921 - protein, 735 aa, synthetic construct
  REGION 1..735: note = source = /note="Description of Artificial Sequence: Synthetic polypeptide"
MAADGYLPDWLEDTLSEGIRQWWKLKPGPPPPKPAERHKDDSRGLVLPGYKYLGPFNGLDKGEPVNEADAAALEHDKAYDRQLDSGDNPYLKYNHADAEFQERLKEDTSFGGNLARAVFQAKKRVLEPLGLVEEPVKTAPGKKRPVEHSPAEPDSSSGTGKSGQQPARKRLNFGQTGDADSVPDPQPLGQPPAAPSGLGTNTMASGSGAPMADNNEGADGVGNSSGNWHCDSTWMGDRVITTSTRTWALPTYNNHLYKQISSQSGASNDNHYFGYSTPWGYFDFNRFHCHFSPRDWQRLINNNWGFRPKRLNFKLFNIQVKEVTQNDGTTTIANNLTSTVQVFTDSEYQLPYVLGSAHQGCLPPFPADVFMVPQYGYLTLNNGSQAVGRSSFYCLEYFPSQMLRTGNNFTFSYTFEDVPFHSSYAHSQSLDRLMNPLIDQYLYYLNKTQSNSGTLQQSRLLFSQAGPTSMSLQAKNWLPGPCYRQQRLSKQANDNNNSNFPWTAATKYHLNGRDSLVNPGPAMASHKDDEEKFFPMHGTLIFGKQGTNANDADLDNVMITDEEEIRTTNPVATEQYGTVSNNLQNSNTGPTTGTVNHQGALPGMVWQDRDVYLQGPIWAKIPHTDGHFHPSPLMGGFGLKHPPPQIMIKNTPVPANPPTNFSSAKFASFITQYSTGQVSVEIEWELQKENSKRWNPEIQYTSNYNKSVNVDFTVDTNGVYSEPRPIGTRYLTRNL

SEQ ID NO: 2922 - protein, 735 aa, synthetic construct
  REGION 1..735: note = source = /note="Description of Artificial Sequence: Synthetic polypeptide"
MAADGYLPDWLEDTLSEGIRQWWKLKPGPPPPKPAERHKDDSRGLVLPGYKYLGPFNGLDKGEPVNEADAAALEHDKAYDRQLDSGDNPYLKYNHADAEFQERLKEDTSFGGNLGRAVFQAKKRVLEPLGLVVEPVKTAPGKKRPVEHSPVEPDSSSGTGKAGQQPARKRLNFDQTGDADSVPDPQPLGQPPAAPTSLGSTTMATGSGAPMADNNEGADGVGNSSGNWHCDSQWSGDRVITTSTRTWALPTYNNHLYKQISSRSGASNDNHYFGYSTPWGYFDFNGFHCHFSPRDWQRLINNNWGFRPKRLNFKLFNIQVKEVTQNDGTTTIANNLTSTVQVFTDSEYQLPHVLGSAHQGCLPPFPADVFMVPQYGYLTLNNGSQAVGRSSFYCPGYFPSQMLRTGNNFTFSYTFEDVPFHSSYAHSQSLDRLMNPLIDQYLYYLNKTQSNSGTLQQSRLLFSQAGPTSMSLQAKNWLPGPCYRQQRLSKQANGNNNSNFPWTAATKYHLNGRDSLVNPGPAMASHKDDEEKFFPMHGTLIFGKQGTNANDADLDNVMITDEEEIRTTNPVATEQYGTVSNNLQNSNTGPTTGTVNHQGALPGMVWQDRDVYLQGPIWAKIPHTDGHFHPSPLMGGFGLKHPPPQIMIKNTPVPANPPTNFSSAKFASFITQYSTGQVSVEIEWELQKENSKRWNPEIQYTSNYNKSVNVDFTVDTNGVYSEPRPIGTRYLTRNL

SEQ ID NO: 2923 - protein, 735 aa, synthetic construct
  REGION 1..735: note = source = /note="Description of Artificial Sequence: Synthetic polypeptide"
MAADGYLPDWLEDILSEGIRQWWKLKPGPPPPKPAERHKDDSRGLVLPGYKYLGPFNGLDKGEPVNEADAAALEHDKAYDRQLDSGDNPYLKYNHADAEFQGRLKEDTSFGGNLGRAVFQAKKRVLEPLGLVEEPVKTAPGKKRPVEQSPAEPDSSSGTGKAGNQPARKRLNFGQTGDADSVPDPQPLGQPPAAPSGLGSTTMATGSGAPMADNNEGADGVGNSSGNWHCDSQWLGDRVITTSTRTWALPTYNNHLYKQISSQSGASNDNHYFGYSTPWGYFDFNRFHCHFSPRDWQRLINNNWGFRPKRLNFKLFNIQVKEVTQNDGTTTIANNLTSTVQVFTDSEYQLPYVLGSAHQGCLPPFPADVFMVPQYGYLTLNNGSQAVGRSSFYCLEYFPSQMLRTGNNFTFSYTFEDVPFHSSYAHSQSLDRLMNPLIDQYLYYLNKTQSNSGTLQQSRLLFSQAGPTSMSLQAKNWLPGPCYRQQRLSKQANDNNNSNFPWTAATKYHLNGRDSLVNPGPAMASHKDDEEKFFPMHGTLIFGKQGTNANDADLDNVMITDEEEIRTTNPVATEQYGTVSNNLQNSNTGPTTGTVNHQGALPGMVWQDRDVYLQGPIWAKIPHTDGHFHPSPLMGGFGLKHPPPQIMIKNTPVPANPPTNFSSAKFASFITQYSTGQVSVEIEWELQKENSKRWNPEIQYTSNYNKSVNVDFTVDTNGVYSEPRPIGTRYLTRNL

SEQ ID NO: 2924 - protein, 735 aa, synthetic construct
  REGION 1..735: note = source = /note="Description of Artificial Sequence: Synthetic polypeptide"
MAADGYLPDWLEDILSEGIRQWWKLKPGPPPPKPAERHKDDSRGLVLPGYKYLGPFNGLDKGEPVNEADAAALEHDKAYDRQLDSGDNPYLKYNHADAEFQERLKEDTSFGGNLGRAVFQAKKRALEPLGLVEEPVKTAPGKKRPVEQSPAEPDSSSGTGKAGNQPARKRSNFGQTGDADSVPDPQPLGQPPAAPSGLGSTTMATGSGAPMADNNEGADGVGNSSGNWHCDSQWLGDRVITTSTRTWALPTYNNHLYKQISSQSGASNDNHYFGYSTPWGYFDFNRFHCHFSPRDWQRLINNNWGFRPKRLNFKLFNIQVKEVTQNDGTTTIANNLTSTVQVFTDSEYQLPYVLGSAHQGCLPPFPADVFMVPQYGYLTLNNGSQAVGRSSFYCLEYFPSQMLRTGNNFTFSYTFEDVPFHSSYAHSQSLDRLMNPLIGQYLYYLNKTQSNSGTLQQSRLLFSQAGPTSMSLQAKNWLPGPCYRQQRLSKQANDNNNSNFPWTAATKYHLNGRDSLVNPGPAMASHKDDEEKFFPMHGTLIFGKQGTNANDADLDNVMITDEEEIRTTNPVATEQYGTVSNNLQNSNTGPTTGTVNHQGALPGMVWQDRDVYLQGPIWAKIPHTDGHFHPSPLMGGFGLKHPPPQIMIKNTPVPANPPTNFSSAKFASFITQYSTGQVSVEIEWELQKENSKRWNPEIQYTSNYNKSVNVDFTVDTNGVYSEPRPIGTRYLTRNL

SEQ ID NO: 2925 - protein, 738 aa, synthetic construct
  REGION 1..738: note = source = /note="Description of Artificial Sequence: Synthetic polypeptide"
MAADGYLPDWLEDNLSEGIREWWALKPGAPKPKANQQKQDDGRGLVLPGYKYLGPFNGLDKGEPVNAADAAALEHDKAYDQQLQAGDNPYLRYNHADAEFQERLQEDTSFGGNLGRAVFQAKKRVLEPLGLVEEGAKTAPGKERPVEPSPQRSPDSSTGIGKEGQQPARKRLNFGQTGDSESVPDPQPLGEPPAAPSGVGPNTMAAGGGAPMADNNEGADGVGSSSGNWHCDSTWLGDRVITTSTRTWALPTYNNHLYKQISNGTSGGATNDNTYFGYSTPWGYFDFNRFHCHFSPRDWQRLINNNWGFRPKRLSFKLFNIQVKEVTQNEGTKTTANNLTSTIQVFTDSEYQLPYVLGSAHQGCLPPFPADVFTIPQYGYLTLNNGSQAVGRSSFYCLEYFPSQMLRTGNNFQFTYTFEDVPFHSSYAHSQSLDRLMNPLIDQYLYYLSRIQTTGGTANTQTLGFSQGGPNTMANQAKNWLPGPCYRQQRVSTTTGQNNNSNFAWTAGTKYHLNGRNSLANPGIAMATHKDDEERFFPSNGILIFGKQNAARDNADYSDVMPTSEEEIKTTNPVATEEYGIVADNLQQQNTAPQIGTVNSQGALPGMVWQNRDVYLQGPIWAKIPHTDGNFHPSPLMGGFGLKHPPPQILIKNTPVPADPPTTFNQSKLNSFITQYSTGQVSVEIEWELQKENSKRWNPEIQYTSNYYKSTSVDFAVNTEGVYSEPRPIGTRYLTRNL

SEQ ID NO: 2926 - protein, 738 aa, synthetic construct
  REGION 1..738: note = source = /note="Description of Artificial Sequence: Synthetic polypeptide"
MAADGYLPDWLEDNLSEGIREWWALKPGAPKPKANQQKQDDGRGLVLPGYKYLGPFNGLDKGEPVNAADAAALEHDKAYDQQLQAGDNPYLRYNHADAEFQERLQEDTSFGGNLGRAVFQAKKRVLEPLGLVEEGAKTAPGKKRPVEPSPQRSPDSSTGIGKGGQQPARKRLNFGQTGDSESVPDPQPLGEPPAAPSGVGPNTMAAGGGAPMADNNEGADGVGSSSGNWHCDSTWLGDRVITTSTRTWALPTYNNHLYKQISNGTSGGATNDNTYFGYSTPWGYFDFNRFHCHFSPRDWQRLINNNWGFRPKRLSFKLFNIQVKEVTQNEGTKTIANNLTSTIQVFTDSEYQLPYVLGSAHQGCLPPFPADVFTIPQYGYLTLNNGSQAVGRSSFYCLEYFPSQMLRTGNNFQFTYTFEDVPFHSSYAHSQSLDRLMNPLIDQYLYYLSRIQTTGGTANTQTLGFSQGGPNTMANQAKNWLPGPCYRQQRVSTTTGQNNNSNFAWTAGTKYHLNGRNSLANPGIAMATHKDDEERFFPSNGILIFGKQNAARDNADYSDVMPTSEEEIKTTNPVATEEYGIVADNLQQQNTAPQIGTVNSQGALPGMVWQNRDVYLQGPIWAKIPHTDGNFHPSPLMGGFGLKHPPPQILIKNTPVPADPPTTFNQSKLNSFITQYSTGQVSVEIEWELQKENSKRWNPEIQYTSNYYKSTSVDFAVNTEGVYSEPRPIGTRYLTRNL

SEQ ID NO: 2927 - protein, 738 aa, synthetic construct
  REGION 1..738: note = source = /note="Description of Artificial Sequence: Synthetic polypeptide"
MAADGYLPDWLEDNLSEGIREWWALKPGAPKPKANQQKQDDGRGLVLPGYKYLGPFNGLDKGEPVNAADAAALEHDKAYDQQLQAGDNPYLRYNHADAEFQERLQEDTSFGGNLGRAVFQAKKRVLEPLGLVEEGAKTAPGKERPVEPSPQRSPDSSTGIGKKGQQPARKRLNFGQTGDSESVPDPQPLGEPPAAPSGVGPNTMAAGGGAPMADNNEGADGVGSSSGNWHCDSTWLGDRVITTSTRTWALPTYNNHLYKQISNGTSGGATNDNTYFGYSTPWGYFDFNRFHCHFSPRDWQRLINNNWGFRPKRLSFKLFNIQVKEVTQNEGTKTTANNLTSTIQVFTDSEYQLPYVLGSAHQGCLPPFPADVFTIPQYGYLTLNNGSQAVGRSSFYCLEYFPSQMLRTGNNFQFTYTFEDAPFHSSYAHSQSLDRLMNPLIDQYLYYLSRIQTTGGTANTQTLGFSQGGPNTMANQAKNWLPGPCYRQQRVSTTTGQNNNSNFAWTAGTKYHLNGRNSLANPGIAMATHKDDEERFFPSNGILIFGKQNAARDNADYSDVMPTSEEEIKTTNPVATEEYGIVADNLQQQNTAPQIGTVNSQGALPGMVWQNRDVYLQGPIWAKIPHTDGNFHPSPLMGGFGLKHPPPQILIKNTPVPADPPTTFNQSKLNSFITQYSTGQVSVEIEWELQKENSKRWNPEIQYTSNYYKSTSVDFAVNTEGVYSEPRPIGTRYLTRNL

SEQ ID NO: 2928 - protein, 738 aa, synthetic construct
  REGION 1..738: note = source = /note="Description of Artificial Sequence: Synthetic polypeptide"
MAADGYLPDWLEDNLSEGIREWWALKPGAPKPKANQQKQDDGRGLVLPGYKYLGPFNGLDKGEPVNAADAAALEHDKAYDQQLQAGDNPYLRYNHADAEFQERLQEDTSFGGNLGRAVFQAKKRVLEPLGLVEEGAKTAPGKKRPVEPSPQRSPDSSTGIGKEGQQPARKRLNFGQTGDSESVPDPQPLGEPPAAPSGVGPNTMAAGGGAPMADNNEGADGVGSSSGNWHCDSTWLGDRVITTSTRTWALPTYNNHLYKQISNGTSGGATNDNTYFGYSTPWGYFDFNRFHCHFSPRDWQRLINNNWGFRPKRLSFKLFNIQVKEVTQNEGTKTIANNLTSTIQVFTDSEYQLPYVLGSAHQGCLPPFPADVFTIPQYGYLTLNNGSQAVGRSSFYCLEYFPSQMLRTGNNFQFTYTFEDVPFHSSYAHSQSLDRLMNPLIDQYLYYLSRIQTTGGTANTQTLGFSQGGPNTMANQAKNWLPGPCYRQQRVSTTTGQNNNSNFAWTAGTKYHLNGRNSLANPGIAMATHKDDEERFFPSNGILIFGKQNAARDNADYSDVMPTSEEEIKTTNPVATEEYGIVADNLQQQNTAPQIGTVNSQGALPGMVWQNRDVYLQGPIWAKIPHTDGNFHPSPLMGGFGLKHPPPQILIKNTPVPADPPTTFNQSKLNSFITQYCTGQVSVEIEWELQKENSKRWNPEIQYTSNYYKSTSVDFAVNTEGVYSEPRPIGTRYLTRNL

SEQ ID NO: 2929 - protein, 738 aa, synthetic construct
  REGION 1..738: note = source = /note="Description of Artificial Sequence: Synthetic polypeptide"
MAADGYLPDWLEDNLSEGIREWWALKPGAPKPKANQQKQDDGRGLVLPGYKYLGPFNGLDKGEPVNAADAAALEHDKAYDQQLQAGDNPYLRYNHADAEFQERLQEDTSFGGNLGRAVFQAKKRVLEPLGLVEEGAKTAPGKKRPVEPSPQRSPDSSTGIGKEGQQPARKRLNFGQTGDSESVPDPQPLGEPPAAPSGVGPNTMAAGGGAPMADNNEGADGVGSSSGNWHCDSTWLGDRVITTSTRTWALPTYNNHLYKQISNGTSGGATNDNTYFGYSTPWGYFDFNRFHCHFSPRDWQRLINNNWGFRPKRLSFKLFNIQVKEVTQNEGTKTIANNLTSTIQVFTDSEYQLPYVLGSAHQGCLPPFPADVFTIPQYGYLTLNNGSQAVGRSSFYCLEYFPSQMLRTGNNFQFTYTFEDVPFHSSYAHSQSLDRLMNPLIDQYLYYLSRIQTTGGTANTQTLGFSQGGPNTMANQAKNWLPGPCYRQQRVSTTTGQNNNSNFAWTAGTKYHLNGRNSLANPGIAMATHKDDEERFFPSNGILIFGKQNAARDNADYSDVMPTSEEEIKTTNPVATEEYGIVADNLQQQNTAPQIGTVNSQGALPGMVWQNRDVYLQGPIWAKIPHTDGNFHPSPLMGGFGLKHPPPQILIKNTPVPADPPTTFNQSKLNSFITQYSTGQVSVEIEWELQKENSKRWNPEIQYTSNYYKSTSVDFAVNTEGVYSEPRPIGTRYLTRNL

SEQ ID NO: 2930 - protein, 738 aa, synthetic construct
  REGION 1..738: note = source = /note="Description of Artificial Sequence: Synthetic polypeptide"
MAADGYLPDWLEDNLSEGIREWWALKPGAPKPKANQQKQDDGRGLVLPGYKYLGPFNGLDKGEPVNAADAAALEHDKAYDQQLQAGDNPYLRYNHADAEFQERLQEDTSFGGNLGRAVFQAKKRVLEPLGLVEEGAKTAPGKERPVEPSPQRSPDSSTGIGKKGQQPARKRLNFGQTGDSESVPDPQPLGEPPAAPSGVGPNTMAAGGGAPMADNNEGADGVGSSSGNWHCDSTWLGDRVITTSTRTWALPTYNNHLYKQIPNGTSGGATNDNTYFGYSTPWGYFDFNRFHCHFSPRDWQRLINNNWGFRPKRLSFKLFNIQVKEVTQNEGTKTTANNLTSTIQVFTDSEYQLPYVLGSAHQGCLPPFPADVFTIPQYGYLTLNNGSQAVGRSSFYCLEYFPSQMLRTGNNFQFTYTFEDVPFHSSYAHSQSLDRLMNPLIDQYLYYLSRIQTTGGTANTQTLGFSQGGPNTMANQAKNWLPGPCYRQQRVSTTTGQNNNSNFAWTAGTKYHLNGRNSLANPGIAMATHKDDEERFFPSNGILIFGKQNAARDNADYSDVMPTSEEEIKTTNPVATEEYGIVADNLQQQNTAPQIGTVNSQGALPGMVWQNRDVYLQGPIWAKIPHTDGNFHPSPLMGGFGLKHPPPQILIKNTPVPADPPTTFNQSKLNSFITQYSTGQVSVEIEWELQKENSKRWNPEIQYTSNYYKSTSVDFAVNTEGVYSEPRPIGTRYLTRNL

SEQ ID NO: 2931 - protein, 738 aa, synthetic construct
  REGION 1..738: note = source = /note="Description of Artificial Sequence: Synthetic polypeptide"
MAADGYLPDWLEDNLSEGIREWWALKPGAPKPKANQQKQDDGRGLVLPGYKYLGPFNGLDKGEPVNAADAAALEHDKAYDQQLQAGDNPYLRYNHADAEFQERLQEDTSFGGNLGRAVFQAKKRVLEPLGLVEEGAKTAPGKKRPVEPSPQRSPDSSTGIGKEGQQPARKRLNFGQTGDSESVPDPQPLGEPPAAPSGVGPNTMAAGGGAPMADNNEGADGVGSSSGNWHCDSTWLGDRVITTSTRTWALPTYNNHLYKQISNGTSGGATNDNTYFGYSTPWGYFDFNRFHCHFSPRDWQRLINNNWGFRPKRLSFKLFNIQVKEVTQNEGTKTTANNLTSTIQVFTDSEYQLPYVLGSAHQGCLPPFPADVFTIPQYGYLTLNNGSQAVGRSSFYCLEYFPSQMLRTGNNFQFTYTFEDVPFHSSYAHSQSLDRLMNPLIDQYLYYLSRIQTTGGTANTQTLGFSQGGPNTMANQAKNWLPGPCYRQQRVSTTTGQNNNSNFAWTAGTKYHLNGRNSLANPGIAMATHKDDEERFFPSNGILIFGKQNAARDNADYSDVMPTSEEEIKTTNPVATEEYGIVADNLQQQNTAPQIGTVNSQGALPGMVWQNRDVYLQGPIWAKIPHTDGNFHPSPLMGGFGLKHPPPQILIKNTPVPADPPTTFNQSKLNSFITQYSTGQVSVEIEWELQKENSKRWNPEIQYTSNYYKSTSVDFAVNTEGVYSEPRPIGTRYLTRNL

SEQ ID NO: 2932 - protein, 738 aa, synthetic construct
  REGION 1..738: note = source = /note="Description of Artificial Sequence: Synthetic polypeptide"
MAADGYLPDWLEDNLSEGIREWWALKPGAPKPKANQQKQDDGRGLVLPGYKYLGPFNGLDKGEPVNAADAAALEHDKAYDQQLQAGDNPYLRYNHADAEFQERLQEDTSFGGNLGRAVFQAKKRVLEPLGLVEEGAKTAPGKERPVEPSPQRSPDSSTGIGKKGQQPARKRLNFGQTGDSESVPDPQPLGEPPAAPSGVGPNTMAAGGGAPMADNNEGADGVGSSSGNWHCDSTWLGDRVITTSTRTWALPTYNNHLYKQISNGTSGGATNDNTYFGYSTPWGYFDFNRFHCHFSPRDWQRLINNNWGFRPKRLSFKLFNIQVKEVTQNEGTKTTANNLTSTIQVFTDSEYQLPYVLGSAHQGCLPPFPADVFTIPQYGYLTLNNGSQAVGRSSFYCLEYFPSQMLRTGNNFQFTYTFEDVPFHSSYAHSQSLDRLMNPLIDQYLYYLSRIQTTGGTANTQTLGFSQGGPNTMANQAKNWLPGPCYRQQRVSTTTGQNNNSNFAWTAGTKYHLNGRNSLANPGIAMATHKDDEERFFPSNGILIFGKQNAARDNADYSDVMPTSEEEIKTTNPVATEEYGIVADNLQQQNTAPQIGTVNSQGALPGMVWQNRDVYLQGPIWAKIPHTDGNFHPSPLMGGFGLKHPPPQILIKNTPVPADPPTTFNQSKLNSFITQYSTGQVSVEIEWELQKENSKRWNPEIQYTSNYYKSTSVDFAVNTEGVYSEPRPIGTRYLTRNL

SEQ ID NO: 2933 - protein, 738 aa, synthetic construct
  REGION 1..738: note = source = /note="Description of Artificial Sequence: Synthetic polypeptide"
MAADGYLPDWLEDNLSEGIREWWALKPGAPKPKANQQKQDDGRGLVLPGYKYLGPFNGLDKGEPVNAADAAALEHDKAYDQQLQAGDNPYLRYNHADAEFQERLQEDTSFGGNLGRAVFQAKKRVLEPLGLVEEGAKTAPGKERPVEPSPQRSPDSSTGIGKKGQQPARKRLNFGQTGDSESVPDPQPLGEPPAAPSGVGPNTMAAGGGAPMADNNEGADGVGSSSGNWHCDSTWLGDRVITTSTRTWALPTYNNHLYKQISNGTSGGATNDNTYFGYSTPWGYFDFNRFHCHFSPRDWQRLINNNWGFRPKRLSFKLFNIQVKEVTQNEGTKTIANNLTSTIQVFTDSEYQLPYVLGSAHQGCLPPFPADVFTIPQYGYLTLNNGSQAVGRSSFYCLEYFPSQMLRTGNNFQFTYTFEDVPFHSSYAHSQSLDRLMNPLIDQYLYYLSRIQTTGGTANTQTLGFSQGGPNTMANQAKNWLPGPCYRQQRVSTTTGQNNNSNFAWTAGTKYHLNGRNSLANPGIAMATHKDDEERFFPSNGILIFGKQNAARDNADYSDVMPTSEEEIKTTNPVATEEYGIVADNLQQQNTAPQIGTVNSQGALPGMVWQNRDVYLQGPIWAKIPHTDGNFHPSPLMGGFGLKHPPPQILIKNTPVPADPPTTFNQSKLNSFITQYSTGQVSVEIEWELQKENSKRWNPEIQYTSNYYKSTSVDFAVNTEGVYSEPRPIGTRYLTRNL

SEQ ID NO: 2934 - protein, 738 aa, synthetic construct
  REGION 1..738: note = source = /note="Description of Artificial Sequence: Synthetic polypeptide"
MAADGYLPDWLEDNLSEGIREWWALKPGAPKPKANQQKQDDGRGLVLPGYKYLGPFNGLDKGEPVNAADAAALEHDKAYDQQLQAGDNPYLRYNHADAEFQERLQEDTSFGGNLGRAVFQAKKRVLEPLGLVEEGAKTAPGKKRPVEPSPQRSPDSSTGIGKKGQQPARKRLNFGQTGDSESVPDPQPLGEPPAAPSGVGPNTMAAGGGAPMADNNEGADGVGSSSGNWHCDSTWLGDRVITTSTRTWALPTYNNHLYKQISNGTSGGATNDNTYFGYSTPWGYFDFNRFHCHFSPRDWQRLINNNWGFRPKRLSFKLFNIQVKEVTQNEGTKTIANNLTSTIQVFTDSEYPLPYVLGSAHQGCLPPFPADVFTIPQYGYLTLNNGSQAVGRSSFYCLEYFPSQMLRTGNNFQFTYTFEDVPFHSSYAHSQSLDRLMNPLIDQYLYYLSRIQTTGGTANTQTLGFSQGGPNTMANQAKNWLPGPCYRQQRVSTTTGQNNNSNFAWTAGTKYHLNGRNSLANPGIAMATHKDDEERFFPSNGILIFGKQNAARDNADYSDVMPTSEEEIKTTNPVATEEYGIVADNLQQQNTAPQIGTVNSQGALPGMVWQNRDVYLQGPIWAKIPHTDGNFHPSPLMGGFGLKHPPPQILIKNTPVPADPPTTFNQSKLNSFITQYSTGQVSVEIEWELQKENSKRWNPEIQYTSNYYKSTSVDFAVNTEGVYSEPRPIGTRYLTRNL

SEQ ID NO: 2935 - protein, 738 aa, synthetic construct
  REGION 1..738: note = source = /note="Description of Artificial Sequence: Synthetic polypeptide"
MAADGYLPDWLEDNLSEGIREWWALKPGAPKPKANQQKQDDGRGLVLPGYKYLGPFNGLDKGEPVNAADAAALEHDKAYDQQLQAGDNPYLRYNHADAEFQERLQEDTSFGGNLGRAVFQAKKRVLEPLGLVEEGAKTAPGKKRPVEPSPQRSPDSSTGIGKKGQQPARKRLNFGQTGDSESVPDPQPLGEPPAAPSGVGPNTMAAGGGAPMADNNEGADGVGSSSGNWHCDSTWLGDRVITTSTRTWALPTYNNHLYKQISNGTSGGATNDNTYFGYSTPWGYFDFNRFHCHFSPRDWQRLINNNWGFRPKRLSFKLFNIQVKEVTQNEGTKTIANNLTSTIQVFTDSEYQLPYVLGSAHQGCLPPFPADVFTIPQYGYLTLNNGSQAVGRSSFYCLEYFPSQMLRTGNNFQFTYTFEDVPFHSSYAHSQSLDRLMNPLIDQYLYYLSRIQTTGGTANTQTLGFSQGGPNTMANQAKNWLPGPCYRQQRVSTTTGQNNNSNFAWTAGTKYHLNGRNSLANPGIAMATHKDDEERFFPSNGILIFGKQNAARDNADYSDVMPTSEEEIKTTNPVATEEYGIVADNLQQQNTAPQIGTVNSQGALPGMVWQNRDVYLQGPIWAKIPHTDGNFHPSPLMGGFGLKHPPPQILIKNTPVPADPPTTFNQSKLNSFITQYGTGQVSVEIEWELQKENSKRWNPEIQYTSNYYKSTSVDFAVNTEGVYSEPRPIGTRYLTRNL

SEQ ID NO: 2936 - protein, 738 aa, synthetic construct
  REGION 1..738: note = source = /note="Description of Artificial Sequence: Synthetic polypeptide"
MAADGYLPDWLEDNLSEGIREWWALKPGAPKPKANQQKQDDGRGLVLPGYKYLGPFNGLDKGEPVNAADAAALEHDKAYDQQLQAGDNPYLRYNHADAEFQERLQEDTSFGGNLGRAVFQAKKRVLEPLGLVEEGAKTAPGKKRPVEPSPQRSPDSSTGIGKKGQQPARKRLNFGQTGDSESVPDPQPLGEPPAAPSGVGPNTMAAGGGAPMADNNEGADGVGSSSGNWHCDSTWLGDRVITTSTRTWALPTYNNHLYKQISNGTSGGATNDNTYFGYSTPWGYFDFNRFHCHFSPRDWQRLINNNWGFRPKRLSFKPFNIQVKEVTQNEGTKTIANNLTSTIQVFTDSEYQLPYVLGSAHQGCLPPFPADVFTIPQYGYLTLNNGSQAVGRSSFYCLEYFPSQMLRTGNNFQFTYTFEDVPFHSSYAHSQSLDRLMNPLIDQYLYYLSRIQTTGGTANTQTLGFSQGGPNTMANQAKNWLPGPCYRQQRVSTTTGQNNNSNFAWTAGTKYHLNGRNSLANPGIAMATHKDDEERFFPSNGILIFGKQNAARDNADYSDVMPTSEEEIKTTNPVATEEYGIVADNLQQQNTAPQIGTVNSQGALPGMVWQNRDVYLQGPIWAKIPHTDGNFHPSPLMGGFGLKHPPPQILIKNTPVPADPPTTFNQSKLNSFITQYSTGQVSVEIEWELQKENSKRWNPEIQYTSNYYKSTSVDFAVNTEGVYSEPRPIGTRYLTRNL

SEQ ID NO: 2937 - protein, 738 aa, synthetic construct
  REGION 1..738: note = source = /note="Description of Artificial Sequence: Synthetic polypeptide"
MAADGYLPDWLEDNLSEGIREWWALKPGAPKPKANQQKQDDGRGLVLPGYKYLGPFNGLDKGEPVNAADAAALEHDKAYDQQLQAGDNPYLRYNHADAEFQERLQEDTSFGGNLGRAVFQAKKRVLEPLGLVEEGAKTAPGKKRPVEPSPQRSPDSSTGIGKKGQQPARKRLNFGQTGDSESVPDPQPLGEPPAAPSGVGPNTMAAGGGAPMADNNEGADGVGSSSGNWHCDSTWLGDRVITTSTRTWALPTYNNHLYKQISNGTSGGATNDNTYFGYSTPWGYFDFNRFHCHFSPRDWQRLINNNWGFRPKRLSFKLFNIQVKEVTQNEGTKTIANNLTSTIQVFTDSEYQLPYVLGSAHQGCLPPFPADVFTIPQYGYLTLNNGSQAVGRSSFYCLEYFPSQMLRTGNNFQFTYTFEDVPFHSSYAHSQSLDRLMNPLIDQYLYYLSRIQTTGGTANTQALGFSQGGPNTMANQAKNWLPGPCYRQQRVSTTTGQNNNSNFAWTAGTKYHLNGRNSLANPGIAMATHKDDEERFFPSNGILIFGKQNAARDNADYSDVMPTSEEEIKTTNPVATEEYGIVADNLQQQNTAPQIGTVNSQGALPGMVWQNRDVYLQGPIWAKIPHTDGNFHPSPLMGGFGLKHPPPQILIKNTPVPADPPTTFNQSKLNSFITQYSTGQVSVEIEWELQKENSKRWNPEIQYTSNYYKSTSVDFAVNTEGVYSEPRPIGTRYLTRNL

SEQ ID NO: 2938 - protein, 738 aa, synthetic construct
  REGION 1..738: note = source = /note="Description of Artificial Sequence: Synthetic polypeptide"
MAADGYLPDWLEDNLSEGIREWWALKPGAPKPKANQQKQDDGRGLVLPGYKYLGPFNGLDKGEPVNAADAAALEHDKAYDQQLQAGDNPYLRYNHADAEFQERLQEDTSFGGNLGRAVFQAKKRVLEPLGLVEEGAKTAPGKKRPVEPSPQRSPDSSTGIGKKGQQPARKRLNFGQTGDSESVPDPQPLGEPPAAPSGVGPNTMAAGGGAPMADNNEGADGVGSSSGNWHCDSTWLGDRVITTSTRTWALPTYNNHLYKQISNGTSGGATNDNTYFGYSTPWGYFDFNRFHCHFSPRDWQRLINNNWGFRPKRLSFKLFNIQVKEVTQNEGTKTIANNLTSTIQVFTDSEYQLPYVLGSAHQGCLPPFPADVFTIPQYGYLTLNNGSQAVGRSSFYCLEYFPSQMLRTGNNFQFTYTFEDVPFHSSYAHSQSLDRLMNPLIDQYLYYLSRIQTTGGTANTQTLGFSQGGPNTMANQAKNWLPGPCYRQQRVSTTTGQNNNSNFAWTAGTKYHLNGRNSLANPGIAMATHKDDEERFFPSNGILIFGKQNAARDNADYSDVMPTSEEEIKTTNPVATEGYGIVADNLQQQNTAPQIGTVNSQGALPGMVWQNRDVYLQGPIWAKIPHTDGNFHPSPLMGGFGLKHPPPQILIKNTPVPADPPTTFNQSKLNSFITQYSTGQVSVEIEWELQKENSKRWNPEIQYTSNYYKSTSVDFAVNTEGVYSEPRPIGTRYLTRNL

SEQ ID NO: 2939 - protein, 738 aa, synthetic construct
  REGION 1..738: note = source = /note="Description of Artificial Sequence: Synthetic polypeptide"
MAADGYLPDWLEDNLSEGIREWWALKPGAPKPKANQQKQDDGRGLVLPGYKYLGPFNGLDKGEPVNAADAAALEHDKAYDQQLQAGDNPYLRYNHADAEFQERLQEDTSFGGNLGRAVFQAKKRVLEPLGLVEEGAKTAPGKKRPVEPSPQRSPDSSTGIGKKGQQPARKRLNFGQTGDSESVPDPQPLGEPPAAPSGVGPNTMAAGGGAPMADNNEGADGVGSSSGNWHCDSTWLGDRVITTSTRTWALPTYNNHLYKQISNGTSGGATNDNTYFGYSTPWGYFDFNRFHCHFSPRDWQRLINNNWGFRPKRLSFKLFNIQVKEVTQNEGTKTIANNLTSTIQVFTDSEYQLPYVLGSAHQGCLPPFPADVFTIPQYGYLTLNNGSQAVGRSSFYCLEYFPSQMLRTGNNFQFTYTFEDVPFHSSYAHSQSLDRLMNPLIDQYLYYLSRIQTTGGTANTQTLGFSQGGPNTMANQAKNWLPGPCYRQQRVSTTTGQNNNSNFAWTAGTKYHLNGRNSLANPGIAMATRKDDEERFFPSNGILIFGKQNAARDNADYSDVMPTSEEEIKTTNPVATEEYGIVADNLQQQNTAPQIGTVNSQGALPGMVWQNRDVYLQGPIWAKIPHTDGNFHPSPLMGGFGLKHPPPQILIKNTPVPADPPTTFNQSKLNSFITQYSTGQVSVEIEWELQKENSKRWNPEIQYTSNYYKSTSVDFAVNTEGVYSEPRPIGTRYLTRNL

SEQ ID NO: 2940 - protein, 738 aa, synthetic construct
  REGION 1..738: note = source = /note="Description of Artificial Sequence: Synthetic polypeptide"
MAADGYLPDWLEDNLSEGIREWWALKPGAPKPKANQQKQDDGRGLVLPGYKYLGPFNGLDKGEPVNAADAAALEHDKAYDQQLQAGDNPYLRYNHADAEFQERLQEDTSFGGNLGRAVFQAKKRVLEPLGLVEEGAKTAPGKKRPVEPSPQRSPDSSTGIGKKGQQPARKRLNFGQTGDSESVPDPQPLGEPPAAPSGVGPNTMAAGGGAPMADNNEGADGVGSSSGNWHCDSTWLGDRVITTSTRTWALPTYNNHLYKQISNGTSGGATNDNTYFGYSTPWGYFDFNRFHCHFSPRDWQRLINNNWGFRPKRLSFKLFNIQVKEVTQNEGTKTIANNLTSTIQVFTDSEYQLPYVLGSAHQGCLPPFPADVFTIPQYGYLTLNNGSQAVGRSSFYCLEYFPSQMLRTGNNFQFTYTFEDVPFHSSYAHSQSLDRLMNPLIDQYLYYLSRIQTTGGTANTQTLGFSQGGPNTMANQAKNWLPGPCYRQQRVSTTTGQNNNSNFAWTAGTKYHLNGRNSLANPGIAMATHKDDEERFFPSNGILIFGKQNAARDNADYSDVMPTSEEEIKTTNPVATEEYGIVADNLQQQNTAPQIGTVNSQGALPGMVWQNRDVYLQGPIWAKIPHTDGNFHPSPLMGGFGLKHPPPQILIKNTPVPADPPTTFNQSKPNSFITQYSTGQVSVEIEWELQKENSKRWNPEIQYTSNYYKSTSVDFAVNTEGVYSEPRPIGTRYLTRNL

SEQ ID NO: 2941 - protein, 738 aa, synthetic construct
  REGION 1..738: note = source = /note="Description of Artificial Sequence: Synthetic polypeptide"
MAADGYLPDWLEDNLSEGIREWWALKPGAPKPKANQQKQDDGRGLVLPGYKYLGPFNGLDKGEPVNAADAAALEHDKAYDQQLQAGDNPYLRYNHADAEFQERLQEDTSFGGNLGRAVFQAKKRVLEPLGLVEEGAKTAPGKKRPVEPSPQRSPDSSTGIGKKGQQPARKRLNFGQTGDSESVPDPQPLGEPPAAPSGVGPNTMAAGGGAPMADNNEGADGVGSSSGNWHCDSTWLGDRVITTSTRTWALPTYNNHLYKQISNGTSGGATNDNTYFGYSTPWGYFDFNRFHCHFSPRDWQRLINNNWGFRPKRLSFKLFNIQVKEVTQNEGTKTIANNLTSTIQVFTDSEYQLPYVLGSAHQGCLPPFPADVFTIPQYGYLTLNNGSQAVGRSSFYCLEYFPSQMLRTGNNFQFTYTFEDVPFHSSYAHSQSLDRLMNPLIDQYLYYLSRIQTTGGTANTQTLGFSQGGPNTMANQAKNWLPGPCYRQQRVSTTTGQNNNSNFAWTAGTKYHLNGRNSLANPGIAMATHKDDEERFFSSNGILIFGKQNAARDNADYSDVMPTSEEEIKTTNPVATEEYGIVADNLQQQNTAPQIGTVNSQGALPGMVWQNRDVYLQGPIWAKIPHTDGNFHPSPLMGGFGLKHPPPQILIKNTPVPADPPTTFNQSKLNSFITQYSTGQVSVEIEWELQKENSKRWNPEIQYTSNYYKSTSVDFAVNTEGVYSEPRPIGTRYLTRNL

SEQ ID NO: 2942 - protein, 738 aa, synthetic construct
  REGION 1..738: note = source = /note="Description of Artificial Sequence: Synthetic polypeptide"
MAADGYLPDWLEDNLSEGIREWWALKPGAPKPKANQQKQDDGRGLVLPGYKYLGPFNGLDKGEPVNAADAAALEHDKAYDQQLQAGDNPYLRYNHADAEFQERLQEDTSFGGNLGRAVFQAKKRVLEPLGLVEEGAKTAPGKKRPVEPSPQRSPDSSTGIGKKGQQPARKRLNFGQTGDSESVPDPQPLGEPPAAPSGVGPNTMAAGGGAPMADNNEGADGVGSSSGNWHCDSTWLGDRVITTSTRTWALPTYNNHLYKQISNGTSGGATNDNTYFGYSTPWGYFDFNRFHCHFSPRDWQRLINNNWGFRPKRLSFKLFNIQVKEVTQNEGTKTIANNLTSTIQVFTDSEYQLPYVLGSAHQGCLPPFPADVFTIPQYGYLTLNNGSQAVGRSSFYCLEYFPSQMLRTGNNFQFTYTFEDVPFHSSYAHSQSLDRLMNPLIDQYLYYLSRIQTTGGTANTQTLGFSQGGPNTMANQAKNWLPGPCYRQQRVSTTTGQNNNSNFAWAAGTKYHLNGRNSLANPGIAMATHKDDEERFFPSNGILIFGKQNAARDNADYSDVMPTSEEEIKTTNPVATEEYGIVADNLQQQNTAPQIGTVNSQGALPGMVWQNRDVYLQGPIWAKIPHTDGNFHPSPLMGGFGLKHPPPQILIKNTPVPADPPTTFNQSKLNPFITQYSTGQVSVEIEWELQKENSKRWNPEIQYTSNYYKSTSVDFAVNTEGVYSEPRPIGTRYLTRNL

SEQ ID NO: 2943 - protein, 738 aa, synthetic construct
  REGION 1..738: note = source = /note="Description of Artificial Sequence: Synthetic polypeptide"
MAADGYLPDWLEDNLSEGIREWWALKPGAPKPKANQQKQDDGRGLVLPGYKYLGPFNGLDKGEPVNAADAAALEHDKAYDQQLQAGDNPYLRYNHADAEFQERLQEDTSFGGNLGRAVFQAKKRVLEPLGLVEEGAKTAPGKKRPVEPSPQRSPDSSTGIGKKGQQPARKRLNFGQTGDSESVPDPQPLGEPPAAPSGVGPNTMAAGGGAPMADNNEGADGVGSSSGNWHCDSTWLGDRVITTSTRTWALPTYNNHLYKQISNGTSGGATNDNTYFGYSTPWGYFDFNRFHCHFSPRDWQRLINNNWGFRPKRLSFKLFNIQVKEVTQNEGTKTIANNPTSTIQVFTDSEYQLPYVLGSAHQGCLPPFPADVFTIPQYGYLTLNNGSQAVGRSSFYCLEYFPSQMLRTGNNFQFTYTFEDVPFHSSYAHSQSLDRLMNPLIDQYLYYLSRIQTTGGTANTQTLGFSQGGPNTMANQAKNWLPGPCYRQQRVSTTTGQNNNSNFAWTAGTKYHLNGRNSLANPGIAMATHKDDEERFFPSNGILIFGKQNAARDNADYSDVMPTSEEEIKTTNPVATEEYGIVADNLQQQNTAPQIGTVNSQGALPGMVWQNRDVYLQGPIWAKIPHTDGNFHPSPLMGGFGLKHPPPQILIKNTPVPADPPTTFNQSKLNSFITQYSTGQVSVEIEWELQKENSKRWNPEIQYTSNYYKSTSVDFAVNTEGVYSEPRPIGTRYLTRNL

SEQ ID NO: 2944 - protein, 738 aa, synthetic construct
  REGION 1..738: note = source = /note="Description of Artificial Sequence: Synthetic polypeptide"
MAADGYLPDWLEDNLSEGIREWWALKPGAPKPKANQQKQDDGRGLVLPGYKYLGPFNGLDKGEPVNAADAAALEHDKAYDQQLQAGDNPYLRYNHADAEFQERLQEDTSFGGNLGRAVFQAKKRVLEPLGLVEEGAKTAPGKKRPVEPSPQRSPDSSTGIGKKGQQPARKRLNFGQTGDSESVPDPQPLGEPPAAPSGVGPNTMAAGGGAPMADNNEGADGVGSSSGNWHCDSTWLGDRVITTSTRTWALPTYNNHLYKQISNGTSGGATNDNTYFGYSTPWGYFDFNRFHCRFSPRDWQRLINNNWGFRPKRLSFKLFNIQVKEVTQNEGTKTIANNLTSTIQVFTDSEYQLPYVLGSAHQGCLPPFPADVFTIPQYGYLTLNNGSQAVGRSSFYCLEYFPSQMLRTGNNFQFTYTFEDVPFHSSYAHSQSLDRLMNPLIDQYLYYLSRIQTTGGTANTQTLGFSQGGPNTMANQAKNWLPGPCYRQQRVSTTTGQNNNSNFAWTAGTKYHLNGRNSLANPGIAMATHKDDEERFFPSNGILIFGKQNAARDNADYSDVMPTSEEEIKTTNPVATEEYGIVADNLQQQNTAPQIGTVNSQGALPGMVWQNRDVYLQGPIWAKIPHTDGNFHPSPLMGGFGLKHPPPQILIKNTPVPADPPTTFNQSKLNSFITQYSTGQVSVEIEWELQKENSKRWNPEIQYTSNYYKSTSVDFAVNTEGVYSEPRPIGTRYLTRNL

SEQ ID NO: 2945 - protein, 738 aa, synthetic construct
  REGION 1..738: note = source = /note="Description of Artificial Sequence: Synthetic polypeptide"
MAADGYLPDWLEDNLSEGIREWWALKPGAPKPKANQQKQDDGRGLVLPGYKYLGPFNGLDKGEPVNAADAAALEHDKAYDQQLQAGDNPYLRYNHADAEFQERLQEDTSFGGNLGRAVFQAKKRVLEPLGLVEEGAKTAPGKKRPVEPSPQRSPDSSTGIGKKGQQPARKRLNFGQTGDSESVPDPQPLGEPPAAPSGVGPNTMAAGGGAPMADNNEGADGVGSSSGNWHCDSTWLGDRVITTSTRTWALPTYNNHLYKQISNGTSGGATNDNTYFGYSTPWGYFDFNRFHCHFSPRDWQRLINNNWGFRPKRLSFKLFNIQVKEVTQNEGTKTIANNLTSTIQVFTDSEYQLPYVLGSAHQGCLPPFPADVFTIPQYGYLTLNNGSQAVGRSSFYCLEYFPSQMLRTGNNFQFTYTFEDVPFHSSYAHSQSLDRLMNPLIDQYLYYLSRIQTTGGTANTQTLGFSQGGPNTMANQAKNWLPGPCYRQQRVSTTTGQNNNSNFAWTAGTKYHLNGRNSLANPGIAMATHKDDEERFFPSNGILIFGKQNAARDNADYSDVMPTSEEEIKTTNPVATEEYGIVADNLQQQNAAPQIGTVNSQGALPGMVWQNRDVYLQGPIWAKIPHTDGNFHPSPLMGGFGLKHPPPQILIKNTPVPADPPTTFNQSKLNSFITQYSTGQVSVEIEWELQKENSKRWNPEIQYTSNYYKSTSVDFAVNTEGVYSEPRPIGTRYLTRNL

SEQ ID NO: 2946 - protein, 738 aa, synthetic construct
  REGION 1..738: note = source = /note="Description of Artificial Sequence: Synthetic polypeptide"
MAADGYLPDWLEDNLSEGIREWWALKPGAPKPKANQQKQDDGRGLVLPGYKYLGPFNGLDKGEPVNAADAAALEHDKAYDQQLQAGDNPYLRYNHADAEFQERLQEDTSFGGNLGRAVFQAKKRVLEPLGLVEEGAKTAPGKKRPVEPSPQRSPDSSTGIGKKGQQPARKRLNFGQTGDSESVPDPQPLGEPPAAPSGVGPNTMAAGGGAPMADNNEGADGVGSSSGNWHCDSTWLGDRVITTSTRTWALPTYNNHLYKQISNGTSGGATNDNTYFGYSTPWGYFDFNRFHCHFSPRDWQRLINNNWGFRPKRLSFKLFNIQVKEVTQNEGTKTIANSLTSTIQVFTDSEYQLPYVLGSAHQGCLPPFPADVFTIPQYGYLTLNNGSQAVGRSSFYCLEYFPSQMLRTGNNFQFTYTFEDVPFHSSYAHSQSLDRLMNPLIDQYLYYLSRIQTTGGTANTQTLGFSQGGPNTMANQAKNWLPGPCYRQQRVSTTTGQNNNSNFAWTAGTKYHLNGRNSLANPGIAMATHKDDEERFFPSNGILIFGKQNAARDNADYSDVMPTSEEEIKTTNPVATEEYGIVADNLQQQNTAPQIGTVNSQGALPGMVWQNRDVYLQGPIWAKIPHTDGNFHPSPLMGGFGLKHPPPQILIKNTPVPADPPTTFNQSKLNSFITQYSTGQVSVEIEWELQKENSKRWNPEIQYTSNYYKSASVDFAVNTEGVYSEPRPIGTRYLTRNL

SEQ ID NO: 2947 - protein, 738 aa, synthetic construct
  REGION 1..738: note = source = /note="Description of Artificial Sequence: Synthetic polypeptide"
MAADGYLPDWLEDNLSEGIREWWALKPGAPKPKANQQKQDDGRGLVLPGYKYLGPFNGLDKGEPVNAADAAALEHDKAYDQQLQAGDNPYLRYNHADAEFQERLQEDTSFGGNLGRAVFQAKKRVLEPLGLVEEGAKTAPGKKRPVEPSPQRSPDSSTGIGKKGQQPARKRLNFGQTGDSESVPDPQPLGEPPAAPSGVGPNTMAAGGGAPMADNNEGADGVGSSSGNWHCDSTWLGDRVITTSTRTWALPTYNNHLYKQISNGTSGGATNDNTYFGYSTPWGYFDFNRFHCHFSPRDWQRLINNNWGFRPKRLSFKLFNIQVKEVTQNEGTKTIANNLTSTIQVFTDSEYQLPYVLGSAHQGCLPPFPADVFTIPQYGYLTLNNGSQAVGRSSFYCLEYFPSQMLRTGNNFQFTYTFEDVPFHSSYAHSQSLDRLMNPLIDQYLYYLSRIQTTGGTANTQTLGFSQGGPNTMANQAKNWLPGPCYRQQRVSTTTGQNNNSNFAWTAGTKYHLNGGNSLANPGIAMATHKDDEERFFPSNGILIFGKQNAARDNADYSDVMPTSEEEIKTTNPVATEEYGIVADNLQQQNTAPQIGTVNSQGALPGMVWQNRDVYLQGPIWAKIPHTDGNFHPSPLMGGFGLKHPPPQILIKNTPVPADPPTTFNQSKLNSFITQYSTGQVSVEIEWELQKENSKRWNPEIQYTSNYYKSTSVDFAVNTEGVYSEPRPIGTRYLTRNL

SEQ ID NO: 2948 - protein, 738 aa, synthetic construct
  REGION 1..738: note = source = /note="Description of Artificial Sequence: Synthetic polypeptide"
MAADGYLPDWLEDNLSEGIREWWALKPGAPKPKANQQKQDDGRGLVLPGYKYLGPFNGLDKGEPVNAADAAALEHDKAYDQQLQAGDNPYLRYNHADAEFQERLQEDTSFGGNLGRAVFQAKKRVLEPLGLVEEGAKTAPGKKRPVEPSPQRSPDSSTGIGKKGQQPARKRLNFGQTGDSESVPDPQPLGEPPAAPSGVGPNTMAAGGGAPMADNNEGADGVGSSSGNWHCDSTWLGDRVITTSTRTWALPTYNNHLYKQISNGTSGGATNDNTYFGYSTPWGYFDFNRFHCHFSPRDWQRLINNNWGFRPKRLSFKLFNIQVKEVTQNEGTKTIANNLTSTIQVFTDSEYQLPYVLGSAHQGCLPPFPADVFTIPQYGYLTLNNGSQAVGRSSFYCLEYFPSQMLRTGNNFQFTYTFEDVPFHSSYAHSQSLDRLMNPLIDQYLYYLSRIQTTGGTANTQTLGFSQGGPNTMANQAKNWLPGPCYRQQRVSTTTGQNNNSNFAWTAGTKYHLNGRNSLANPGIAMATHKDDEERFFPSNGILIFGKQNAARDNADYSDVMPTSEEEIKTTNPVATEEYGIVADNLQQQNTAPQIGTVNSQGALPGMVWQNRDVYLQGPIWAKIPHTDGNFHPSPLMGGFGLKHPPPQILIKNTPVPADPPTTFNQSRLNSFITQYSTGQVSVEIEWELQKENSKRWNPEIQYTSNYYKSTSVDFAVNTEGVYSEPRPIGTRYLTRNL

SEQ ID NO: 2949 - protein, 738 aa, synthetic construct
  REGION 1..738: note = source = /note="Description of Artificial Sequence: Synthetic polypeptide"
MAADGYLPDWLEDNLSEGIREWWALKPGAPKPKANQQKQDDGRGLVLPGYKYLGPFNGLDKGEPVNAADAAALEHDKAYDQQLQAGDNPYLRYNHADAEFQERLQEDTSFGGNLGRAVFQAKKRVLEPLGLVEEGAKTAPGKKRPVEPSPQRSPDSSTGIGKKGQQPARKRLNFGQTGDSESVPDPQPLGEPPAAPSGVGPNTMAAGGGAPMADNNEGADGVGSSSGNWHCDSTWLGDRVITTSTRTWALPTYNNHLYKQISNGTSGGAANDNTYFGYSTPWGYFDFNRFHCHFSPRDWQRLINNNWGFRPKRLSFKLFNIQVKEVTQNEGTKTIANNLTSTIQVFTDSEYQLPYVLGSAHQGCLPPFPADVFTIPQYGYLTLNNGSQAVGRSSFYCLEYFPSQMLRTGNNFQFTYTFEDVPFHSSYAHSQSLDRLMNPLIDQYLYYLSRIQTTGGTANTQTLGFSQGGPNTMANQAKNWLPGPCYRQQRVSTTTGQNNNSNFAWTAGTKYHLNGRNSLANPGIAMATHKDDEERFFPSNGILIFGKQNAARDNADYSDVMPTSEEEIKTTNPVATEEYGIVADNLQQQNTAPQIGTVNSQGALPGMVWQNRDVYLQGPIWAKIPHTDGNFHPSPLMGGFGLKHPPPQILIKNTPVPADPPTTFNQSKLNSFITQYSTGQVSVEIEWELQKENSKRWNPEIQYTSNYYKSTSVDFAVNTEGVYSEPRPIGTRYLTRNL

SEQ ID NO: 2950 - protein, 738 aa, synthetic construct
  REGION 1..738: note = source = /note="Description of Artificial Sequence: Synthetic polypeptide"
MAADGYLPDWLEDNLSEGIREWWALKPGAPKPKANQQKQDDGRGLVLPGYKYLGPFNGLDKGEPVNAADAAALEHDKAYDQQLQAGDNPYLRYNHADAEFQERLQEDTSFGGNLGRAVFQAKKRVLEPLGLVEEGAKTAPGKKRPVEPSPQRSPDSSTGIGKKGQQPARKRLNFGQTGDSESVPDPQPLGEPPAAPSGVGPNTMAAGGGAPMAGNNEGADGVGSSSGNWHCDSTWLGDRVITTSTRTWALPTYNNHLYKQISNGTSGGATNDNTYFGYSTPWGYFDFNRFHCHFSPRDWQRLINNNWGFRPKRLSFKLFNIQVKEVTQNEGTKTIANNLTSTIQVFTDSEYQLPYVLGSAHQGCLPPFPADVFTIPQYGYLTLNNGSQAVGRSSFYCLEYFPSQMLRTGNNFQFTYTFEDVPFHSSYAHSQSLDRLMNPLIDQYLYYLSRIQTTGGTANTQTLGFSQGGPNTMANQAKNWLPGPCYRQQRVSTTTGQNNNSNFAWTAGTKYHLNGRNSLANPGIAMATHKDDEERFFPSNGILIFGKQNAARDNADYSDVMPTSEEEIKTTNPVATEEYGIVADNLQQQNTAPQIGTVNSQGALPGMVWQNRDVYLQGPIWAKIPHTDGNFHPSPLMGGFGLKHPPPQILIKNTPVPADPPTTFNQSKLNSFITQYSTGQVSVEIEWELQKENSKRWNPEIQYTSNYYKSTSVDFAVNTEGVYSEPRPIGTRYLTRNL

SEQ ID NO: 2951 - protein, 738 aa, synthetic construct
  REGION 1..738: note = source = /note="Description of Artificial Sequence: Synthetic polypeptide"
MAADGYLPDWLEDNLSEGIREWWALKPGAPKPKANQQKQDDGRGLVLPGYKYLGPFNGLDKGEPVNAADAAALEHDKAYDQQLQAGDNPYLRYNHADAEFQERLQEDTSFGGNLGRAVFQAKKRVLEPLGLVEEGAKTAPGKKRPVEPSPQRSPDSSTGIGRKGQQPARKRLNFGQTGDSESVPDPQPLGEPPAAPSGVGPNTMAAGGGAPMADNNEGADGVGSSSGNWHCDSTWLGDRVITTSTRTWALPTYNNHLYKQISNGTSGGATNDNTYFGYSTPWGYFDFNRFHCHFSPRDWQRLINNNWGFRPKRLSFKLFNIQVKEVTQNEGTKTIANNLTSTIQVFTDSEYQLPYVLGSAHQGCLPPFPADVFTIPQYGYLTLNNGSQAVGRSSFYCLEYFPSQMLRTGNNFQFTYTFEDVPFHSSYAHSQSLDRLMNPLIDQYLYYLSRIQTTGGTANTQTLGFSQGGPNTMANQAKNWLPGPCYRQQRVSTTTGQNNNSNFAWTAGTKYHLNGRNSLANPGIAMATHKDDEERFFPSNGILIFGKQNAARDNADYSDVMPTSEEEIKTTNPVATEEYGIVADNLQQQNTAPQIGTVNSQGALPGMVWQNRDVYLQGPIWAKIPHTDGNFHPSPLMGGFGLKHPPPQILIKNTPVPADPPTTFNQSKLNSFITQYSTGQVSVEIEWELQKENSKRWNPEIQYTSNYYKSTSVDFAVNTEGVYSEPRPIGTRYLTRNL

SEQ ID NO: 2952 - protein, 738 aa, synthetic construct
  REGION 1..738: note = source = /note="Description of Artificial Sequence: Synthetic polypeptide"
MAADGYLPDWLEDNLSEGIREWWALKPGAPKPKANQQKQDDGRGLVLPGYKYLGPFNGLDKGEPVNAADAAALEHDKAYDQQLQAGDNPYLRYNHADAEFQERLQEDTSFGGNLGRAVFQAKKRVLEPLGLVEEGAKTAPGKKRPVEPSPQRSPDSSTGIGKKGQQPARKRLNFGQTGDSESVPDPQPLGEPPAAPSGVGPNTMAAGGGAPMADNNEGADGVGSSSGNWHCDSTWLGDRVITTSTRTWALPTYNNHLYKQISNGTSGGATNDNTYFGYGTPWGYFDFNRFHCHFSPRDWQRLINNNWGFRPKRLSFKLFNIQVKEVTQNEGTKTIANNLTSTIQVFTDSEYQLPYVLGSAHQGCLPPFPADVFTIPQYGYLTLNNGSQAVGRSSFYCLEYFPSQMLRTGNNFQFTYTFEDVPFHSSYAHSQSLDRLMNPLIDQYLYYLSRIQTTGGTANTQTLGFSQGGPNTMANQAKNWLPGPCYRQQRVSTTTGQNNNSNFAWTAGTKYHLNGRNSLANPGIAMATHKDDEERFFPSNGILIFGKQNAARDNADYSDVMPTSEEEIKTTNPVATEEYGIVADNLQQQNTAPQIGTVNSQGALPGMVWQNRDVYLQGPIWAKIPHTDGNFHPSPLMGGFGLKHPPPQILIKNTPVPADPPTTFNQSKLNSFITQYSTGQVSVEIEWELQKENSKRWNPEIQYTSNYYKSTSVDFAVNTEGVYSEPRPIGTRYLTRNL

SEQ ID NO: 2953 - protein, 738 aa, synthetic construct
  REGION 1..738: note = source = /note="Description of Artificial Sequence: Synthetic polypeptide"
MAADGYLPDWLEDNLSEGIREWWALKPGAPKPKANQQKQDDGRGLVLPGYKYLGPFNGLDKGEPVNAADAAALEHDKAYDQQLQAGDNPYLRYNHADAEFQERLQEDTSFGGNLGRAVFQAKKRVLEPLGLVEEGAKTAPGKKRPVEPSPQRSPDSSTGIGKKGQQPARKRLNFGQTGDSESVPDPQPLGEPPAAPSGVGPNTMAAGGGAPMADNNEGADGVGSSSGNWHCDSTWLGDRVITTSTRTWALPTYNNHLYKQISNGTSGGATNDNTYFGYSTPWGYFDFNRFHCHFSPRDWQRLINNNWGFRPKRLSFKLFNIQVKEVTQNEGTKTIANNLTSTIQVFTDSEYQLPYVLGSAHQGCLPPFPADVFTIPQYGYLTLNNGSQAVGRSSFYCLEYFPSQMLRTGNNFQFTYTFEDVPFHSSYAHSQSLDRPMNPLIDQYLYYLSRIQTTGGTANTQTLGFSQGGPNTMANQAKNWLPGPCYRQQRVSTTTGQNNNSNFAWTAGTKYHLNGRNSLANPGIAMATHKDDEERFFPSNGILIFGKQNAARDNADYSDVMPTSEEEIKTTNPVATEEYGIVADNLQQQNTAPQIGTVNSQGALPGMVWQNRDVYLQGPIWAKIPHTDGNFHPSPLMGGFGLKHPPPQILIKNTPVPADPPTTFNQSKLNSFITQYSTGQVSVEIEWELQKENSKRWNPEIQYTSNYYKSTSVDFAVNTEGVYSEPRPIGTRYLTRNL

SEQ ID NO: 2954 - protein, 738 aa, synthetic construct
  REGION 1..738: note = source = /note="Description of Artificial Sequence: Synthetic polypeptide"
MAADGYLPDWLEDNLSEGIREWWALKPGAPKPKANQQKQDDGRGLVLPGYKYLGPFNGLDKGEPVNAADAAALEHDKAYDQQLQAGDNPYLRYNHADAEFQERLQEDTSFGGNLGRAVFQAKKRVLEPLGLVEEGAKTAPGKKRPVEPSPQRSPDSSTGIGKKGQQPARKRLNFGQTGDSESVPDPQPLGEPPAAPSGVGPNTMAAGGGAPMADNNEGADGVGSSSGNWHCDSTWLGDRVITTSTRTWALPTYNNHLYKQISNGTSGGATNDNTYFGYSTPWGYFDFNRFHCHFSPRDWQRLINNNWGFRPKRLSLKLFNIQVKEVTQNEGTKTIANNLTSTIQVFTDSEYQLPYVLGSAHQGCLPPFPADVFTIPQYGYLTLNNGSQAVGRSSFYCLEYFPSQMLRTGNNFQFTYTFEDVPFHSSYAHSQSLDRLMNPLIDQYLYYLSRIQTTGGTANTQTLGFSQGGPNTMANQAKNWLPGPCYRQQRVSTTTGQNNNSNFAWTAGTKYHLNGRNSLANPGIAMATHKDDEERFFPSNGILIFGKQNAARDNADYSDVMPTSEEEIKTTNPVATEEYGIVADNLQQQNTAPQIGTVNSQGALPGMVWQNRDVYLQGPIWAKIPHTDGNFHPSPLMGGFGLKHPPPQILIKNTPVPADPPTTFNQSKLNSFITQYSTGQVSVEIEWELQKENSKRWNPEIQYTSNYYKSTSVDFAVNTEGVYSEPRPIGTRYLTRNL

SEQ ID NO: 2955 - protein, 738 aa, synthetic construct
  REGION 1..738: note = source = /note="Description of Artificial Sequence: Synthetic polypeptide"
MAADGYLPDWLEDNLSEGIREWWALKPGAPKPKANQQKQDDGRGLVLPGYKYLGPFNGLDKGEPVNAADAAALEHDKAYDQQLQAGDNPYLRYNHADAEFQERLQEDTSFGGNLGRAVFQAKKRVLEPLGLVEEGAKTAPGKKRPVEPSPQRSPDSSTGIGKKGQQPARKRLNFGQTGDSESVPDPQPLGEPPAAPSGVGPNTMAAGGGAPMADNNEGADGVGSSSGNWHCDSTWLGDRVITTSTRTWALPTYNNHLYKQISNGTSGGATNDNTYFGYSTPWGYFDFNRFHCHFSPRDWQRLINNNWGFRPKRLSFKLFNIQVKEVTQNEGTKTIANNLTSTIQVFTDSEYQLPYVLGSAHQGCLPPFPADVFTIPQYGYLTLNNGSQAVGRSSFYCLEYFPSQMLRTGNNFQFTYTFEDVPFHSSYAHSQSLDRLMNPLIDQYLYYLSRIQTTGGTANTQTLGFSQGGPNTMANQAKNWLPGPCYRQQRVSTTTGQNNNSNFAWTAGTKYHLNGRNSLANPGIAMATHKDDEERFFPSNGILIFGKQNAARDNADYSDVTPTSEEEIKTTNPVATEEYGIVADNLQQQNTAPQIGTVNSQGALPGMVWQNRDVYLQGPIWAKIPHTDGNFHPSPLMGGFGLKHPPPQILIKNTPVPADPPTTFNQSKLNSFITQYSTGQVSVEIEWELQKENSKRWNPEIQYTSNYYKSTSVDFAVNTEGVYSEPRPIGTRYLTRNL

SEQ ID NO: 2956 - protein, 738 aa, synthetic construct
  REGION 1..738: note = source = /note="Description of Artificial Sequence: Synthetic polypeptide"
MAADGYLPDWLEDNLSEGIREWWALKPGAPKPKANQQKQDDGRGLVLPGYKYLGPFNGLDKGEPVNAADAAALEHDKAYDQQLQAGDNPYLRYNHADAEFQERLQEDTSFGGNLGRAVFQAKKRVLEPLGLVEEGAKTAPGKKRPVEPSPQRSPDSSTGIGKKGQQPARKRLNFGQTGDSESVPDPQPLGEPPAAPSGVGPNTMAAGGGAPMADNNEGADGVGSSSGNWHCDSTWLGDRVITTSTRTWALPTYNNHLYKQISNGTSGGATNDNTYFGYSTPWGYFDFNRFHCHFSPRDWQRLINNNWGFRPKRLSFKLFNIQVKEVTQNEGTKTIANNLTSTIQVFTDSEYQLPYVLGSAHQGCLPPFPADVFTIPQYGYLTLNNGSQAVGRSSFYCLEYFPSQMLRTGNNFQFTYTFEDVPFHSSYAHSQSLDRLMNPLIDQYLYYLSRIQTTGGTANTQTLGFSQGGPNTMANQAKNWLPGPCYRQQRVSTTTGQNNNSNFAWTAGTKYHLNGRNSLANPGIAMATHKDDEERFFPSNGILIFGKQNAARDNADYSDVMPTSEEEIKTTNPVATEEYGIVADNLQQQNTAPQIGTVNSQGALPGMVRQNRDVYLQGPIWAKIPHTDGNFHPSPLMGGFGLKHPPPQILIKNTPVPADPPTTFNQSKLNSFITQYSTGQVSVEIEWELQKENSKRWNPEIQYTSNYYKSTSVDFAVNTEGVYSEPRPIGTRYLTRNL

SEQ ID NO: 2957 - protein, 738 aa, synthetic construct
  REGION 1..738: note = source = /note="Description of Artificial Sequence: Synthetic polypeptide"
MAADGYLPDWLEDNLSEGIREWWALKPGAPKPKANQQKQDDGRGLVLPGYKYLGPFNGLDKGEPVNAADAAALEHDKAYDQQLQAGDNPYLRYNHADAEFQERLQEDTSFGGNLGRAVFQAKKRVLEPLGLVEEGAKTAPGKKRPVEPSPQRSPDSSTDIGKKGQQPARKRLNFGQTGDSESVPDPQPLGEPPAAPSGVGPNTMAAGGGAPMADNNEGADGVGSSSGNWHCDSTWLGDRVITTSTRTWALPTYNNHLYKQISNGTSGGATNDNTYFGYSTPWGYFDFNRFHCHFSPRDWQRLINNNWGFRPKRLSFKLFNIQVKEVTQNEGTKTIANNLTSTIQVFTDSEYQLPYVLGSAHQGCLPPFPADVFTIPQYGYLTLNNGSQAVGRSSFYCLEYFPSQMLRTGNNFQFTYTFEDVPFHSSYAHSQSLDRLMNPLIDQYLYYLSRIQTTGGTANTQTLGFSQGGPNTMANQAKNWLPGPCYRQQRVSTTTGQNNNSNFAWTAGTKYHLNGRNSLANPGIAMATHKDDEERFFPSNGILIFGKQNAARDNADYSDVMPTSEEEIKTTNPVATEEYGIVADNLQQQNTAPQIGTVNSQGALPGMVWQNRDVYLQGPIWAKIPHTDGNFHPSPLMGGFGLKHPPPQILIKNTPVPADPPTTFNQSKLNSFITQYSTGQVSVEIEWELQKENSKRWNPEIQYTSNYYKSTSVDFAVNTEGVYSEPRPIGTRYLTRNL

SEQ ID NO: 2958 - protein, 738 aa, synthetic construct
  REGION 1..738: note = source = /note="Description of Artificial Sequence: Synthetic polypeptide"
MAADGYLPDWLEDNLSEGIREWWALKPGAPKPKANQQKQDDGRGLVLPGYKYLGPFNGLDKGEPVNAADAAALEHDKAYDQQLQAGDNPYLRYNHADAEFQERLQEDTSFGGNLGRAVFQAKKRVLEPLGLVEEGAKTAPGKKRPVEPSPQRSPDSSTGIGKKGQQPAGKRLNFGQTGDSESVPDPQPLGEPPAAPSGVGPNTMAAGGGAPMADNNEGADGVGSSSGNWHCDSTWLGDRVITTSTRTWALPTYNNHLYKQISNGTSGGATNDNTYFGYSTPWGYFDFNRFHCHFSPRDWQRLINNNWGFRPKRLSFKLFNIQVKEVTQNEGTKTIANNLTSTIQVFTDSEYQLPYVLGSAHQGCLPPFPADVFTIPQYGYLTLNNGSQAVGRSSFYCLEYFPSQMLRTGNNFQFTYTFEDVPFHSSYAHSQSLDRLMNPLIDQYLYYLSRIQTTGGTANTQTLGFSQGGPNTMANQAKNWLPGPCYRQQRVSTTTGQNNNSNFAWTAGTKYHLNGRNSLANPGIAMATHKDDEERFFPSNGILIFGKQNAARDNADYSDVMPTSEEEIKTTNPVATEEYGIVADNLQQQNTAPQIGTVNSQGALPGMVWQNRDVYLQGPIWAKIPHTDGNFHPSPLMGGFGLKHPPPQILIKNTPVPADPPTTFNQSKLNSFITQYSTGQVSVEIEWELQKENSKRWNPEIQYTSNYYKSTSVDFAVNTEGVYSEPRPIGTRYLTRNL

SEQ ID NO: 2959 - protein, 738 aa, synthetic construct
  REGION 1..738: note = source = /note="Description of Artificial Sequence: Synthetic polypeptide"
MAADGYLPDWLEDNLSEGIREWWALKPGAPKPKANQQKQDDGRGLVLPGYKYLGPFNGLDKGEPVNAADAAALEHDKAYDQQLQAGDNPYLRYNHADAEFQERLQEDTSFGGNLGRAVFQAKKRVLEPLGLVEEGAKTAPGKKRPVEPSPQRSPDSSTGIGKKGQQPARKRLNFGQTGDSESVPDPQPLGEPPAAPSGVGPNTMAAGGGAPMADNNEGADGVGSSSGNWHCDSTWLGDRVITTSTRTWALPTYNNHLYKQISNGTSGGATNDNTYFGYSTPWGYFDFNRFHCHFSPRDWQRLINNNWGFRPKRLSFKLFNIQVKEVTQNEGTKTIANNLTSTIQVFTDSEYQLPYVLGSAHQGCLPPFPADVFTIPQYGYLTLNNGSQAVGRPSFYCLEYFPSQMLRTGNNFQFTYTFEDVPFHSSYAHSQSLDRLMNPLIDQYLYYLSRIQTTGGTANTQTLGFSQGGPNTMANQAKNWLPGPCYRQQRVSTTTGQNNNSNFAWTAGTKYHLNGRNSLANPGIAMATHKDDEERFFPSNGILIFGKQNAARDNADYSDVMPTSEEEIKTTNPVATEEYGIVADNLQQQNTAPQIGTVNSQGALPGMVWQNRDVYLQGPIWAKIPHTDGNFHPSPLMGGFGLKHPPPQILIKNTPVPADPPTTFNQSKLNSFITQYSTGQVSVEIEWELQKENSKRWNPEIQYTSNYYKSTSVDFAVNTEGVYSEPRPIGTRYLTRNL

SEQ ID NO: 2960 - protein, 738 aa, synthetic construct
  REGION 1..738: note = source = /note="Description of Artificial Sequence: Synthetic polypeptide"
MAADGYLPDWLEDNLSEGIREWWALKPGAPKPKANQQKQDDGRGLVLPGYKYLGPFNGLDKGEPVNAADAAALEHDKAYDQQLQAGDNPYLRYNHADAEFQERLQEDTSFGGNLGRAVFQAKKRVLEPLGLVEEGAKTAPGKKRPVEPSPQRSPDSSTGIGKKGQQPARKRLNFGQTGDSESVPDPQPLGEPPAAPSGVGPNTMAAGGGAPMADNNEGADGVGSSSGNWHCDSTWLGDRVITTSTRTWALPTYNNHLYKQISNGTSGGATNDNTYFGYSTPWGYFDFNRFHCHFSPRDWQRLINNNWGFRPKRLSFKLFNIQVKAVTQNEGTKTIANNLTSTIQVFTDSEYQLPYVLGSAHQGCLPPFPADVFTIPQYGYLTLNNGSQAVGRSSFYCLEYFPSQMLRTGNNFQFTYTFEDVPFHSSYAHSQSLDRLMNPLIDQYLYYLSRIQTTGGTANTQTLGFSQGGPNTMANQAKNWLPGPCYRQQRVSTTTGQNNNSNFAWTAGTKYHLNGRNSLANPGIAMATHKDDEERFFPSNGILIFGKQNAARDNADYSDVMPTSEEEIKTTNPVATEEYGIVADNLQQQNTAPQIGTVNSQGALPGMVWQNRDVYLQGPIWAKIPHTDGNFHPSPLMGGFGLKHPPPQILIKNTPVPADPPTTFNQSKLNSFITQYSTGQVSVEIEWELQKENSKRWNPEIQYTSNYYKSTSVDFAVNTEGVYSEPRPIGTRYLTRNL

SEQ ID NO: 2961 - protein, 738 aa, synthetic construct
  REGION 1..738: note = source = /note="Description of Artificial Sequence: Synthetic polypeptide"
MAADGYLPDWLEDNLSEGIREWWALKPGAPKPKANQQKQDDGRGLVLPGYKYLGPFNGLDKGEPVNAADAAALEHDKAYDQQLQAGDNPYLRYNHADAEFQERLQEDTSFGGNLGRAVFQAKKRVLEPLGLVEEGAKTAPGKKRPVEPSPQRSPDSSTGIGKKGQQPARKRLNFGQTGDSESVPDPQPLGEPPAAPSGVGPNTMAAGGGAPMADNNEGADGVGSSSGNWHCDSTWLGDRVITTSTRTWALPTYNNHLYKQISNGTSGGATNDNTYFGYSTPWGYFDFNRFHCHFSPRDWQRLINNNWGFRPKRLSFKLFNIQVKEVTQNEGTKTIANNLTSTIQVFTDSEYQLPYVLGSAHQGCLPPFPADVFTIPQYGYLTLNNGSQAVGRSSFYCLEYFPSQMLRTGNNFQFTYTFEDVPFHSSYAHSQSLDRLMNPLIDQYLYYLSRIQTTGGTANTQTLGFSQGGPNTMANQAKNWLPGPCYRQQRVSTTTGQNNNSNFAWTAGTKYHLNGRNSLANPGIAMATHKDDEERFFPSNGILIFGKQNAARDNADYSDVMPTSEEEIKTTNPVATEEYGIVADNLQQQNTAPQIGTVNSQGALPGMVWQNRDVYLQGPIWAKIPHTDGNFHPSPLMGGFGLKHPPPQILIKNTPVPADPPTAFNQSKLNSFITQYSTGQVSVEIEWELQKENSKRWNPEIQYTSNYYKSTSVDFAVNTEGVYSEPRPIGTRYLTRNL

SEQ ID NO: 2962 - protein, 738 aa, synthetic construct
  REGION 1..738: note = source = /note="Description of Artificial Sequence: Synthetic polypeptide"
MAADGYLPDWLEDNLSEGIREWWALKPGAPKPKANQQKQDDGRGLVLPGYKYLGPFNGLDKGEPVNAADAAALEHDKAYDQQLQAGDNPYLRYNHADAEFQERLQEDTSFGGNLGRAVFQAKKRVLEPLGLVEEGAKTAPGKKRPVEPSPQRSPDSSTGIGKKGQQPARKRLNFGQTGDSESVPDPQPLGEPPAAPSGVGPNTMAAGGGAPMADNNEGADGVGSSSGNWHCDSTWLGDRVITTSTRTWALPTYNNHLYKQISNGTSGGATNDNTYFGYSTPWGYFDFNRFRCHFSPRDWQRLINNNWGFRPKRLSFKLFNIQVKEVTQNEGTKTIANNLTSTIQVFTDSEYQLPYVLGSAHQGCLPPFPADVFTIPQYGYLTLNNGSQAVGRSSFYCLEYFPSQMLRTGNNFQFTYTFEDVPFHSSYAHSQSLDRLMNPLIDQYLYYLSRIQTTGGTANTQTLGFSQGGPNTMANQAKNWLPGPCYRQQRVSTTTGQNNNSNFAWTAGTKYHLNGRNSLANPGIAMATHKDDEERFFPSNGILIFGKQNAARDNADYSDVMPTSEEEIKTTNPVATEEYGIVADNLQQQNTAPQIGTVNSQGALPGMVWQNRDVYLQGPIWAKIPHTDGNFHPSPLMGGFGLKHPPPQILIKNTPVPADPPTTFNQSKLNSFITQYSTGQVSVEIEWELQKENSKRWNPEIQYTSNYYKSTSVDFAVNTEGVYSEPRPIGTRYLTRNL

SEQ ID NO: 2963 - protein, 738 aa, synthetic construct
  REGION 1..738: note = source = /note="Description of Artificial Sequence: Synthetic polypeptide"
MAADGYLPDWLEDNLSEGIREWWALKPGAPKPKANQQKQDDGRGLVLPGYKYLGPFNGLDKGEPVNAADAAALEHDKAYDQQLQAGDNPYLRYNHADAEFQERLQEDTSFGGNLGRAVFQAKKRVLEPLGLVEEGAKTAPGKKRPVEPSPQRSPDSSTGIGKKGQQPARKRLNFGQTGDSESVPDPQPLGEPPAAPSGVGPNTMAAGGGAPMADNNEGADGVGSSSGNWHCDSTWLGDRVITTSTRTWALPTYNNHLYKQISNGTSGGATNDNTYFGYSTPWGYFDFNRFHCHFSPRDWQRLINNNWGFRPKRLSFKLFNIQVKEVTQNEGTKTIANNLTSTIQVFTDSEYQLPYVLGSAHQGCLPPFPADVFTIPQYGYLTLNNGSQAVGRSSFYCLEYFPSQMLRTGNNFQFTYTLEDVPFHSSYAHSQSLDRLMNPLIDQYLYYLSRIQTTGGTANTQTLGFSQGGPNTMANQAKNWLPGPCYRQQRVSTTTGQNNNSNFAWTAGTKYHLNGRNSLANPGIAMATHKDDEERFFPSNGILIFGKQNAARDNADYSDVMPTSEEEIKTTNPVATEEYGIVADNLQQQNTAPQIGTVNSQGALPGMVWQNRDVYLQGPIWAKIPHTDGNFHPSPLMGGFGLKHPPPQILIKNTPVPADPPTTFNQSKLNSFITQYSTGQVSVEIEWELQKENSKRWNPEIQYTSNYYKSTSVDFAVNTEGVYSEPRPIGTRYLTRNL

SEQ ID NO: 2964 - protein, 738 aa, synthetic construct
  REGION 1..738: note = source = /note="Description of Artificial Sequence: Synthetic polypeptide"
MAADGYLPDWLEDNLSEGIREWWALKPGAPKPKANQQKQDDGRGLVLPGYKYLGPFNGLDKGEPVNAADAAALEHDKAYDQQLQAGDNPYLRYNHADAEFQERLQEDTSFGGNLGRAVFQAKKRVLEPLGLVEEGAKTAPGKKRPVEPSPQRSPDSSTGIGKKGQQPARKRLNFGQTGDSESVPDPQPLGEPPAAPSGVGPNTMAAGGGAPMADNNEGADGVGSSSGNWHCDSTWLGDRVITTSTRTWALPTYNNHLYKQISNGTSGGATNDNTYFGYSTPWGYFDFNRFHCHFSPRDWQRLINNNWGFRPKRLSFKLFNIQVKEVTQNEGTKTIANNLTSTIQVFTDSEYQLPYVLGSAHQGCLPPFPADVFTIPQYGYLTLNNGSQAVGRSSFYCLEYFPSQMLRTGNNFQFTYTFEDVPFHSSYAHSQSLDRLMNPLIDQYLYYLSRIQTTGGTANTQTLGFSQGGPNTMANQAKNWLPGPCYRQQRVSTTTGQNNNSNFAWTAGTKYHLNGRNSLANPGIAMATHKDDEERFFPSNGILIFGKQNAARDNADYSDVMPTSEEEIKTTNPVATEEYGIVADNLQQQSTAPQIGTVNSQGALPGMVWQNRDVYLQGPIWAKIPHTDGNFHPSPLMGGFGLKHPPPQILIKNTPVPADPPTTFNQSKLNSFITQYSTGQVSVEIEWELQKENSKRWNPEIQYTSNYYKSTSVDFAVNTEGVYSEPRPIGTRYLTRNL

SEQ ID NO: 2965 - protein, 738 aa, synthetic construct
  REGION 1..738: note = source = /note="Description of Artificial Sequence: Synthetic polypeptide"
MAADGYLPDWLEDNLSEGIREWWALKPGAPKPKANQQKQDDGRGLVLPGYKYLGPFNGLDKGEPVNAADAAALEHDKAYDQQLQAGDNPYLRYNHADAEFQERLQEDTSFGGNLGRAVFQAKKRVLEPLGLVEEGAKTAPGKKRPVEPSPQRSPDSSTGIGKKGQQPARKRLNFGQTGDSESVPDPQPLGEPPAAPSGVGPNTMAAGGGAPMADNNEGADGVGSSSGNWHCDSTWLGDRVITTSTRTWALPTYNNHLYKQISNGTSGGATNDNTYFGYSTPWGYFDFNRFHCHFSPRDWQRLINNNWGFRPKRLSFKLFNIQVKEVTQNEGTKTIANNLTSTIQVFTDSEYQLPYVLGSAHQGCLPPFPADVFTIPQYGYLTLNNGSQAVGRSSFYCLEYFPSQMLRTGNNFQFTYTFEDVPFHSSYAHSQSLDRLMNPLIDQYLYYLSRIQTTGGTANTQTLGFSQGGPNTMANQAKNWLPGPCYRQQRVSTTTGQNNNSNFAWTAGTKYHLNGRNSLANPGIAMATHKDDEERFFPSNGILIFGKQNAARDNADYSDVMPTSEEEIKTTNPVATEEYGIVADNLQQQNTAPQIGTVSSQGALPGMVWQNRDVYLQGPIWAKIPHTDGNFHPSPLMGGFGLKHPPPQILIKNTPVPADPPTTFNQSKLNSFITQYSTGQVSVEIEWELQKENSKRWNPEIQYTSNYYKSTSVDFAVNTEGVYSEPRPIGTRYLTRNL

SEQ ID NO: 2966 - protein, 738 aa, synthetic construct
  REGION 1..738: note = source = /note="Description of Artificial Sequence: Synthetic polypeptide"
MAADGYLPDWLEDNLSEGIREWWALKPGAPKPKANQQKQDDGRGLVLPGYKYLGPFNGLDKGEPVNAADAAALEHDKAYDQQLQAGDNPYLRYNHADAEFQERLQEDTSFGGNLGRAVFQAKKRVLEPLGLVEEGAKTAPGKKRPVEPSPQRSPDSSTGIGKKGQQPARKRLNFGQTGDSESVPDPQPLGEPPAAPSGVGPNTMAAGGGAPMADNNEGADGVGSSSGNWHCDSTWLGDRVITTSTRTWALPTYNNHLYKQISNGTSGGATNDNTYFGYSTPWGYFDFNRFHCHFSPRDWQRLINNNWGFRPKRLSFKLFNIQVKEVTQNEGTKTIANNLTSTIQVFTDSEYQLPYVLGSAHQGCLPPFPADVFTIPQYGYLTLNNGSQAVGRSSFYCLEYFPSQMLRTGNNFQFTYTFEDVPFHSSYAHSQSLDRLMNPLIDQYLYYLSRIQTTGGTANTQTLGFSQGGPNTMANQAKNWLPGPCYRQQRVSTTTGQNNNSNFAWTAGTKYHLNGRNSLANPGIAMATHKDDEERFFPSNGILIFGKQSAARDNADYSDVMPTSEEEIKTTNPVATEEYGIVADNLQQQNTAPQIGTVNSQGALPGMVWQNRDVYLQGPIWAKIPHTDGNFHPSPLMGGFGLKHPPPQILIKNTPVPADPPTTFNQSKLNSFITQYSTGQVSVEIEWELQKENSKRWNPEIQYTSNYYKSTSVDFAVNTEGVYSEPRPIGTRYLTRNL

SEQ ID NO: 2967 - protein, 738 aa, synthetic construct
  REGION 1..738: note = source = /note="Description of Artificial Sequence: Synthetic polypeptide"
MAADGYLPDWLEDNLSEGIREWWALKPGAPKPKANQQKQDDGRGLVLPGYKYLGPFNGLDKGEPVNAADAAALEHDKAYDQQLQAGDNPYLRYNHADAEFQERLQEDTSFGGNLGRAVFQAKKRVLEPLGLVEEGAKTAPGKKRPVEPSPQRSPDSSTGIGKKGQQPARKRLNFGQTGDSESVPDPQPLGEPPAAPSGVGPNTMAAGGGAPMADNNEGADGVGSSSGNWHCDSTWLGDRVITTSTRTWALPTYNNHLYKQISNGTSGGATNDNTYFGYSTPWGYFDFNRFHCHFSPRDWQRLINNNWGFRPKRLSFKLFNIQVKEVTQNEGTKTIANNLTSTIQVFTDSEYQLPYVLGSAHQGCLPPFPADVFTIPQYGYLTLNNGSQAVGRSSFYCLEYFPSQMLRTGNNFQFTYTFEDVPFHSSYAHSQSLDRLMNPLIDQYLYYLSRIQTAGGTANTQTLGFSQGGPNTMANQAKNWLPGPCYRQQRVSTTTGQNNNSNFAWTAGTKYHLNGRNSLANPGIAMATHKDDEERFFPSNGILIFGKQNAARDNADYSDVMPTSEEEIKTTNPVATEEYGIVADNLQQQNTAPQIGTVNSQGALPGMVWQNRDVYLQGPIWAKIPHTDGNFHPSPLMGGFGLKHPPPQILIKNTPVPADPPTTFNQSKLNSFITQYSTGQVSVEIEWELQKENSKRWNPEIQYTSNYYKSTSVDFAVNTEGVYSEPRPIGTRYLTRNL

SEQ ID NO: 2968 - protein, 738 aa, synthetic construct
  REGION 1..738: note = source = /note="Description of Artificial Sequence: Synthetic polypeptide"
MAADGYLPDWLEDNLSEGIREWWALKPGAPKPKANQQKQDDGRGLVLPGYKYLGPFNGLDKGEPVNAADAAALEHDKAYDQQLQAGDNPYLRYNHADAEFQERLQEDTSFGGNLGRAVFQAKKRVLEPLGLVEEGAKTAPGKKRPVEPSPQRSPDSSTGIGKKGQQPARKRLNFGQTGDSESVPDPQPLGEPPAAPSGVGPNTMAAGGGAPMADNNEGADGVGSSSGNWHCDSTWLGDRVITTSTRTWALPTYNNHLYKQISNGTSGGATNDNTYFGYSTPWGYFDFNRFHCHFSPRDWQRLINNNWGFRPKRLSFKLFNIQVKEVTQNEGTKTIANNLTSTIQVFTDSEYQLPYVLGSAHQGCLPPFPADVFTIPQYGYLTLNNGSQAVGRSSFYCLEYFPSQMLRTGNNFQFTYTFEDVPFHSSYAHSQNLDRLMNPLIDQYLYYLSRIQTTGGTANTQTLGFSQGGPNTMANQAKNWLPGPCYRQQRVSTTTGQNNNSNFAWTAGTKYHLNGRNSLANPGIAMATHKDDEERFFPSNGILIFGKQNAARDNADYSDVMPTSEEEIKTTNPVATEEYGIVADNLQQQNTAPQIGTVNSQGALPGMVWQNRDVYLQGPIWAKIPHTDGNFHPSPLMGGFGLKHPPPQILIKNTPVPADPPTTFNQSKLNSFITQYSTGQVSVEIEWELQKENSKRWNPEIQYTSNYYKSTSVDFAVNTEGVYSEPRPIGTRYLTRNL

SEQ ID NO: 2969 - protein, 738 aa, synthetic construct
  REGION 1..738: note = source = /note="Description of Artificial Sequence: Synthetic polypeptide"
MAADGYLPDWLEDNLSEGIREWWALKPGAPKPKANQQKQDDGRGLVLPGYKYLGPFNGLDKGEPVNAADAAALEHDKAYDQQLQAGDNPYLRYNHADAEFQERLQEDTSFGGNLGRAVFQAKKRVLEPLGLVEEGAKTAPGKKRPVEPSPQRSPDSSTGIGKKGQQPARKRLNFGQTGDSESVPDPQPLGEPPAAPSGVGPNTMAAGGGAPMADNNEGADGVGSSSGNWHCDSTWLGDRVITTSTRTWALPTYNNHLYKQISNGTSGGATNDNTYFGYSTPWGYFDFNRFHCHFSPRDWQRLINNNWGFRPKRLSFKLFNIQVKAVTQNEGTKTIANNLTSTIQVFTDSEYQLPYVLGSAHQGCLPPFPADVFTIPQYGYLTLNNGSQAVGRSSFYCLEYFPSQMLRTGNNFQFTYTFEDVPFHSSYAHSQSLDRLMNPLIDQYLYYLSRIQTTGGTANTQTLGFSQGGPNTMANQAKNWLPGPCYRQQRVSTTTGQNNNSNFAWTAGTKYHLNGRNSLANPSIAMATHKDDEERFFPSNGILIFGKQNAARDNADYSDVMPTSEEEIKTTNPVATEEYGIVADNLQQQNTAPQIGTVNSQGALPGMVWQNRDVYLQGPIWAKIPHTDGNFHPSPLMGGFGLKHPPPQILIKNTPVPADPPTTFNQSKLNSFITQYSTGQVSVEIEWELQKENSKRWNPEIQYTSNYYKSTSVDFAVNTEGVYSEPRPIGTRYLTRNL

SEQ ID NO: 2970 - protein, 738 aa, synthetic construct
  REGION 1..738: note = source = /note="Description of Artificial Sequence: Synthetic polypeptide"
MAADGYLPDWLEDNLSEGIREWWALKPGAPKPKANQQKQDDGRGLVLPGYKYLGPFNGLDKGEPVNAADAAALEHDKAYDQQLQAGDNPYLRYNHADAEFQERLQEDTSFGGNLGRAVFQAKKRVLEPLGLVEEGAKTAPGKKRPVEPSPQRSPDSSTGIGKKGQQPARKRLNFGQTGDSESVPDPQPLGEPPAAPSGVGPNTMAAGGGAPMADNNEGADGVGSSSGNWHCDSTWLGDRVITTSTRTWALPTYNNHLYKQISNGTSGGATNDNTYFGYSTPWGYFDFNRFHCHFSPRDWQRLINNNWGFRPKRLSFKLFNIQVKEVTQNEGTKTIANNLTSTIQVFTDSEYQLPYVLGSAHQGCLPPFPADVFTIPQYGYLTLNNGSQAVGRSSFYCLEYFPSQMLRTGNNFQFTYTFEDVPFHSSYAHSQSLDRLMNPLIDQYLYYLSRIQTTGGTANTQTLGFSQGGPNTMANQAKNWLPGPCYRQQRVSTTTGQNNNSNFAWTAGTKYHLNGRNSLANPGIAMATHKDDEERFFPSNGILIFGKQNAARDNADYSDVMPTSEEEIKTTNPVATEEYDIVADNLQQQNTAPQIGTVNSQGALPGMVWQNRDVYLQGPIWAKIPHTDGNFHPSPLMGGFGLKHPPPQILIKNTPVPADPPTTFNQSKLNSFITQYSTGQVSVEIEWELQKENSKRWNPEIQYTSNYYKSTSVDFAVNTEGVYSEPRPIGTRYLTRNL

SEQ ID NO: 2971 - protein, 738 aa, synthetic construct
  REGION 1..738: note = source = /note="Description of Artificial Sequence: Synthetic polypeptide"
MAADGYLPDWLEDNLSEGIREWWALKPGAPKPKANQQKQDDGRGLVLPGYKYLGPFNGLDKGEPVNAADAAALEHDKAYDQQLQAGDNPYLRYNHADAEFQERLQEDTSFGGNLGRAVFQAKKRVLEPLGLVEEGAKTAPGKKRPVEPSPQRSPDSSTGIGKKGQQPARKRLNFGQTGDSESVPDPQPLGEPPAAPSGVGPNTMAAGGGAPMADNNEGADGVGSSSGNWHCDSTWLGDRVITTSTRTWALPTYNNHLYKQISNGTSGGATNDNTYFGYSTPWGYFDFNRFHCHFSPRDWQRLINNNWGFRPKRLSFKLFNIQVKEVTQNEGTKTIANNLTSTIQVFTDSEYQLPYVLGSAHQGCLPPFPADVFTIPQYGYLTLNNGSQAVGRSSFYCLEYFPSQMLRTGNNFQFTYTFEDVPFHSSYAHSQSLDRLMNPLIDQYLYYLSRIQTTGGTANTQTPGFSQGGPNTMANQAKNWLPGPCYRQQRVSTTTGQNNNSNFAWTAGTKYHLNGRNSLANPGIAMATHKDDEERFFPSNGILIFGKQNAARDNADYSDVMPTSEEEIKTTNPVATEEYGIVADNLQQQNTAPQIGTVNSQGALPGMVWQNRDVYLQGPIWAKIPHTDGNFHPSPLMGGFGLKHPPPQILIKNTPVPADPPTTFNQSKLNSFITQYSTGQVSVEIEWELQKENSKRWNPEIQYTSNYYKSTSVDFAVNTEGVYSEPRPIGTRYLTRNL

SEQ ID NO: 2972 - protein, 738 aa, synthetic construct
  REGION 1..738: note = source = /note="Description of Artificial Sequence: Synthetic polypeptide"
MAADGYLPDWLEDNLSEGIREWWALKPGAPKPKANQQKQDDGRGLVLPGYKYLGPFNGLDKGEPVNAADAAALEHDKAYDQQLQAGDNPYLRYNHADAEFQERLQEDTSFGGNLGRAVFQAKKRVLEPLGLVEEGAKTAPGKKRPVEPSPQRSPDSSTGIGKKGQQPARKRLNFGQTGDSESVPDPQPLGEPPAAPSGVGPNTMAAGGGAPMADNNEGADGVGSSSGNWHCDSTWLGDRVITTSTRTWALPTYNNHLYKQISNGTSGGATNDNTYFGYSTPWGYFDFNRFHCHFSPRDWQRLINNNWGFRPKRLSFKLFNIQVKEVTQNEGTKTIANNLTSTIQVFTDSEYQLPYVLGSAHQGCLPPFPADVFTIPQYGYLTLNNGSQAVGRSSSYCLEYFPSQMLRTGNNFQFTYTFEDVPFHSSYAHSQSLDRLMNPLIDQYLYYLSRIQTTGGTANTQTLGFSQGGPNTMANQAKNWLPGPCYRQQRVSTTTGQNNNSNFAWTAGTKYHLNGRNSLANPGIAMATHKDDEERFFPSNGILIFGKQNAARDNADYSDVMPTSEEEIKTTNPVATEEYGIVADNLQQQNTAPQIGTVNSQGALPGMVWQNRDVYLQGPIWAKIPHTDGNFHPSPLMGGFGLKHPPPQILIKNTPVPADPPTTFNQSKLNSFITQYSTGQVSVEIEWELQKENSKRWNPEIQYTSNYYKSTSVDFAVNTEGVYSEPRPIGTRYLTRNL

SEQ ID NO: 2973 - protein, 738 aa, synthetic construct
  REGION 1..738: note = source = /note="Description of Artificial Sequence: Synthetic polypeptide"
MAADGYLPDWLEDNLSEGIREWWALKPGAPKPKANQQKQDDGRGLVLPGYKYLGPFNGLDKGEPVNAADAAALEHDKAYDQQLQAGDNPYLRYNHADAEFQERLQEDTSFGGNLGRAAFQAKKRVLEPLGLVEEGAKTAPGKKRPVEPSPQRSPDSSTGIGKKGQQPARKRLNFGQTGDSESVPDPQPLGEPPAAPSGVGPNTMAAGGGAPMADNNEGADGVGSSSGNWHCDSTWLGDRVITTSTRTWALPTYNNHLYKQISNGTSGGATNDNTYFGYSTPWGYFDFNRFHCHFSPRDWQRLINNNWGFRPKRLSFKLFNIQVKEVTQNEGTKTIANNLTSTIQVFTDSEYQLPYVLGSAHQGCLPPFPADVFTIPQYGYLTLNNGSQAVGRSSFYCLEYFPSQMLRTGNNFQFTYTFEDVPFHSSYAHSQSLDRLMNPLIDQYLYYLSRIQTTGGTANTQTLGFSQGGPNTMANQAKNWLPGPCYRQQRVSTTTGQNNNSNFAWTAGTKYHLNGRNSLANPGIAMATHKDDEERFFPSNGILIFGKQNAARDNADYSDVMPTSEEEIKTTNPVATEEYGIVADNLQQQNTAPQIGTVNSQGALPGMVWQNRDVYLQGPIWAKIPHTDGNFHPSPLMGGFGLKHPPPQILIKNTPVPADPPTTFNQSKLNSFITQYSTGQVSVEIEWELQKENSKRWNPEIQYTSNYYKSTSVDFAVNTEGVYSEPRPIGTRYLTRNL

SEQ ID NO: 2974 - protein, 738 aa, synthetic construct
  REGION 1..738: note = source = /note="Description of Artificial Sequence: Synthetic polypeptide"
MAADGYLPDWLEDNLSEGIREWWALKPGAPKPKANQQKQDDGRGLVLPGYKYLGPFNGLDKGEPVNAADAAALEHDKAYDQQLQAGDNPYLRYNHADAEFQERLQEDTSFGGNLGRAVFQAKKRVLEPLGLVEEGAKTAPGKKRPVEPSPQRSPDSSTGIGKKGQQPARKRLNFGQTGDSESVPDPQPLGEPPAAPSGVGPNTMAAGGGAPMADNNEGADGVGSSSGNWHCDSTWLGDRVITTSTRTWALPTYNNHLYKQISNGTSGGATDDNTYFGYSTPWGYFDFNRFHCHFSPRDWQRLINNNWGFRPKRLSFKLFNIQVKEVTQNEGTKTIANNLTSTIQVFTDSEYQLPYVLGSAHQGCLPPFPADVFTIPQYGYLTLNNGSQAVGRSSFYCLEYFPSQMLRTGNNFQFTYTFEDVPFHSSYAHSQSLDRLMNPLIDQYLYYLSRIQTTGGTANTQTLGFSQGGPNTMANQAKNWLPGPCYRQQRVSTTTGQNNNSNFAWTAGTKYHLNGRNSLANPGIAMATHKDDEERFFPSNGILIFGKQNAARDNADYSDVMPTSEEEIKTTNPVATEEYGIVADNLQQQNTAPQIGTVNSQGALPGMVWQNRDVYLQGPIWAKIPHTDGNFHPSPLMGGFGLKHPPPQILIKNTPVPADPPTTFNQSKLNSFITQYSTGQVSVEIEWELQKENSKRWNPEIQYTSNYYKSTSVDFAVNTEGVYSEPRPIGTRYLTRNL

SEQ ID NO: 2975 - protein, 738 aa, synthetic construct
  REGION 1..738: note = source = /note="Description of Artificial Sequence: Synthetic polypeptide"
MAADGYLPDWLEDNLSEGIREWWALKPGAPKPKANQQKQDDGRGLVLPGYKYLGPFNGLDKGEPVNAADAAALEHDKAYDQQLQAGDNPYLRYNHADAEFQERLQEDTSFGGNLGRAVFQAKKRVLEPLGLVEEGAKTAPGKKRPVEPSPQRSPDSSTGIGKKGQQPARKRLNFGQTGDSESVPDPQPLGEPPAAPSGVGPNTMAAGGGAPMADNNEGADGVGSSSGNWHCDSTWLGDRVITTSTRTWALPTYNNHLYKQISNGTSGGATNDNTYFGYSTPWGYFDFNRFHCHFSPRDWQRLINNNWGFRPKRLSFKLFNIQVKEVTQNEGTKTIANNLTSTIQVFTDSEYQLPYVLGSAHQGCLPPFPADVFTIPQYGYLTLNNGSQAVGRSSFYCLEYFPSQMLRTGNNFQFTYTFEDVPFHSSYAHSQSLDRLMNPLIDQYLYYLSRIQTTGGTANTQTLGFSQGGPNTMANQAKNWLPGPCYRQQRVSTTTGQNNNSNFAWTAGTKYHLNGRNSLANPGIAMATHKDDEERFFPSNGILIFGKQNATRDNADYSDVMPTSEEEIKTTNPVATEEYGIVADNLQQQNTAPQIGTVNSQGALPGMVWQNRDVYLQGPIWAKIPHTDGNFHPSPLMGGFGLKHPPPQILIKNTPVPADPPTTFNQSKLNSFITQYSTGQVSVEIEWELQKENSKRWNPEIQYTSNYYKSTSVDFAVNTEGVYSEPRPIGTRYLTRNL

SEQ ID NO: 2976 - protein, 738 aa, synthetic construct
  REGION 1..738: note = source = /note="Description of Artificial Sequence: Synthetic polypeptide"
MAADGYLPDWLEDNLSEGIREWWALKPGAPKPKANQQKQDDGRGLVLPGYKYLGPFNGLDKGEPVNAADAAALEHDKAYDQQLQAGDNPYLRYNHADAEFQERLQEDTSFGGNLGRAVFQAKKRVLEPLGLVEEGAKTAPGKKRPVEPSPQRSPDSSTGIGKKGQQPARKRLNFGQTGDSESVPDPQPLGEPPAAPSGVGPNTMAAGGGAPMADNNEGADGVGSSSGNWHCDSTWLGDRVITTSTRTWALPTYNNHLYKQISNGTSGGATNDNTYFGYSTPWGYFDFNRFHCHFSPRDWQRLINNNWGFRPKRLSFKLFNIQVKEVTQNEGTKTIANNLTSTIQVFTDSEYQLPYVLGSAHQGCLPPFPADVFTIPQYGYLTLNNGSQAVGRSSFYCLEYFPSQMLRTGNNFQFTYTFEDVPFHSSYAHSQSLDRLMNPLIDQYLYYLSRIQTTGGTANTQTLGFSQGGPNTMANQAKNWLPGPCYRQQRVSTTTGQNNNSNFAWTAGTKYHLNGRNSLANPGIAMATHKDDEERFFPSNGILIFGKQNAARDNADYSDVMPTSEEEIKTTNPVATEEHGIVADNLQQQNTAPQIGTVNSQGALPGMVWQNRDVYLQGPIWAKIPHTDGNFHPSPLMGGFGLKHPPPQILIKNTPVPADPPTTFNQSKLNSFITQYSTGQVSVEIEWELQKENSKRWNPEIQYTSNYYKSTSVDFAVNTEGVYSEPRPIGTRYLTRNL

SEQ ID NO: 2977 - protein, 738 aa, synthetic construct
  REGION 1..738: note = source = /note="Description of Artificial Sequence: Synthetic polypeptide"
MAADGYLPDWLEDNLSEGIREWWALKPGAPKPKANQQKQDDGRGLVLPGYKYLGPFNGLDKGEPVNAADAAALEHDKAYDQQLQAGDNPYLRYNHADAEFQERLQEDTSFGGNLGRAVFQAKKRVLEPLGLVEEGAKTAPGKKRPVEPSPQRSPDSSTGIGKKGQQPARKRLNFGQTGDSESVPDPQPLGEPPAAPSGVGPNTMAAGGGAPMADNNEGADGVGSSSGNWHCDSTWLGDRVITTSTRTWALPTYNNHLYKQISNGTSGGATNDNTYFGYSTPWGYFDFNRFHCHFSPRDWQRLINNNWGFRPKRLSFKLFNIQVKEVTQNEGTKTIANNLTSTIQVFTDSEYQLPYVLGSAHQGCLPPFPADVFTIPQYGYLTLNNGSQAVGRSSFYCLEYFPSQMLRTGNNFQFTYTFEDVPFHSSYARSQSLDRLMNPLIDQYLYYLSRIQTTGGTANTQTLGFSQGGPNTMANQAKNWLPGPCYRQQRVSTTTGQNNNSNFAWTAGTKYHLNGRNSLANPGIAMATHKDDEERFFPSNGILIFGKQNAARDNADYSDVMPTSEEEIKTTNPVATEEYGIVADNLQQQNTAPQIGTVNSQGALPGMVWQNRDVYLQGPIWAKIPHTDGNFHPSPLMGGFGLKHPPPQILIKNTPVPADPPTTFNQSKLNSFITQYSTGQVSVEIEWELQKENSKRWNPEIQYTSNYYKSTSVDFAVNTEGVYSEPRPIGTRYLTRNL

SEQ ID NO: 2978 - protein, 738 aa, synthetic construct
  REGION 1..738: note = source = /note="Description of Artificial Sequence: Synthetic polypeptide"
MAADGYLPDWLEDNLSEGIREWWALKPGAPKPKANQQKQDDGRGLVLPGYKYLGPFNGLDKGEPVNAADAAALEHDKAYDQQLQAGDNPYLRYNHADAEFQERLQEDTSFGGNLGRAVFQAKKRVLEPLGLVEEGAKTAPGKKRPVEPSPQRSPDSSTGIGKKGQQPARKRLNFGQTGDSESVPDPQPLGEPPAAPSGVGPNTMAAGGGAPMADNNEGADGVGSSSGNWHCDSTWLGDRVITTSTRTWALPTYNNHLYKQISNGTSGGATNDNTYFGYSTPWGYFDFNRFHCHFSPRDWQRLINNNWGFRPKRLSFKLFNIQVKEVTQNEGTKTIANNLTSTIQVFTDSEYQLPYVLGSAHQGCLPPLPADVFTIPQYGYLTLNNGSQAVGRSSFYCLEYFPSQMLRTGNNFQFTYTFEDVPFHSSYAHSQSLDRLMNPLIDQYLYYLSRIQTTGGTANTQTLGFSQGGPNTMANQAKNWLPGPCYRQQRVSTTTGQNNNSNFAWTAGTKYHLNGRNSLANPGIAMATHKDDEERFFPSNGILIFGKQNAARDNADYSDVMPTSEEEIKTTNPVATEEYGIVADNLQQQNTAPQIGTVNSQGALPGMVWQNRDVYLQGPIWAKIPHTDGNFHPSPLMGGFGLKHPPPQILIKNTPVPADPPTTFNQSKLNSFITQYSTGQVSVEIEWELQKENSKRWNPEIQYTSNYYKSTSVDFAVNTEGVYSEPRPIGTRYLTRNL

SEQ ID NO: 2979 - protein, 738 aa, synthetic construct
  REGION 1..738: note = source = /note="Description of Artificial Sequence: Synthetic polypeptide"
MAADGYLPDWLEDNLSEGIREWWALKPGAPKPKANQQKQDDGRGLVLPGYKYLGPFNGLDKGEPVNAADAAALEHDKAYDQQLQAGDNPYLRYNHADAEFQERLQEDTSFGGNLGRAVFQAKKRVLEPLGLVEEGAKTAPGKKRPVEPSPQRSPDSSTGIGKKGQQPARKRLNFGQTGDSESVPDPQPLGEPPAAPSGVGPNTMAAGGGAPMADNNEGADGVGSSSGNWHCDSTWLGDRVITTSTRTRALPTYNNHLYKQISNGTSGGATNDNTYFGYSTPWGYFDFNRFHCHFSPRDWQRLINNNWGFRPKRLSFKLFNIQVKEVTQNEGTKTIANNLTSTIQVFTDSEYQLPYVLGSAHQGCLPPFPADVFTIPQYGYLTLNNGSQAVGRSSFYCLEYFPSQMLRTGNNFQFTYTFEDVPFHSSYAHSQSLDRLMNPLIDQYLYYLSRIQTTGGTANTQTLGFSQGGPNTMANQAKNWLPGPCYRQQRVSTTTGQNNNSNFAWTAGTKYHLNGRNSLANPGIAMATHKDDEERFFPSNGILIFGKQNAARDNADYSDVMPTSEEEIKTTNPVATEEYGIVADNLQQQNTAPQIGTVNSQGALPGMVWQNRDVYLQGPIWAKIPHTDGNFHPSPLMGGFGLKHPPPQILIKNTPVPADPPTTFNQSKLNSFITQYSTGQVSVEIEWELQKENSKRWNPEIQYTSNYYKSTSVDFAVNTEGVYSEPRPIGTRYLTRNL

SEQ ID NO: 2980 - protein, 738 aa, synthetic construct
  REGION 1..738: note = source = /note="Description of Artificial Sequence: Synthetic polypeptide"
MAADGYLPDWLEDNLSEGIREWWALKPGAPKPKANQQKQDDGRGLVLPGYKYLGPFNGLDKGEPVNAADAAALEHDKAYDQQLQAGDNPYLRYNHADAEFQERLQEDTSFGGNLGRAVFQAKKRVLEPLGLVEEGAKTAPGKKRPVEPSPQRSPDSSTGIGKKGQQPARKRLNFGQTGDSESVPDPQPLGEPPAAPSGVGPNTMAAGGGAPMADNNEGADGVGSSSGNWHCDSTWLGDRVITTSTRTWALPTYNNHLYKQISNGTSGGATNDNTYFGYSTPWGYFDFNRFHCHFSPRDWQRLINNNWGFRPKRLSFKLFNIQVKEVTQNEGTKTIANNLTSTIQVFTDSEYQLPYVLGSAHQGCLPPFPADVFTIPQYGYLTLNNGSQAVGRSSFYCLEYFPSQMLRTGNNFQFTYTFEDVPFHSSYAHSQSLDRLMNPLIDQYLYYLSRIQTTGGTANTQTLGFSQGGPNTMANQAKNWLPGPCYRQQRVSTTTGQNNNSNFAWTAGTKYHLNGRNSLANPGIAMTTHKDDEERFFPSNGILIFGKQNAARDNADYSDVMPTSEEEIKTTNPVATEEYGIVADNLQQQNTAPQIGTVNSQGALPGMVWQNRDVYLQGPIWAKIPHTDGNFHPSPLMGGFGLKHPPPQILIKNTPVPADPPTTFNQSKLNSFITQYSTGQVSVEIEWELQKENSKRWNPEIQYTSNYYKSTSVDFAVNTEGVYSEPRPIGTRYLTRNL

SEQ ID NO: 2981 - protein, 738 aa, synthetic construct
  REGION 1..738: note = source = /note="Description of Artificial Sequence: Synthetic polypeptide"
MAADGYLPDWLEDNLSEGIREWWALKPGAPKPKANQQKQDDGRGLVLPGYKYLGPFNGLDKGEPVNAADAAALEHDKAYDQQLQAGDNPYLRYNHADAEFQERLQEDTSFGGNLGRAVFQAKKRVLEPLGLVEEGAKTAPGKKRPVEPSPQRSPDSSTGIGKKGQQPARKRLNFGQTGDSESVPDPQPLGEPPAAPSGVGPNTMAAGGGAPMADNNEGADGVGSSSGNWHCDSTWLGDRVITTSTRTWALPTYNNHLYKQISNGTSGGATNDNTYFGYSTPWGYFDFNRFHCHFSPRDWQRLINNNWGFRPKRLSFKLFNIQVKEVTQNEGTKTIANNLTSTIQVFTDSEYQLPYVLGSAHQGCLPPFPADVFTIPQYGYLTLNNGSQAVGRSSFYCLEYFPSQMLRTGNNFQFTYTFEDVPFHSSYAHSQSLDRLMNPLIDQYLYYLSRIQTTGGTANTQTLGFSQGGPNTMANQAKNWLPGPCYRQQRVSTTTGQNNNSNFAWTAGTKYHLNGRNSLANPGIAMATHKDDEERFFPSNGILIFGKQNAARDNADYSDVMPTSEEEIKTTNPVATEEYGIVADNLQQQNTAPQIGTVNSQGVLPGMVWQNRDVYLQGPIWAKIPHTDGNFHPSPLMGGFGLKHPPPQILIKNTPVPADPPTTFNQSKLNSFITQYSTGQVSVEIEWELQKENSKRWNPEIQYTSNYYKSTSVDFAVNTEGVYSEPRPIGTRYLTRNL

SEQ ID NO: 2982 - protein, 738 aa, synthetic construct
  REGION 1..738: note = source = /note="Description of Artificial Sequence: Synthetic polypeptide"
MAADGYLPDWLEDNLSEGIREWWALKPGAPKPKANQQKQDDGRGLVLPGYKYLGPFNGLDKGEPVNAADAAALEHDKAYDQQLQAGDNPYLRYNHADAEFQERLQEDTSFGGNLGRAVFQAKKRVLEPLGLVEEGAKTAPGKKRPVEPSPQRSPDSSTGIGKKGQQPARKRLNFGQTGDSESVPDPQPLGEPPAAPSGVGPNTMAAGGGAPMADNNEGADGVGSSSGNWHCDSTWLGDRVITTSTRTWALPTYNNHLYKQISNGTSGGATNDNTYFGYSTPWGYFDFNRFHCHFSPRDWQRLVNNNWGFRPKRLSFKLFNIQVKEVTQNEGTKTIANNLTSTIQVFTDSEYQLPYVLGSAHQGCLPPFPADVFTIPQYGYLTLNNGSQAVGRSSFYCLEYFPSQMLRTGNNFQFTYTFEDVPFHSSYAHSQSLDRLMNPLIDQYLYYLSRIQTTGGTANTQTLGFSQGGPNTMANQAKNWLPGPCYRQQRVSTTTGQNNNSNFAWTAGTKYHLNGRNSLANPGIAMATHKDDEERFFPSNGILIFGKQNAARDNADYSDVMPTSEEEIKTTNPVATEEYGIVADNLQQQNTAPQIGTVNSQGALPGMVWQNRDVYLQGPIWAKIPHTDGNFHPSPLMGGFGLKHPPPQILIKNTPVPADPPTTFNQSKLNSFITQYSTGQVSVEIEWELQKENSKRWNPEIQYTSNYYKSTSVDFAVNTEGVYSEPRPIGTRYLTRNL

SEQ ID NO: 2983 - protein, 738 aa, synthetic construct
  REGION 1..738: note = source = /note="Description of Artificial Sequence: Synthetic polypeptide"
MAADGYLPDWLEDNLSEGIREWWALKPGAPKPKANQQKQDDGRGLVLPGYKYLGPFNGLDKGEPVNAADAAALEHDKAYDQQLQAGDNPYLRYNHADAEFRERLQEDTSFGGNLGRAVFQAKKRVLEPLGLVEEGAKTAPGKKRPVEPSPQRSPDSSTGIGKKGQQPARKRLNFGQTGDSESVPDPQPLGEPPAAPSGVGPNTMAAGGGAPMADNNEGADGVGSSSGNWHCDSTWLGDRVITTSTRTWALPTYNNHLYKQISNGTSGGATNDNTYFGYSTPWGYFDFNRFHCHFSPRDWQRLINNNWGFRPKRLSFKLFNIQVKEVTQNEGTKTIANNLTSTIQVFTDSEYQLPYVLGSAHQGCLPPFPADVFTIPQYGYLTLNNGSQAVGRSSFYCLEYFPSQMLRTGNNFQFTYTFEDVPFHSSYAHSQSLDRLMNPLIDQYLYYLSRIQTTGGTANTQTLGFSQGGPNTMANQAKNWLPGPCYRQQRVSTTTGQNNNSNFAWTAGTKYHLNGRNSLANPGIAMATHKDDEERFFPSNGILIFGKQNAARDNADYSDVMPTSEEEIKTTNPVATEEYGIVADNLQQQNTAPQIGTVNSQGALPGMVWQNRDVYLQGPIWAKIPHTDGNFHPSPLMGGFGLKHPPPQILIKNTPVPADPPTTFNQSKLNSFITQYSTGQVSVEIEWELQKENSKRWNPEIQYTSNYYKSTSVDFAVNTEGVYSEPRPIGTRYLTRNL

SEQ ID NO: 2984 - protein, 738 aa, synthetic construct
  REGION 1..738: note = source = /note="Description of Artificial Sequence: Synthetic polypeptide"
MAADGYLPDWLEDNLSEGIREWWALKPGAPKPKANQQKQDDGRGLVLPGYKYLGPFNGLDKGEPVNAADAAALEHDKAYDQQLQAGDNPYLRYNHADAEFQERLQEDTSFGGNLGRAVFQAKKRVLEPLGLVEEGAKTAPGKKRPVEPSPQRSPDSSTGIGKKGQQPARKRLNFGQTGDSESVPDPQPLGEPPAAPSGVGPNTMAAGGGAPMADNNEGADGVGSSSGNWHCDSTWLGDRVITTSTRTWALPTYNNHLYKQISNGTSGGATNDNTYFGYSTPWGYFDFNRFHCHFSPRDWQRLINNNWGFRPKRLSFKLFNIQVKEVTQNEGTKTIANNLTSTIQVFTDSEYQLPYVLGSAHQGCLPPFPADVFTIPQYGYPTLNNGSQAVGRSSFYCLEYFPSQMLRTGNNFQFTYTFEDVPFHSSYAHSQSLDRLMNPLIDQYLYYLSRIQTTGGTANTQTLGFSQGGPNTMANQAKNWLPGPCYRQQRVSTTTGQNNNSNFAWTAGTKYHLNGRNSLANPGIAMATHKDDEERFFPSNGILIFGKQNAARDNADYSDVMPTSEEEIKTTNPVATEEYGIVADNLQQQNTAPQIGTVNSQGALPGMVWQNRDVYLQGPIWAKIPHTDGNFHPSPLMGGFGLKHPPPQILIKNTPVPADPPTTFNQSKLNSFITQYSTGQVSVEIEWELQKENSKRWNPEIQYTSNYYKSTSVDFAVNTEGVYSEPRPIGTRYLTRNL

SEQ ID NO: 2985 - protein, 738 aa, synthetic construct
  REGION 1..738: note = source = /note="Description of Artificial Sequence: Synthetic polypeptide"
MAADGYLPDWLEDNLSEGIREWWALKPGAPKPKANQQKQDDGRGLVLPGYKYLGPFNGLDKGEPVNAADAAALEHDKAYDQQLQAGDNPYLRYNHADAEFQERLQEDTSFGGNLGRAVFQAKKRVLEPLGLVEEGAKTAPGKKRPVEPSPQRSPDSSTGIGKKGQQPARKRLNFGQTGDSESVPDPQPLGEPPAAPSGVGPNTMTAGGGAPMADNNEGADGVGSSSGNWHCDSTWLGDRVITTSTRTWALPTYNNHLYKQISNGTSGGATNDNTYFGYSTPWGYFDFNRFHCHFSPRDWQRLINNNWGFRPKRLSFKLFNIQVKEVTQNEGTKTIANNLTSTIQVFTDSEYQLPYVLGSAHQGCLPPFPADVFTIPQYGYLTLNNGSQAVGRSSFYCLEYFPSQMLRTGNNFQFTYTFEDVPFHSSYAHSQSLDRLMNPLIDQYLYYLSRIQTTGGTANTQTLGFSQGGPNTMANQAKNWLPGPCYRQQRVSTTTGQNNNSNFAWTAGTKYHLNGRNSLANPGIAMATHKDDEERFFPSNGILIFGKQNAARDNADYSDVMPTSEEEIKTTNPVATEEYGIVADNLQQQNTAPQIGTVNSQGALPGMVWQNRDVYLQGPIWAKIPHTDGNFHPSPLMGGFGLKHPPPQILIKNTPVPADPPTTFNQSKLNSFITQYSTGQVSVEIEWELQKENSKRWNPEIQYTSNYYKSTSVDFAVNTEGVYSEPRPIGTRYLTRNL

SEQ ID NO: 2986 - protein, 738 aa, synthetic construct
  REGION 1..738: note = source = /note="Description of Artificial Sequence: Synthetic polypeptide"
MAADGYLPDWLEDNLSEGIREWWALKPGAPKPKANQQKQDDGRGLVLPGYKYLGPFNGLDKGEPVNAADAAALEHDKAYDQQLQAGDNPYLRYNHADAEFQERLQEDTSFGGNLGRAVFQAKKRVLEPLGLVEEGAKTAPGKKRPVEPSPQRSPDSSTGIGKKGQQPARKRLNFGQTGDSESVPDPQPLGEPPAAPSGVGPNTMAAGGGAPMADNNEGADGVGSSSGNWHCDSTWLGDRVITTSTRTWALPTYNNHLYKQISNGTSGGATNDNTYFGYSTPWGYFDFNRFHCHFSPRDWQRLINNNWGFRPKRLSFKLFNIQVKEVTQNEGTKTIANNLTSTIQVFTDSEYQLPYVLGSAHQGCLPPFPADVFTIPQYGYLTLNNGSQAVGRSSFYCLEYFPSQMLRTGNNFQFTYTFEDVPFHSSYAHSQSLDRLMNPLIDQYLYYLSRIQTTGGTANTQTLGFSQGGPNTMANQAKNWLPGPCYRQQRVSTTTGQNNNSNFAWTAGTKYHLNGRNSLANPGIAMATHKDDEERFFPSNGILIFGKQNAARDNADYSDVMPTSEEEIKTTNPVATEEYGIVTDNLQQQNTAPQIGTVNSQGALPGMVWQNRDVYLQGPIWAKIPHTDGNFHPSPLMGGFGLKHPPPQILIKNTPVPADPPTTFNQSKLNSFITQYSTGQVSVEIEWELQKENSKRWNPEIQYTSNYYKSTSVDFAVNTEGVYSEPRPIGTRYLTRNL

SEQ ID NO: 2987 - protein, 738 aa, synthetic construct
  REGION 1..738: note = source = /note="Description of Artificial Sequence: Synthetic polypeptide"
MAADGYLPDWLEDNLSEGIREWWALKPGAPKPKANQQKQDDGRGLVLPGYKYLGPFNGLDKGEPVNAADAAALEHDKAYDQQLQAGDNPYLRYNHADAEFQERLQEDTSFGGNLGRAVFQAKKRVLEPLGLVEEGAKTAPGKKRPVEPSPQRSPDSSTGIGKKGQQPARKRLNFGQTGDSESVPDPQPLGEPPAAPSGVGPNTMAAGGGAPMADNNEGADGVGSSSGNWHCDSTWLGDRVITTSTRTWALPTYNNHLYKQISNGTSGGATNDNTYFGYSTPWGYFDFNRFHCHFSPRDWQRLINNNWGFRPKRLSFKLFNIQVKEVTQNEGTKTIANNLTSTIQVFTDSEYQLPYVLGSAHQGCLPPFPADVFTIPQYGYLTLNNGSQAVGRSSFYCLEYFPSQMLRTGNNFQFTYTFEDVPFHSSYAHSQSLDRLMNPLIDQYLYYLSRIQTTGGTANTQTLGFSQGGPNTMANQAKNWLPGPCYRQQRVSTTTGQNNNSNFAWTAGTKYHLNGRNSLANPGIAMATHKDDEERFFPSNGILIFGKQNAARDNADYSDVMPTSEEEIKTTNPVATEEYGIVADNLQQQNTAPQIGTVNSQGALPGMVWQNRDVYLQGPIWAKIPHTDGNFHPSPLMGGFGLKHPPPQILIKNTPVPADPPTTFNQSKLNSFITQYSTGQVSVEIEWELQKENSKRWNPEIQYTSNYYKSTSVDFAINTEGVYSEPRPIGTRYLTRNL

SEQ ID NO: 2988 - protein, 738 aa, synthetic construct
  REGION 1..738: note = source = /note="Description of Artificial Sequence: Synthetic polypeptide"
MAADGYLPDWLEDNLSEGIREWWALKPGAPKPKANQQKQDDGRGLVLPGYKYLGPFNGLDKGEPVNAADAAALEHDKAYDQQLQAGDNPYLRYNHADAEFQERLQEDTSFGGNLGRAVFQAKKRVLEPLGLVEEGAKTAPGKKRPVEPSPQRSPDSSTGIGKKGQQPARKRLNFGQTGDSESVPDPQPLGEPPAAPSGVGPNTMAAGGGAPMADNNEGADGVGSSSGNWHCDSTWLGDRVITTSTRTWALPTYNNHLYKQISNGTSGGATNDNTYFGYSTPWGYFDFNRFHCHFSPRDWQRLINNNWGFRPKRLSFKLFNIQVKEVTQNEGTKTIANNLTSTIQVFTDSEYQLPYVLGSAHQGCLPPFPADVFTIPQYGYLTLNNGSQAVGRSSFYCLEYFPSQMLRTGNNFQFTYTFEDVPFHSSYAHSQSLDRLMNPLIDQYLYYLSRIQTTGGTANTQTLGFSQGGPNTMANQAKNWLPGPCYRQQRVSTTTGQNNNSNFAWTAGTKYHLNGRNSLANPGIAMATHKDDEERFFPSNGILIFGKQNAARDNADYSDVMPTSEEEIKTTNPVATEEYGIVADNLQQQNTAPQIGTVNSQGALPGMVWQNRDVYLQGPIWAKIPHADGNFHPSPLMGGFGLKHPPPQILIKNTPVPADPPTTFNQSKLNSFITQYSTGQVSVEIEWELQKENSKRWNPEIQYTSNYYKSTSVDFAVNTEGVYSEPRPIGTRYLTRNL

SEQ ID NO: 2989 - protein, 738 aa, synthetic construct
  REGION 1..738: note = source = /note="Description of Artificial Sequence: Synthetic polypeptide"
MAADGYLPDWLEDNLSEGIREWWALKPGAPKPKANQQKQDDGRGLVLPGYKYLGPFNGLDKGEPVNAADAAALEHDKAYDQQLQAGDNPYLRYNHADAEFQERLQEDTSFGGNLGRAVFQAKKRVLEPLGLVEEGAKTAPGKKRPVEPSPQRSPDSSTGIGKKGQQPARKRLNFGQTGDSESVPDPQPLGEPPAAPSGVGPNTMAAGGGAPMADNNEGADGVGSSSGNWHCNSTWLGDRVITTSTRTWALPTYNNHLYKQISNGTSGGATNDNTYFGYSTPWGYFDFNRFHCHFSPRDWQRLINNNWGFRPKRLSFKLFNIQVKEVTQNEGTKTIANNLTSTIQVFTDSEYQLPYVLGSAHQGCLPPFPADVFTIPQYGYLTLNNGSQAVGRSSFYCLEYFPSQMLRTGNNFQFTYTFEDVPFHSSYAHSQSLDRLMNPLIDQYLYYLSRIQTTGGTANTQTLGFSQGGPNTMANQAKNWLPGPCYRQQRVSTTTGQNNNSNFAWTAGTKYHLNGRNSLANPGIAMATHKDDEERFFPSNGILIFGKQNAARDNADYSDVMPTSEEEIKTTNPVATEEYGIVADNLQQQNTAPQIGTVNSQGALPGMVWQNRDVYLQGPIWAKIPHTDGNFHPSPLMGGFGLKHPPPQILIKNTPVPADPPTTFNQSKLNSFITQYSTGQVSVEIEWELQKENSKRWNPEIQYTSNYYKSTSVDFAVNTEGVYSEPRPIGTRYLTRNL

SEQ ID NO: 2990 - protein, 738 aa, synthetic construct
  REGION 1..738: note = source = /note="Description of Artificial Sequence: Synthetic polypeptide"
MAADGYLPDWLEDNLSEGIREWWALKPGAPKPKANQQKQDDGRGLVLPGYKYLGPFNGLDKGEPVNAADAAALEHDKAYDQQLQAGDNPYLRYNHADAEFQERLQEDTSFGGNLGRAVFQAKKRVLEPLGLVEEGAKTAPGKKRPVEPSPQRSPDSSTGIGKKGQQPARKRLNFGQTGDSESVPDPQPLGEPPAAPSGVGPNTMAAGGGAPMADNNEGADGVGSSSGNWHCDSTWLGDRVITTSTRTWALPTYNNHLYKQISNGTSGGATNDNTYFGYSTPWGYFDFNRFHCHFSPRDWQRLINNNWGFRPKRLSFKLFNIQVKEVTQNEGTKTIANNLTSTIQVFTDSEYQLPYVLGSAHQGCLPPFPADVFTIPQYGYLTLNNGSQAVGRSSFYCLEYFPSQMLRTGNNFQFTYTFEDVPFHSSYAHSQSLDRLMNPLIDQYLYYLSRIQTTGGTANTQTLGFSQGGPNTMANQAKNWLPGPCYRQQRVSTTTGQNNNSNFAWTAGTKYHLNGRNSLANPGIAMATHKDDEERFFPSNGILIFGKQNAARDNADYSDVMPTSEEEIKTTNPVATEEYGIVADNLQQQNTAPQIGTVNSQGALPGMVWQNRDVYLQGPIWAKIPHTDGNFHPSPLMGGFGLKHPPPQILIKNTPVPADPPTTFNQSKLNSFITQYSTGQVSVEIEWELQKENSKRWNPEIQYTSNYYKSTSVDFAVNTEGAYSEPRPIGTRYLTRNL

SEQ ID NO: 2991 - protein, 738 aa, synthetic construct
  REGION 1..738: note = source = /note="Description of Artificial Sequence: Synthetic polypeptide"
MAADGYLPDWLEDNLSEGIREWWALKPGAPKPKANQQKQDDGRGLVLPGYKYLGPFNGLDKGEPVNAADAAALEHDKAYDQQLQAGDNPYLRYNHADAEFQERLQEDTSFGGNLGRAVFQAKKRVLEPLGLVEEGAKTAPGKKRPVEPSPQRSPDSSTGIGKKGQQPARKRLNFGQTGDSESVPDPQPLGEPPAAPSGVGPNTMAAGGGAPMADNNEGADGVGSSSGNWHCDSTWLGDRVITTSTRTWALPTYNNHLYKQISNGTSGGATNDNTYFGYSTPWGYFDFNRFHCHFSPRDWQRLINNNWGFRPKRLSFKLFNIQVKEVTQNEGTKTIANNLTSTIQVFTDSEYQLPYVLGSAHQGCLPPFPADVFTIPQYGYLTLNNGSQAVGRSSFYCLEYFPSQMLRTGNNFQFTYTFEDVPFHSSYAHSQSLDRLMNPLIDQYLYYLSRIQTTGGTANTQTLGFSQGGPNTMANQAKNWLPGPCYRQQRVSTTTGQNNNSNFAWTAGTKYHLNGRNSLANPGIAMATHKDDEERFFPSNGILIFGKQNAARDNADYSDVMPTSEEEIKTTNPVATEECGIVADNLQQQNTAPQIGTVNSQGALPGMVWQNRDVYLQGPIWAKIPHTDGNFHPSPLMGGFGLKHPPPQILIKNTPVPADPPTTFNQSKLNSFITQYSTGQVSVEIEWELQKENSKRWNPEIQYTSNYYKSTSVDFAVNTEGVYSEPRPIGTRYLTRNL

SEQ ID NO: 2992 - protein, 738 aa, synthetic construct
  REGION 1..738: note = source = /note="Description of Artificial Sequence: Synthetic polypeptide"
MAADGYLPDWLEDNLSEGIREWWALKPGAPKPKANQQKQDDGRGLVLPGYKYLGPFNGLDKGEPVNAADAAALEHDKAYDQQLQAGDNPYLRYNHADAEFQERLQEDTSFGGNLGRAVFQAKKRVLEPLGLVEEGAKTAPGKKRPVEPSPQRSPDSSTGIGKKGQQPARKRLNFGQTGDSESVPDPQPLGEPPAAPSGVGPNTMAAGGGAPMADNNEGADGVGSSSGNWHCDSTWLGDRVITTSTRTWALPTYNNHLYKQISNGTSGGATNDNTYFGYSTPWGYFDFNRFHCHFSPRDWQRLINNNWGFRPKRLSFKLFNIQVKEVTQNEGTKTIANNLTSTIQVFTDSEYQLPYVLGSAHQGCLPPFPADVFTIPQYGYLTLNNGSQAVGRSSFYCLEYFPSQMLRTGNNFQFTYTFEDVPFHSSYAHSQSLDRLMNPLIDQYLYYLSRIQTTGGTANTQTLGFSQGGPNTMANQAKNWLPGPCYRQQRVSTTTGQNNNSNFAWTAGTKYHLNGRNSLANPGIAMATHKDDEERFFPSNGILIFGKQNAARDNADYSDVMPTSEEEIKTTNPVATEEYGIVADNLQQQNTAPQIGTVNSQGALPGMVWQNRDVYLQGPIWAKIPHTDGNFHPSPLMGGFGLKHPPPQILIKNTPVPADPPTTFNQSKLNSFITQYSTGQVSVEIEWELQKENSKRWNPEIRYTSNYYKSTSVDFAVNTEGVYSEPRPIGTRYLTRNL

SEQ ID NO: 2993 - protein, 738 aa, synthetic construct
  REGION 1..738: note = source = /note="Description of Artificial Sequence: Synthetic polypeptide"
MAADGYLPDWLEDNLSEGIREWWALKPGAPKPKANQQKQDDGRGLVLPGYKYLGPFNGLDKGEPVNAADAAALEHDKAYDQQLQAGDNPYLRYNHADAEFQERLQEDTSFGGNLGRAVFQAKKRVLEPLGLVEEGAKTAPGKKRPVEPSPQRSPDSSTGIGKKGQQPARKRLNFGQTGDSESVPDPQPLGEPPAAPSGVGPNTMAAGGGAPMADNNEGADGVGSSSGNWHCDSTWLGDRVITTSTRTWALPTYNNHLYKQISNGTSGGATNDNTYFGYSTPWGYFDFNRFHCHFSPRDWQRLINNNWGFRPKRLSFKLFNIQVKEVTQNEGTKTIANNLTSTIQVFTDSEYQLPYVLGSAHQGCLPPFPADVFTIPQYGYLTLNNGSQAVGRSSFYCLEYFPSQMLRTGNNFQFTYTFEDVPFHSSYAHSQSLDRLMNPLIDQYLYYLSRIQTTGGTANTQTLGFSQGGPNTMANQAKNWLPGPCYRQQRVSTTTGQNNNSNFAWTAGTKYHLNGRNSLANPGIAMATHKDDEERFFPSNGILIFGKQNAARDNADCSDVMPTSEEEIKTTNPVATEEYGIVADNLQQQNTAPQIGTVNSQGALPGMVWQNRDVYLQGPIWAKIPHTDGNFHPSPLMGGFGLKHPPPQILIKNTPVPADPPTTFNQSKLNSFITQYSTGQVSVEIEWELQKENSKRWNPEIQYTSNYYKSTSVDFAVNTEGVYSEPRPIGTRYLTRNL

SEQ ID NO: 2994 - protein, 738 aa, synthetic construct
  REGION 1..738: note = source = /note="Description of Artificial Sequence: Synthetic polypeptide"
MAADGYLPDWLEDNLSEGIREWWALKPGAPKPKANQQKQDDGRGLVLPGYKYLGPFNGLDKGEPVNAADAAALEHDKAYDQQLQAGDNPYLRYNHADAEFQERLQEDTSFGGNLGRAVFQAKKRVLEPLGLVEEGAKTAPGKKRPVEPSPQRSPDSSTGIGKKGQQPARKRLNFGQTGDSESVPDPQPLGEPPAAPSGVGPNTMAAGGGAPMADNNEGADGVGSSSGNWHCDSTWLGDRVITTSTRTWALPTYNNHLYKQISNGTSGGATNDNTYFGYSTPWGYFDFNRFHCHFSPRDWQRLINNNWGFRPKRLSFKLFNIQVKEVTQNEGTKTIANNLTSTIQVFTDSEYQLPYVLGSAHQGCLPPFPADVFTIPQYGYLTLNNGSQAVGRSSFYCLEYFPSQMLRTGNNFQFTYTFEDVPFHSSYAHSQSLDRLMNPLIDQYLYYLSRIQTTGGTANTQTLGFSQGGPNTMANQAKNWLPGPCYRQQRVSTTTGQNNNSNFAWTAGTKYHLNGRNSLANPGIAMATHKDDEERFFPSNGILIFGKQNAARDNADYSDVMPTSEEEIKTTNPVATEEYGIAADNLQQQNTAPQIGTVNSQGALPGMVWQNRDVYLQGPIWAKIPHTDGNFHPSPLMGGFGLKHPPPQILIKNTPVPADPPTTFNQSKLNSFITQYSTGQVSVEIEWELQKENSKRWNPEIQYTSNYYKSTSVDFAVNTEGVYSEPRPIGTRYLTRNL

SEQ ID NO: 2995 - protein, 738 aa, synthetic construct
  REGION 1..738: note = source = /note="Description of Artificial Sequence: Synthetic polypeptide"
MAADGYLPDWLEDNLSEGIREWWALKPGAPKPKANQQKQDDGRGLVLPGYKYLGPFNGLDKGEPVNAADAAALEHDKAYDQQLQAGDNPYLRYNHADAEFQERLQEDTSFGGNLGRAVFQAKKRVLEPLGLVEEGAKTAPGKKRPVEPSPQRSPDSSTGIGKKGQQPARKRLNFGQTGDSESVPDPQPLGEPPAAPSGVGPNTMAAGGGAPMADNNEGADGVGSSSGNWHCDSTWLGDRVITTSTRTWALPTYNNHLYKQISNGTSGGATNDNTYFGYSTPWGYFDFNRFHCHFSPRDWQRLINNNWGFRPKRLSFKLFNIQVKEVTQNEGTKTIANNLTSTIQVFTDSEYQLPYVLGSAHQGCLPPFPADVFTIPQYGYLTLNNGSQAVGRSSFYCLEYFPSQMLRTGNNFQFTYTFEDVPFHSSYAHSQSLDRLMNPLIDQYLYYLSRIQTTGGTANTQTLGFSQGGPNTMANQAKNWLPGPCYRQQRVSTTTGQNNNSNFAWTAGTKYHLNGRNSLANPGIAMATHKDDEERFFPSNGILIFGKQNAARDNADYSDVMPTSEEEIKTTNPVATEEYGIVADNLQQQNTAPQIGTVNSQGALPGMIWQNRDVYLQGPIWAKIPHTDGNFHPSPLMGGFGLKHPPPQILIKNTPVPADPPTTFNQSKLNSFITQYSTGQVSVEIEWELQKENSKRWNPEIQYTSNYYKSTSVDFAVNTEGVYSEPRPIGTRYLTRNL

SEQ ID NO: 2996 - protein, 738 aa, synthetic construct
  REGION 1..738: note = source = /note="Description of Artificial Sequence: Synthetic polypeptide"
MAADGYLPDWLEDNLSEGIREWWALKPGAPKPKANQQKQDDGRGLVLPGYKYLGPFNGLDKGEPVNAADAAALEHDKAYDQRLQAGDNPYLRYNHADAEFQERLQEDTSFGGNLGRAVFQAKKRVLEPLGLVEEGAKTAPGKKRPVEPSPQRSPDSSTGIGKKGQQPARKRLNFGQTGDSESVPDPQPLGEPPAAPSGVGPNTMAAGGGAPMADNNEGADGVGSSSGNWHCDSTWLGDRVITTSTRTWALPTYNNHLYKQISNGTSGGATNDNTYFGYSTPWGYFDFNRFHCHFSPRDWQRLINNNWGFRPKRLSFKLFNIQVKEVTQNEGTKTIANNLTSTIQVFTDSEYQLPYVLGSAHQGCLPPFPADVFTIPQYGYLTLNNGSQAVGRSSFYCLEYFPSQMLRTGNNFQFTYTFEDVPFHSSYAHSQSLDRLMNPLIDQYLYYLSRIQTTGGTANTQTLGFSQGGPNTMANQAKNWLPGPCYRQQRVSTTTGQNNNSNFAWTAGTKYHLNGRNSLANPGIAMATHKDDEERFFPSNGILIFGKQNAARDNADYSDVMPTSEEEIKTTNPVATEEYGIVADNLQQQNTAPQIGTVNSQGALPGMVWQNRDVYLQGPIWAKIPHTDGNFHPSPLMGGFGLKHPPPQILIKNTPVPADPPTTFNQSKLNSFITQYSTGQVSVEIEWELQKENSKRWNPEIQYTSNYYKSTSVDFAVNTEGVYSEPRPIGTRYLTRNL

SEQ ID NO: 2997 - protein, 738 aa, synthetic construct
  REGION 1..738: note = source = /note="Description of Artificial Sequence: Synthetic polypeptide"
MAADGYLPDWLEDNLSEGIREWWALKPGAPKPKANQQKQDDGRGLVLPGYKYLGPFNGLDKGEPVNAADAAALEHDKAYDQQLQAGDNPYLRYNHADAEFQERLQEDTSFGGNLGRAVFQAKKRVLEPLGLVEEGAKTAPGKKRPVEPSPQRSPDSSTGIGKKGQQPARKRLNFGQTGDSESVPDPQPLGEPPAAPSGVGPNTMAAGGGAPMADNNEGADGVGSSSGNWHCDSTWLGDRVITTSTRTWALPTYNNHLYKQISNGTSGGATNDNTYFGYSTPWGYFDFNRFHCHFSPRDWQRLINNNWGFRPKRLSFKLFNIQVKEVTQNEGTKTIANNLTSTIQVFTDSEYQLPYVLGSAHQGCLPPFPADVFTIPQYGYLTLNNGSQAVGRSSFYCLEYFPSQMLRTGNNFQFTYTFEDVPFHSSYAHSQSLDRLMNPLIDQYLYYLSRIQTTGGTANTQTLGFSQGGPNTMANQAKNWLPGPCYRQQRVSTTTGQNNNSNFAWTAGTKYHLNGRNSLANPGIAMATHKDDEERFFPSNGILIFGKQNAARDNADYSDVMPTSEEEIKTTNPVATEEYGIVADNLQQQNTAPQIGTVNGQGALPGMVWQNRDVYLQGPIWAKIPHTDGNFHPSPLMGGFGLKHPPPQILIKNTPVPADPPTTFNQSKLNSFITQYSTGQVSVEIEWELQKENSKRWNPEIQYTSNYYKSTSVDFAVNTEGVYSEPRPIGTRYLTRNL

SEQ ID NO: 2998 - protein, 738 aa, synthetic construct
  REGION 1..738: note = source = /note="Description of Artificial Sequence: Synthetic polypeptide"
MAADGYLPDWLEDNLSEGIREWWALKPGAPKPKANQQKQDDGRGLVLPGYKYLGPFNGLDKGEPVNAADAAALEHDKAYDQQLQAGDNPYLRYNHADAEFQERLQEDTSFGGNLGRAVFQAKKRVLEPLGLVEEGAKTAPGKKRPVEPSPQRSPDSSTGIGKKGQQPARKRLNFGQTGDSESVPDPQPLGEPPAAPSGVGPNTMAAGGGAPMADNNEGADGVGSSSGNWHCDSTWLGDRVITTSTRTWALPTYNNHLYKQISNGTSGGATNDNTYFGYSTPWGYFDFNRFHCHFSPRDWQRLINNNWGFRPKRLSFKLFNIQVKEVTQNEGTKTIANNLTSTIQVFTDSEYQLPYVLGSAHQGCLPPFPADVFTIPQYGYLTLNNGSQAVGRSSFYCLEYFPSQMLRTGNNFQFTYTFEDVPFHSSYAHSQSLDRLMNPLIDQYLYYLSRIQTTGGTANTQTLGFSQGGPNTMANQAKNWLPGPCYRQQRVSTTTGQNNNSNFAWTAGTKYHLNGRNSLANPGIAMATHKDDEECFFPSNGILIFGKQNAARDNADYSDVMPTSEEEIKTTNPVATEEYGIVADNLQQQNTAPQIGTVNSQGALPGMVWQNRDVYLQGPIWAKIPHTDGNFHPSPLMGGFGLKHPPPQILIKNTPVPADPPTTFNQSKLNSFITQYSTGQVSVEIEWELQKENSKRWNPEIQYTSNYYKSTSVDFAVNTEGVYSEPRPIGTRYLTRNL

SEQ ID NO: 2999 - protein, 738 aa, synthetic construct
  REGION 1..738: note = source = /note="Description of Artificial Sequence: Synthetic polypeptide"
MAADGYLPDWLEDNLSEGIREWWALKPGAPKPKANQQKQDDGRGLVLPGYKYLGPFNGLDKGEPVNAADAAALEHDKAYDQQLQAGDNPYLRYNHADAEFQERLQEDTSFGGNLGRAVFQAKKRVLEPLGLVEEGAKTAPGKKRPVEPSPQRSPDSSTGIGKKGQQPARKRLNFGQTGDSESVPDPQPLGEPPAAPSGVGPNTMAAGGGAPMADNNEGADGVGSSSGNWHCDSTWLGDRVITTSTRTWALPTYNNHLYKQISNGTSGGATNDNTYFGYSTPWGYFDFNRFHCHFSPRDWQRLINNNWGFRPKRLSFKLFNIQVKEVTQNEGTKTIANNLTSTIQVFTDSEYQLPYVLGSAHQGCLPPFPADVFTIPQYGYLTLNNGSQAVGRSSFYCLEYFPSQMLRTGNNFQFTYTFEDVPFHSSYAHSQSLDRLMNPLIDQYLYYLSRIQTTGGTANTQTLGFSQGGPNTMANQAKNWLPGPCYRQQRVSTTTGQNNNSNFAWTAGTKYHLNGRNSLANPGIAMATHKDDEERFFPSNGILIFGKQNAARDNADYSDVMPTSEEEIKTTNPVATEEYGIVADNLQQQNTAPQIGTVNSQGALPGMVWQNRDAYLQGPIWAKIPHTDGNFHPSPLMGGFGLKHPPPQILIKNTPVPADPPTTFNQSKLNSFITQYSTGQVSVEIEWELQKENSKRWNPEIQYTSNYYKSTSVDFAVNTEGVYSEPRPIGTRYLTRNL

SEQ ID NO: 3000 - protein, 738 aa, synthetic construct
  REGION 1..738: note = source = /note="Description of Artificial Sequence: Synthetic polypeptide"
MAADGYLPDWLEDNLSEGIREWWALKPGAPKPKANQQKQDDGRGLVLPGYKYLGPFNGLDKGEPVNAADAAALEHDKAYDQQLQAGDNPYLRYNHADAEFQERLQEDTSFGGNLGRAVFQAKKRVLEPLGLVEEGAKTAPGKKRPVEPSPQRSPDSSTGIGKKGQQPARKRLNFGQTGDSESVPDPQPLGEPPAAPSGVGPNTMAAGGGAPMADNNEGADGVGSSSGNWHCDSTWLGDRVITTSTRTWALPTYNNHLYKQISNGTSGGATNDNTYFGYSTPWGYFDFNRFHCHFSPRDWQRLINNNWGFRPKRLSFKLFNIQVKEVTQNEGTKTIANNLTSTIQVFTDSEYQLPYVLGSAHQGCLPPFPADVFTIPQYGYLTLNNGSQAAGRSSFYCLEYFPSQMLRTGNNFQFTYTFEDVPFHSSYAHSQSLDRLMNPLIDQYLYYLSRIQTTGGTANTQTLGFSQGGPNTMANQAKNWLPGPCYRQQRVSTTTGQNNNSNFAWTAGTKYHLNGRNSLANPGIAMATHKDDEERFFPSNGILIFGKQNAARDNADYSDVMPTSEEEIKTTNPVATEEYGIVADNLQQQNTAPQIGTVNSQGALPGMVWQNRDVYLQGPIWAKIPHTDGNFHPSPLMGGFGLKHPPPQILIKNTPVPADPPTTFNQSKLNSFITQYSTGQVSVEIEWELQKENSKRWNPEIQYTSNYYKSTSVDFAVNTEGVYSEPRPIGTRYLTRNL

SEQ ID NO: 3001 - protein, 738 aa, synthetic construct
  REGION 1..738: note = source = /note="Description of Artificial Sequence: Synthetic polypeptide"
MAADGYLPDWLEDNLSEGIREWWALKPGAPKPKANQQKQDDGRGLVLPGYKYLGPFNGLDKGEPVNAADAAALEHDKAYDQQLQAGDNPYLRYNHADAEFQERLQEDTSFGGNLGRAVFQAKKRVLEPLGLVEEGAKTAPGKKRPVEPSPQRSPDSSTGIGKKGQQPARKRLNFGQTGDSESVPDPQPLGEPPAAPSGVGPNTMAAGGGAPMADNNEGADGVGSSSGNWHCDSTWLGDRVITTSTRTWALPTYNNHLYKQISNGTSGGATNDNTYFGYSTPWGYFDFNRFHCHFSPRDWQRLINNNWGFRPKRLSFKLFNIQVKEVTQNEGTKTIANNLTSTIQVFTDSEYQLPYVLGSAHQGCLPPFPADVFTIPQYGYLTLNNGSQAVGRSSFYCLEYFPSQMLRTGNNFQFTYTFEDVPFHSSYAHSQSLDRLMNPLIDQYLYYLSRIQTTGGTANTQTLGFSQGGPNTMANQAKNWLPGPCYRQQRVSTTTGQNNNSNFAWTAGTKYHLNGRNSLANPGIAMATHKDDEERFFPSNGILIFGKQNAARDNADYSDVMPTSEEEIKTTNPVATEEYGIVADNLQQQNTAPQIGTVNSQGALPGMVWQNRDVYLQGPIWAKIPHTDGNFHPSPLMGGFGLKHPPPQILIKNTPVPADPPTTFNQSKLNSFITQYSTGQVSVEIEWELQKENSKRWNPEIQYTSNYYKSTSVDLAVNTEGVYSEPRPIGTRYLTRNL

SEQ ID NO: 3002 - protein, 738 aa, synthetic construct
  REGION 1..738: note = source = /note="Description of Artificial Sequence: Synthetic polypeptide"
MAADGYLPDWLEDNLSEGIREWWALKPGAPKPKANQQKQDDGRGLVLPGYKYLGPFNGLDKGEPVNAADAAALEHDKAYDQQLQAGDNPYLRYNHADAEFQERLQEDTSFGGNLGRAVFQAKKRVLEPLGLVEEGAKTAPGKKRPVEPSPQRSPDSSTGIGKKGQQPARKRLNFGQTGDSESVPDPQPLGEPPAAPSGVGPNTMAAGGGAPMADNNEGADGVGSSSGNWHCDSTWLGDRVITTSTRTWALPTYNNHLYKQISNGTSGGATNDNTYFGYSTPWGYFDFNRFHCHFSPRDWQRLINNNWGFRPKRLSFKLFNIQVKEVTQNEGTKTIANNLTSTIQVFTDSEYQLPYVLGSAHQGCLPPFPADVFTIPQYGYLTLNNGSQAVGRSSFYCLEYFPSQMLRTGNNFQFTYTFEDVPFHSSYAHSQSLDRLMNPLIDQYLYYLSRIQTTGGTANTQTLGFSQGGPNTMANQAKNWLPGPCYRQQRVSTTTGQNNNSNFAWTAGTKYHLNGRNSLANPGIAMATHKDDEERFFPSNGILIFGKQNAARDNADYSDVMPTSEEEIKTTNPVATEEYGIVADNLQQQNTAPQIGTVNSQGALPGMVWQNRDVYLQGPIWAKIPHTDGNFHPSPLMGGFGLKHPPPQILIKNTPVPADPPTTFNQSKLNSFITQYSTGQVSVEIEWEPQKENSKRWNPEIQYTSNYYKSTSVDFAVNTEGVYSEPRPIGTRYLTRNL

SEQ ID NO: 3003 - protein, 738 aa, synthetic construct
  REGION 1..738: note = source = /note="Description of Artificial Sequence: Synthetic polypeptide"
MAADGYLPDWLEDNLSEGIREWWALKPGAPKPKANQQKQDDGRGLVLPGYKYLGPFNGLDKGEPVNAADAAALEHDKAYDQQLQAGDNPYLRYNHADAEFQERLQEDTSFGGNLGRAVFQAKKRVLEPLGLVEEGAKTAPGKKRPVEPSPQRSPDSSTGIGKKGQQPARKRLNFGQTGDSESVPDPQPLGEPPAAPSGVGPNTMAAGGGAPMADNNEGADGVGSSSGNWHCDSTWLGDRVITTSTRTWALPTYNNHLYKQISNGTSGGATNDNTYFGYSTPWGYFDFNRFHCHFSPRDWQRPINNNWGFRPKRLSFKLFNIQVKEVTQNEGTKTIANNLTSTIQVFTDSEYQLPYVLGSAHQGCLPPFPADVFTIPQYGYLTLNNGSQAVGRSSFYCLEYFPSQMLRTGNNFQFTYTFEDVPFHSSYAHSQSLDRLMNPLIDQYLYYLSRIQTTGGTANTQTLGFSQGGPNTMANQAKNWLPGPCYRQQRVSTTTGQNNNSNFAWTAGTKYHLNGRNSLANPGIAMATHKDDEERFFPSNGILIFGKQNAARDNADYSDVMPTSEEEIKTTNPVATEEYGIVADNLQQQNTAPQIGTVNSQGALPGMVWQNRDVYLQGPIWAKIPHTDGNFHPSPLMGGFGLKHPPPQILIKNTPVPADPPTTFNQSKLNSFITQYSTGQVSVEIEWELQKENSKRWNPEIQYTSNYYKSTSVDFAVNTEGVYSEPRPIGTRYLTRNL

SEQ ID NO: 3004 - protein, 738 aa, synthetic construct
  REGION 1..738: note = source = /note="Description of Artificial Sequence: Synthetic polypeptide"
MAADGYLPDWLEDNLSEGIREWWALKPGAPKPKANQQKQDDGRGLVLPGYKYLGPFNGLDKGEPVNAADAAALEHDKAYDQQLQAGDNPYLRYNHADAEFQERLQEDTSFGGNLGRAVFQAKKRVLEPLGLVEEGAKTAPGKKRPVEPSPQRSPDSSTGIGKKGQQPARKRLNFGQTGDSESVPDPQPLGEPPAAPSGVGPNTMAAGGGAPMADNNEGADGVGSSSGNWHCDSTWLGDRVITTSTRTWALPTYNNHLYKQISNGTSGGATNDNTYFGYSTPWGYFDFNRFHCHFSPRDWQRLINNNWGFRPKRLSFKLFNIQVKEVTQNEGTKTIANNLTSTIQVFTDSEYQLPYVLGSAHQGCLPPFPADVFTIPQYGYLTLNNGSQAVGRSSFYCLEYFPSQMLRTGNNFQFTYTFEDVPFHSSYAHSQSLDRLMNPLIDQYLYYLSRIQTTGGTANTQTLGFSQGGPNTMANQAKNWLPGPCYRQQRVSTTTGQNNNSNFAWTAGTKYHLNGRNSLANPGIAMATHKDDEERFFPSNGILIFGKQNAARDNADYSDVMPTSEEEIKTTNPAATEEYGIVADNLQQQNTAPQIGTVNSQGALPGMVWQNRDVYLQGPIWAKIPHTDGNFHPSPLMGGFGLKHPPPQILIKNTPVPADPPTTFNQSKLNSFITQYSTGQVSVEIEWELQKENSKRWNPEIQYTSNYYKSTSVDFAVNTEGVYSEPRPIGTRYLTRNL

SEQ ID NO: 3005 - protein, 738 aa, synthetic construct
  REGION 1..738: note = source = /note="Description of Artificial Sequence: Synthetic polypeptide"
MAADGYLPDWLEDNLSEGIREWWALKPGAPKPKANQQKQDDGRGLVLPGYKYLGPFNGLDKGEPVNAADAAALEHDKAYDQQLQAGDNPYLRYNHADAEFQERLQEDTSFGGNLGRAVFQAKKRVLEPLGLVEEGAKTAPGKKRPVEPSPQRSPDSSTGIGKKGQQPARKRLNFGQTGDSESVPDPQPLGEPPAAPSGVGPNTMAAGGGAPMADNNEGADGVGSSSGNWHCDSTWLGDRVITTSTRTWALPTYNNHLYKQISNGTSGGATNDNTYFGYSTPWGYFDFNRFHCHFSPRDWQRLINNNWGFRPKRLSFKLFNIQVKEVTQNEGTKTIANNLTSTIQVFTDSEYQLPYVLGSAHQGCLPPFPADVFTIPQYDYLTLNNGSQAVGRSSFYCLEYFPSQMLRTGNNFQFTYTFEDVPFHSSYAHSQSLDRLMNPLIDQYLYYLSRIQTTGGTANTQTLGFSQGGPNTMANQAKNWLPGPCYRQQRVSTTTGQNNNSNFAWTAGTKYHLNGRNSLANPGIAMATHKDDEERFFPSNGILIFGKQNAARDNADYSDVMPTSEEEIKTTNPVATEEYGIVADNLQQQNTAPQIGTVNSQGALPGMVWQNRDVYLQGPIWAKIPHTDGNFHPSPLMGGFGLKHPPPQILIKNTPVPADPPTTFNQSKLNSFITQYSTGQVSVEIEWELQKENSKRWNPEIQYTSNYYKSTSVDFAVNTEGVYSEPRPIGTRYLTRNL

SEQ ID NO: 3006 - protein, 738 aa, synthetic construct
  REGION 1..738: note = source = /note="Description of Artificial Sequence: Synthetic polypeptide"
MAADGYLPDWLEDNLSEGIREWWALKPGAPKPKANQQKQDDGRGLVLPGYKYLGPFNGLDKGEPVNAADAAALEHDKAYDQQLQAGDNPYLRYNHADAEFQERLQEDTSFGGNLGRAVFQAKKRVLEPLGLVEEGAKTAPGKKRPVEPSPQRSPDSSTGIGKKGQQPARKRLNFGQTGDSGSVPDPQPLGEPPAAPSGVGPNTMAAGGGAPMADNNEGADGVGSSSGNWHCDSTWLGDRVITTSTRTWALPTYNNHLYKQISNGTSGGATNDNTYFGYSTPWGYFDFNRFHCHFSPRDWQRLINNNWGFRPKRLSFKLFNIQVKEVTQNEGTKTIANNLTSTIQVFTDSEYQLPYVLGSAHQGCLPPFPADVFTIPQYGYLTLNNGSQAVGRSSFYCLEYFPSQMLRTGNNFQFTYTFEDVPFHSSYAHSQSLDRLMNPLIDQYLYYLSRIQTTGGTANTQTLGFSQGGPNTMANQAKNWLPGPCYRQQRVSTTTGQNNNSNFAWTAGTKYHLNGRNSLANPGIAMATHKDDEERFFPSNGILIFGKQNAARDNADYSDVMPTSEEEIKTTNPVATEEYGIVADNLQQQNTAPQIGTVNSQGALPGMVWQNRDVYLQGPIWAKIPHTDGNFHPSPLMGGFGLKHPPPQILIKNTPVPADPPTTFNQSKLNSFITQYSTGQVSVEIEWELQKENSKRWNPEIQYTSNYYKSTSVDFAVNTEGVYSEPRPIGTRYLTRNL

SEQ ID NO: 3007 - protein, 738 aa, synthetic construct
  REGION 1..738: note = source = /note="Description of Artificial Sequence: Synthetic polypeptide"
MAADGYLPDWLEDNLSEGIREWWALKPGAPKPKANQQKQDDGRGLVLPGYKYLGPFNGLDKGEPVNAADAAALEHDKAYDQQLQAGDNPYLRYNHADAEFQERLQEDTSFGGNLGRAVFQAKKRVLEPLGLVEEGAKTAPGKKRPVEPSPQRSPDSSTGIGKKGQQPARKRLNFGQTGDSESVPDPQPLGEPPAAPSGVGPNTMAAGGGAPMADNNEGADGVGSSSGNWHCDSTWLGDRVITTSTRTWALPTYNNHLYKQISNGTSGGATNDNTYFGYSTPWGYFDFNRFHCHFSPRDWQRLINNNWGFRPKRLSFKLFNIQVKEVTQNEGTKAIANNLTSTIQVFTDSEYQLPYVLGSAHQGCLPPFPADVFTIPQYGYLTLNNGSQAVGRSSFYCLEYFPSQMLRTGNNFQFTYTFEDVPFHSSYAHSQSLDRLMNPLIDQYLYYLSRIQTTGGTANTQTLGFSQGGPNTMANQAKNWLPGPCYRQQRVSTTTGQNNNSNFAWTAGTKYHLNGRNSLANPGIAMATHKDDEERFFPSNGILIFGKQNAARDNADYSDVMPTSEEEIKTTNPVATEEYGIVADNLQQQNTAPQIGTVNSQGALPGMVWQNRDVYLQGPIWAKIPHTDGNFHPSPLMGGFGLKHPPPQILIKNTPVPADPPTTFNQSKLNSFITQYSTGQVSVEIEWELQKENSKRWNPEIQYTSNYYKSTSVDFAVNTEGVYSEPRPIGTRYLTRNL

SEQ ID NO: 3008 - protein, 738 aa, synthetic construct
  REGION 1..738: note = source = /note="Description of Artificial Sequence: Synthetic polypeptide"
MAADGYLPDWLEDNLSEGIREWWALKPGAPKPKANQQKQDDGRGPVLPGYKYLGPFNGLDKGEPVNAADAAALEHDKAYDQQLQAGDNPYLRYNHADAEFQERLQEDTSFGGNLGRAVFQAKKRVLEPLGLVEEGAKTAPGKKRPVEPSPQRSPDSSTGIGKKGQQPARKRLNFGQTGDSESVPDPQPLGEPPAAPSGVGPNTMAAGGGAPMADNNEGADGVGSSSGNWHCDSTWLGDRVITTSTRTWALPTYNNHLYKQISNGTSGGATNDNTYFGYSTPWGYFDFNRFHCHFSPRDWQRLINNNWGFRPKRLSFKLFNIQVKEVTQNEGTKTIANNLTSTIQVFTDSEYQLPYVLGSAHQGCLPPFPADVFTIPQYGYLTLNNGSQAVGRSSFYCLEYFPSQMLRTGNNFQFTYTFEDVPFHSSYAHSQSLDRLMNPLIDQYLYYLSRIQTTGGTANTQTLGFSQGGPNTMANQAKNWLPGPCYRQQRVSTTTGQNNNSNFAWTAGTKYHLNGRNSLANPGIAMATHKDDEERFFPSNGILIFGKQNAARDNADYSDVMPTSEEEIKTTNPVATEEYGIVADNLQQQNTAPQIGTVNSQGALPGMVWQNRDVYLQGPIWAKIPHTDGNFHPSPLMGGFGLKHPPPQILIKNTPVPADPPTTFNQSKLNSFITQYSTGQVSVEIEWELQKENSKRWNPEIQYTSNYYKSTSVDFAVNTEGVYSEPRPIGTRYLTRNL

SEQ ID NO: 3009 - protein, 738 aa, synthetic construct
  REGION 1..738: note = source = /note="Description of Artificial Sequence: Synthetic polypeptide"
MAADGYLPDWLEDNLSEGIREWWALKPGAPKPKANQQKQDDGRGLVLPGYKYLGPFNGLDKGEPVNAADAAALEHDKAYDQQLQAGDNPYLRYNHADAEFQERLQEDTSFGGNLGRAVFQAKKRVLEPLGLVEEGAKTAPGKKRPVEPSPQRSPDSSTGIGKKGQQPARKRLNFGQTGDSESVPDPQPLGEPPAAPSGVGPNTMAAGGGAPMADNNEGADGVGSSSGNWHCDSTWLGDRVITTSTRTWALPTYNNHLYKQISNGTSGGATNDNTYFGYSTPWGYFDFNRFHCHFSPRDWQRLINNNWGFRPKRLSFKLFNIQVKEVTQNEGTKTIANNLTSTIQVFTDSEYQLPYVLGSAHQGCLPPFPADVFTIPQYGYLTLNNGSQAVGRSSFYCLEYFPSQMLRTGNNFQFTYTFEDVPFHSSYAHSQSLDRLMNPLIDQYLYYLSRIQTTGGTANTQTLGFSQGGPNTMANRAKNWLPGPCYRQQRVSTTTGQNNNSNFAWTAGTKYHLNGRNSLANPGIAMATHKDDEERFFPSNGILIFGKQNAARDNADYSDVMPTSEEEIKTTNPVATEEYGIVADNLQQQNTAPQIGTVNSQGALPGMVWQNRDVYLQGPIWAKIPHTDGNFHPSPLMGGFGLKHPPPQILIKNTPVPADPPTTFNQSKLNSFITQYSTGQVSVEIEWELQKENSKRWNPEIQYTSNYYKSTSVDFAVNTEGVYSEPRPIGTRYLTRNL

SEQ ID NO: 3010 - protein, 738 aa, synthetic construct
  REGION 1..738: note = source = /note="Description of Artificial Sequence: Synthetic polypeptide"
MAADGYLPDWLEDNLSEGIREWWALKPGAPKPKANQQKQDDGRGLVLPGYKYLGPFNGLDKGEPVNAADAAALEHDKAYDQQLQAGDNPYLRYNHADAEFQERLQEDTSFGGNLGRAVFQAKKRVLEPLGLVEEGAKTAPGKKRPVEPSPQRSPDSSTGIGKKGQQPARKRLNFGQTGDSESVPDPQPLGEPPAAPSGVGPNTMAAGGGAPMADNNEGADGVGSSSGNWHCDSTWLGDRVITTSTRTWALPTYNNHLYKQISNGTSGGATNDNTYFGYSTPWGYFDFNRFHCHFSPRDWQRLINNNWGFRPKRLSFKLFNIQVKEVTQNEGTKTIANNLTSTIQVFTDSEYQLPYVLGSAHQGCLPPFPADVFTIPQYGYLTLNNGSQAVGRSSFYCLEYFPSQMLRTGNNFQFTYTFEDVPFHSSYAHSQSLDRLMNPLIDQYLYYLSRIQTTGGTANTQTLGFSQGGPNTMANQAKNWLPGPCYRQQRVSTTTGQNNNSNFARTAGTKYHLNGRNSLANPGIAMATHKDDEERFFPSNGILIFGKQNAARDNADYSDVMPTSEEEIKTTNPVATEEYGIVADNLQQQNTAPQIGTVNSQGALPGMVWQNRDVYLQGPIWAKIPHTDGNFHPSPLMGGFGLKHPPPQILIKNTPVPADPPTTFNQSKLNSFITQYSTGQVSVEIEWELQKENSKRWNPEIQYTSNYYKSTSVDFAVNTEGVYSEPRPIGTRYLTRNL

SEQ ID NO: 3011 - protein, 738 aa, synthetic construct
  REGION 1..738: note = source = /note="Description of Artificial Sequence: Synthetic polypeptide"
MAADGYLPDWLEDNLSEGIREWWALKPGAPKPKANQQKQDDGRGLVLPGYKYLGPFNGLDKGEPVNAADAAALEHDKAYDQQLQAGDNPYLRYNHADAEFQERLQEDTSFGGNLGRAVFQAKKRVLEPLGLVEEGAKTAPGKKRPVEPSPQRSPDSSTGIGKKGQQPARKRLNFGQTGDSESVPDPQPLGEPPAAPSGVGPNTMAAGGGAPMADNNEGADGVGSSSGNWHCDSTWLGDRVITTSTRTWALPTYNNHLYKQISNGTSGGATNDNTYFGYSTPWGYFDFNRSHCHFSPRDWQRLINNNWGFRPKRLSFKLFNIQVKEVTQNEGTKTIANNLTSTIQVFTDSEYQLPYVLGSAHQGCLPPFPADVFTIPQYGYLTLNNGSQAVGRSSFYCLEYFPSQMLRTGNNFQFTYTFEDVPFHSSYAHSQSLDRLMNPLIDQYLYYLSRIQTTGGTANTQTLGFSQGGPNTMANQAKNWLPGPCYRQQRVSTTTGQNNNSNFAWTAGTKYHLNGRNSLANPGIAMATHKDDEERFFPSNGILIFGKQNAARDNADYSDVMPTSEEEIKTTNPVATEEYGIVADNLQQQNTAPQIGTVNSQGALPGMVWQNRDVYLQGPIWAKIPHTDGNFHPSPLMGGFGLKHPPPQILIKNTPVPADPPTTFNQSKLNSFITQYSTGQVSVEIEWELQKENSKRWNPEIQYTSNYYKSTSVDFAVNTEGVYSEPRPIGTRYLTRNL

SEQ ID NO: 3012 - protein, 738 aa, synthetic construct
  REGION 1..738: note = source = /note="Description of Artificial Sequence: Synthetic polypeptide"
MAADGYLPDWLEDNLSEGIREWWALKPGAPKPKANQQKQDDGRGLVLPGYKYLGPFNGLDKGEPVNAADAAALEHDKAYDQQLQAGDNPYLRYNHADAEFQERLQEDTSFGGNLGRAVFQAKKRVLEPLGLVEEGAKTAPGKKRPVEPSPQRSPDSSTGIGKKGQQPARKRLNFGQTGDSESVPDPQPLGEPPAAPSGVGPNTMAAGGGAPMADNNEGADGVGSSSGNWHCDSTWLGDRVITTSTRTWALPTYNNHLYKQISNGTSGGATNDNTYFGYSTPWGYFDFNRFHCHFSPRDWQRLINNNWGFRPKRLSFKLFNIQVKEVTQNEGTKTIANNLTSTIQVFTDSEYQLPYVLGSAHQGCLPPFPADVFTIPQYGYLTLNNGSQAVGRSSFYCLEYFPSQMLRTGNNFQFTYTFEDVPFHSSYAHSQSLDRLMNPLIDQYLYYLSRIQTTGGTANTQTLGFGQGGPNTMANQAKNWLPGPCYRQQRVSTTTGQNNNSNFAWTAGTKYHLNGRNSLANPGIAMATHKDDEERFFPSNGILIFGKQNAARDNADYSDVMPTSEEEIKTTNPVATEEYGIVADNLQQQNTAPQIGTVNSQGALPGMVWQNRDVYLQGPIWAKIPHTDGNFHPSPLMGGFGLKHPPPQILIKNTPVPADPPTTFNQSKLNSFITQYSTGQVSVEIEWELQKENSKRWNPEIQYTSNYYKSTSVDFAVNTEGVYSEPRPIGTRYLTRNL

SEQ ID NO: 3013 - protein, 738 aa, synthetic construct
  REGION 1..738: note = source = /note="Description of Artificial Sequence: Synthetic polypeptide"
MAADGYLPDWLEDNLSEGIREWWALKPGAPKPKANQQKQDDGRGLVLPGYKYLGPFNGLDKGEPVNAADAAALEHDKAYDQQLQAGDNPYLRYNHADAEFQERLQEDTSFGGNLGRAVFQAKKRVLEPLGLVEEGAKTAPGKKRPVEPSPQRSPDSSTGIGKKGQQPARKRLNFGQTGDSESVPDPQPLGEPPAAPSGVGPNTMAAGGGAPMADNNEGADGVGSSSGNWHCDSTWLGDRVITTSTRTWALPTYNNHLYKQISNGTSGGATNDNTYFGYSTPWGYFDFNRFHCHFSPRDWQRLINNNWGFRPKRLSFKLFNIQVKEVTQNEGTKTIANNLTSTIQVFTDSEYQLPYVLGSAHQGCLPPFPADVFTIPQYGYLTLNNGSQAVGRSSFYCLEYFPSQMLRTGNNFQFTYTFEDVPFHSSYAHSQSLDRLMNPLIDQYLYYLSRIQTTGGTANTQTLGFSQGGPNTMANQAKNWLPGPCYRQQRASTTTGQNNNSNFAWTAGTKYHLNGRNSLANPGIAMATHKDDEERFFPSNGILIFGKQNAARDNADYSDVMPTSEEEIKTTNPVATEEYGIVADNLQQQNTAPQIGTVNSQGALPGMVWQNRDVYLQGPIWAKIPHTDGNFHPSPLMGGFGLKHPPPQILIKNTPVPADPPTTFNQSKLNSFITQYSTGQVSVEIEWELQKENSKRWNPEIQYTSNYYKSTSVDFAVNTEGVYSEPRPIGTRYLTRNL

SEQ ID NO: 3014 - protein, 738 aa, synthetic construct
  REGION 1..738: note = source = /note="Description of Artificial Sequence: Synthetic polypeptide"
MAADGYLPDWLEDNLSEGIREWWALKPGAPKPKANQQKQDDGRGLVLPGYKYLGPFNGLDKGEPVNAADAAALEHDKAYDQQLQAGDNPYLRYNHADAEFQERLQEDTSFGGNLGRAVFQAKKRVLEPLGLVEEGAKTAPGKKRPVEPSPQRSPDSSTGIGKKGQQPARKRLNFGQTGDSESVPDPQPLGEPPAAPSGVGPNTMAAGGGAPMADNNEGADGVGSSSGNWHCDSTWLGDRVITTSTRTWALPTYNNHLYKQISNGTSGGATNDNTYFGYSTPWGYFDFNRFHCHFSPRDWQRLINNNWGFRPKRLSFKLFNIQVKEVTQNEGTKTIANNLTSTIQVFTDSEYQLPYVLGSAHQGCLPPFPADVFTIPQYGYLTLNNGSQAVGRSSFYCLEYFPSQMLRTGNNFQFTYTFEDVPFHSSYAHSQSLDRLMNPLIDQYLYYLSRIQTTGGTANTQTLGFSQGGPNTMANQAKNWLPGPCYRQQRVSTTTGQNNNSNFAWTAGTKYHLNGRNSLANPGIAMATHKDDEERFFPSNGILIFGKQNAARDNADYSDVIPTSEEEIKTTNPVATEEYGIVADNLQQQNTAPQIGTVNSQGALPGMVWQNRDVYLQGPIWAKIPHTDGNFHPSPLMGGFGLKHPPPQILIKNTPVPADPPTTFNQSKLNSFITQYSTGQVSVEIEWELQKENSKRWNPEIQYTSNYYKSTSVDFAVNTEGVYSEPRPIGTRYLTRNL

SEQ ID NO: 3015 - protein, 738 aa, synthetic construct
  REGION 1..738: note = source = /note="Description of Artificial Sequence: Synthetic polypeptide"
MAADGYLPDWLEDNLSEGIREWWALKPGAPKPKANQQKQDDGRGLVLPGYKYLGPFNGLDKGEPVNAADAAALEHDKAYDQQLQAGDNPYLRYNHADAEFQERLQEDTSFGGNLGRAVFQAKKRVLEPLGLVEEGAKTAPGKKRPVEPSPQRSPDSSTGIGKKGQQPARKRLNFGQTGDSESVPDPQPLGEPPAAPSGVGPNTMAAGGGAPMADNNEGADGVGSSSGNWHCDSTWLGDRVITTSTRTWALPTYNNHLYKQISNGTSGGATNDNTYFGYSTPWGYFDFNRFHCHFSPRDWQRLINNNWGFRPKRLSFKLFNIQVKEVTQNEGTKTIANNLTSTIQVFTDSEYQLPYVLGSAHQGCLPPFPADVFTIPQYGYLTLNNGSQAVGRSSFYCLEYFPSQMLRTGNNFQFTYTFEDVPFHSSYAHSQSLDRLMNPLIDQYLYYLSRIQTTGGTANTQTLGFSQGGPNTMANQAKNWLPGPCYRQQRVSTTTGQNNNSNFAWTAGTKYHLNGRNSLANPGIAMATHKDDEERFFPSNGILIFGKQNAARDNADYSDVMPTSEEEIKTTNPVATEEYGIVADNLQQQNTAPQIGTANSQGALPGMVWQNRDVYLQGPIWAKIPHTDGNFHPSPLMGGFGLKHPPPQILIKNTPVPADPPTTFNQSKLNSFITQYSTGQVSVEIEWELQKENSKRWNPEIQYTSNYYKSTSVDFAVNTEGVYSEPRPIGTRYLTRNL

SEQ ID NO: 3016 - protein, 738 aa, synthetic construct
  REGION 1..738: note = source = /note="Description of Artificial Sequence: Synthetic polypeptide"
MAADGYLPDWLEDNLSEGIREWWALKPGAPKPKANQQKQDDGRGLVLPGYKYLGPFNGLDKGEPVNAADAAALEHDKAYDQQLQAGDNPYLRYNHADAEFQERLQEDTSFGGNLGRAVFQAKKRVLEPLGLVEEGAKTAPGKKRPVEPSPQRSPDSSTGIGKKGQQPARKRLNFGQTGDSESVPDPQPLGEPPAAPSGVGPNTMAAGGGAPMADNNEGADGVGSSSGNWHCDSTWLGDRVITTSTRTWALPTYNNHLYKQISNGTSGGATNDNTYFGYSTPWGYFDFNRFHCHFSPRDWQRLINNNWGFRPKRLSFKLFNIQVKEVTQNEGTKTIANNLTSTIQVFTDSEYQLPYVLGSAHQGCLPPFPADVFTIPQYGYLTLNNGSQAVGRSSFYCLEYFPSQMLRTGNNFQFTYTFEDVPFHSSYAHSQSLDRLMNPLIDQYLYYLSRIQTTGGTANTQTLGFSQGGPNTMANQAKNWLPGPCYRQQRVSTTTGQNNNSNFAWTAGTKYHLNGRNSLANPGIAMATHKDDEERFFPSNGILIFGKQNAARDNADYSDVMPTSEEEIKTTNPVATEEYGIVADNLQQQNTAPQIGTVNSQGALPGMVWQNRDVYLQGPIWAKIPHTDGNFHPSPLMGGFGLKHPPPQILIKNTPVPADPPTTFNQSKLNSFITQYSTGQVGVEIEWELQKENSKRWNPEIQYTSNYYKSTSVDFAVNTEGVYSEPRPIGTRYLTRNL

SEQ ID NO: 3017 - protein, 738 aa, synthetic construct
  REGION 1..738: note = source = /note="Description of Artificial Sequence: Synthetic polypeptide"
MAADGYLPDWLEDNLSEGIREWWALKPGAPKPKANQQKQDDGRGLVLPGYKYLGPFNGLDKGEPVNAADAAALEHGKAYDQQLQAGDNPYLRYNHADAEFQERLQEDTSFGGNLGRAVFQAKKRVLEPLGLVEEGAKTAPGKKRPVEPSPQRSPDSSTGIGKKGQQPARKRLNFGQTGDSESVPDPQPLGEPPAAPSGVGPNTMAAGGGAPMADNNEGADGVGSSSGNWHCDSTWLGDRVITTSTRTWALPTYNNHLYKQISNGTSGGATNDNTYFGYSTPWGYFDFNRFHCHFSPRDWQRLINNNWGFRPKRLSFKLFNIQVKEVTQNEGTKTIANNLTSTIQVFTDSEYQLPYVLGSAHQGCLPPFPADVFTIPQYGYLTLNNGSQAVGRSSFYCLEYFPSQMLRTGNNFQFTYTFEDVPFHSSYAHSQSLDRLMNPLIDQYLYYLSRIQTTGGTANTQTLGFSQGGPNTMANQAKNWLPGPCYRQQRVSTTTGQNNNSNFAWTAGTKYHLNGRNSLANPGIAMATHKDDEERFFPSNGILIFGKQNAARDNADYSDVMPTSEEEIKTTNPVATEEYGIVADNLQQQNTAPQIGTVNSQGALPGMVWQNRDVYLQGPIWAKIPHTDGNFHPSPLMGGFGLKHPPPQILIKNTPVPADPPTTFNQSKLNSFITQYSTGQVSVEIEWELQKENSKRWNPEIQYTSNYYKSTSVDFAVNTEGVYSEPRPIGTRYLTRNL

SEQ ID NO: 3018 - protein, 738 aa, synthetic construct
  REGION 1..738: note = source = /note="Description of Artificial Sequence: Synthetic polypeptide"
MAADGYLPDWLEDNLSEGIREWWALKPGAPKPKANQQKQDDGRGLVLPGYKYLGPFNGLDKGEPVNAADAAALEHDKAYDQQLQAGDNPYLRYNHADAEFQERLQEDTSFGGNLGRAVFQAKKRVLEPLGLVEEGAKTAPGKKRPVEPSPQRSPDSSTGIGKKGQQPARKRLNFGQTGDSESVPDPQPLGEPPAAPSGVGPNTMAAGGGAPMADNNEGADGVGSSSGNWHCDSTWLGDRVITTSTRTWALPTYNNHLYKQISNGTSGGATNDNTYFGYSTPWGYFDFNRFHCHFSPRDWQRLINNNWGFRPKRLSFKLFNIQVKEVTQNEGTKTIANNLTSTIQVFTDSEYQLPYVLGSAHQGCLPPFPADVFTIPQYGYLTLNNGSQAVGRSSFYCLEYFPSQMLRTGNNFQFTYTFEDVPFHSSYAHSQSLDRLMNPLIDQYLYYLSRIQTTGGTANTQTLGFSQGGPNTMANQAKNWLPGPCYRQQRVSTTTGQNNNSNFAWTAGTKYHLNGRNSLANPGIAMATHKDDEERFFPSNGILIFGKQNAARDNADYSDVMPTSEEEIKTTNPVATGEYGIVADNLQQQNTAPQIGTVNSQGALPGMVWQNRDVYLQGPIWAKIPHTDGNFHPSPLMGGFGLKHPPPQILIKNTPVPADPPTTFNQSKLNSFITQYSTGQVSVEIEWELQKENSKRWNPEIQYTSNYYKSTSVDFAVNTEGVYSEPRPIGTRYLTRNL

SEQ ID NO: 3019 - protein, 738 aa, synthetic construct
  REGION 1..738: note = source = /note="Description of Artificial Sequence: Synthetic polypeptide"
MAADGYLPDWLEDNLSEGIREWWALKPGAPKPKANQQKQDDGRGLVLPGYKYLGPFNGLDKGEPVNAADAAALEHDKAYDQQLQAGDNPYLRYNHADAEFQERLQEDTSFGGNLGRAVFQAKKRVLEPLGLVEEGAKTAPGKKRPVEPSPQRSPDSSTGIGKKGQQPARKRLNFGQTGDSESVPDPQPLGEPPAAPSGVGPNTMAAGGGAPMADNNEGADGVGSSSGNWHCDSTWLGDRVITTSTRTWALPTHNNHLYKQISNGTSGGATNDNTYFGYSTPWGYFDFNRFHCHFSPRDWQRLINNNWGFRPKRLSFKLFNIQVKEVTQNEGTKTIANNLTSTIQVFTDSEYQLPYVLGSAHQGCLPPFPADVFTIPQYGYLTLNNGSQAVGRSSFYCLEYFPSQMLRTGNNFQFTYTFEDVPFHSSYAHSQSLDRLMNPLIDQYLYYLSRIQTTGGTANTQTLGFSQGGPNTMANQAKNWLPGPCYRQQRVSTTTGQNNNSNFAWTAGTKYHLNGRNSLANPGIAMATHKDDEERFFPSNGILIFGKQNAARDNADYSDVMPTSEEEIKTTNPVATEEYGIVADNLQQQNTAPQIGTVNSQGALPGMVWQNRDVYLQGPIWAKIPHTDGNFHPSPLMGGFGLKHPPPQILIKNTPVPADPPTTFNQSKLNSFITQYSTGQVSVEIEWELQKENSKRWNPEIQYTSNYYKSTSVDFAVNTEGVYSEPRPIGTRYLTRNL

SEQ ID NO: 3020 - protein, 738 aa, synthetic construct
  REGION 1..738: note = source = /note="Description of Artificial Sequence: Synthetic polypeptide"
MAADGYLPDWLEDNLSEGIREWWALKPGAPKPKANQQKQDDGRGLVLPGYKYLGPFNGLDKGEPVNAADAAALEHDKAYDQQLQAGDNPYLRYNHADAEFQERLQEDTSFGGNLGRAVFQAKKRVLEPLGLVEEGAKTAPGKKRPVEPSPQRSPDSSTGIGKKGQQPARKRLNFGQTGDSESVPDPQPLGEPPAAPSGVGPNTMAAGGGAPMADNNEGADGVGSSSGNWHCDSTWLGDRVITTSTRTWALPTYNNHLYKQISNGTSGGATNDNTYFGYSTPWGYFDFNRFHCHFSPRDWQRLINNNWGFRPKRLSFKLFNIQVKEVTQNEGTKTIANNLTSTIQVFTDSEYQLPYVLGSAHQGCLPPFPADVFTIPQYGYLTLNNGSQAVGRSSFYCLEYFPSQMLRTGNNFQFTYTFEDVPFHSSYAHSQSLDRLMNPLIDQYLYYLSRIQTTGGTANTQTLGFSQGGPNTMANQAKNWLPGPCYRQQRVSTTTGQNNNSNFAWTAGTKYHLNGRNSLANPGIAMATHKDDEERFFPSNGILIFGKQNAAIDNADYSDVMPTSEEEIKTTNPVATEEYGIVADNLQQQNTAPQIGTVNSQGALPGMVWQNRDVYLQGPIWAKIPHTDGNFHPSPLMGGFGLKHPPPQILIKNTPVPADPPTTFNQSKLNSFITQYSTGQVSVEIEWELQKENSKRWNPEIQYTSNYYKSTSVDFAVNTEGVYSEPRPIGTRYLTRNL

SEQ ID NO: 3021 - protein, 738 aa, synthetic construct
  REGION 1..738: note = source = /note="Description of Artificial Sequence: Synthetic polypeptide"
MAADGYLPDWLEDNLSEGIREWWALKPGAPKPKANQQKQDDGRGLVLPGYKYLGPFNGLDKGEPVNAADAAALEHDKAYDQQLQAGDNPYLRYNHADAEFQERLQEDTSFGGNLGRAVFQAKKRVLEPLGLVEEGAKTAPGKKRPVEPSPQRSPDSSTGIGKKGQQPARKRLNFGQTGDSESVPDPQPLGEPPAAPSGVGPNTMAAGGGAPMADNNEGADGVGSSSGNWHCDSTWLGDRVITTSTRTWALPTYNNHLYKQISNGTSGGATNDNTYFGYSTPWGYFDFNRFHCHFSPRDWQRLINNNWGFRPKRLSFKLFNIQVKEVTQNEGTKTIANNLTSTIQVFTDSEYQLPYVLGSAHQGCLPPFPADVFTIPQYGYLTLNNGSQAVGRSSFYCLEYFPSQMLRTGNNFQFTYTFEDVPFHSSYAHSQSLDRLMNPLIDQYLYYLSRIQTTGGTANTQTLGFSQGGPNTMANQAKNWLPGPCYRQQRVSTTTGQNNNSNFAWTAGTKYHLNGRNSLANPGIAMATHKDDEGRFFPSNGILIFGKQNAARDNADYSDVMPTSEEEIKTTNPVATEEYGIVADNLQQQNTAPQIGTVNSQGALPGMVWQNRDVYLQGPIWAKIPHTDGNFHPSPLMGGFGLKHPPPQILIKNTPVPADPPTTFNQSKLNSFITQYSTGQVSVEIEWELQKENSKRWNPEIQYTSNYYKSTSVDFAVNTEGVYSEPRPIGTRYLTRNL

SEQ ID NO: 3022 - protein, 738 aa, synthetic construct
  REGION 1..738: note = source = /note="Description of Artificial Sequence: Synthetic polypeptide"
MAADGYLPDWLEDNLSEGIREWWALKPGAPKPKANQQKQDDGRGLVLPGYKYLGPFNGLDKGEPVNAADAAALEHDKAYDQQLQAGDNPYLRYNHADAEFQERLQEDTSFGGNLGRAVFQAKKRVLEPLGLVEEGAKTAPGKKRPVEPSPQRSPDSSTGIGKKGQQPARKRLNFGQTGDSESVPDPQPLGEPPAAPSGVGPNTMAAGGGAPMADNNEGADGVGSSSGNWHCDSTWLGDRVITTSTRTWALPTYNNHLYKQISNGTSGGATNDNTYFGYSTPWGYFDFNRFHCHFSPRDWQRLINNNWGFRTKRLSFKLFNIQVKEVTQNEGTKTIANNLTSTIQVFTDSEYQLPYVLGSAHQGCLPPFPADVFTIPQYGYLTLNNGSQAVGRSSFYCLEYFPSQMLRTGNNFQFTYTFEDVPFHSSYAHSQSLDRLMNPLIDQYLYYLSRIQTTGGTANTQTLGFSQGGPNTMANQAKNWLPGPCYRQQRVSTTTGQNNNSNFAWTAGTKYHLNGRNSLANPGIAMATHKDDEERFFPSNGILIFGKQNAARDNADYSDVMPTSEEEIKTTNPVATEEYGIVADNLQQQNTAPQIGTVNSQGALPGMVWQNRDVYLQGPIWAKIPHTDGNFHPSPLMGGFGLKHPPPQILIKNTPVPADPPTTFNQSKLNSFITQYSTGQVSVEIEWELQKENSKRWNPEIQYTSNYYKSTSVDFAVNTEGVYSEPRPIGTRYLTRNL

SEQ ID NO: 3023 - protein, 738 aa, synthetic construct
  REGION 1..738: note = source = /note="Description of Artificial Sequence: Synthetic polypeptide"
MAADGYLPDWLEDNLSEGIREWWALKPGAPKPKANQQKQDDGRGLVLPGYKYLGPFNGLDKGEPVNAADAAALEHDKAYDQQLQAGDNPYLRYNHADAEFQERLQEDTSFGGNLGRAVFQAKKRVLEPLGLVEEGAKTAPGKKRPVEPSPQRSPDSSTGIGKKGQQPARKRLNFGQTGDSESVPDPQPLGEPPAAPSGVGPNTMAAGGGAPMADNNEGADGVGSSSGNWHCDSTWLGDRVITTSTRTWALPTYNNHLYKQISNGTSGGATNDNTYFGYSTPWGYFDFNRFHCHFSPRDWQRLINNNWGFRPKRLSFKLFNIQVKEVTQNEGTKTIANNLTSTIQVFTDSEYQLPYVLGSAHQGCLPPFPADVFTIPQYGYLTLNNGSQAVGRSSFYCLEYFPSQMLRTGNNFQFTYTFEDVPFHSSYAHSQSLDRLMNPLIDQYLYYLSRIQTTGGTANTQTLGFSQGGPNTMANQAKNWLPGPCYRQQRVSTTTGQNNNSNFAWTAGTKYHLNGRNSLANPGIAMATHKDDEERFFPSNGILIFGKQNAARDNADYSDVMPTSEEEIKTTNPVATEEYGIVADNLQQQNTAPQIGTVNSQGALPGMVWQNRDVYLQGPIWAKIPHTDGNFHPSPLMGGFGLKHPPPQILIKNTPVPADPPTTFNQSKLNSFITQCSTGQVSVEIEWELQKENSKRWNPEIQYTSNYYKSTSVDFAVNTEGVYSEPRPIGTRYLTRNL

SEQ ID NO: 3024 - protein, 738 aa, synthetic construct
  REGION 1..738: note = source = /note="Description of Artificial Sequence: Synthetic polypeptide"
MAADGYLPDWLEDNLSEGIREWWALKPGAPKPKANQQKQDDGRGLVLPGYKYLGPFNGLDKGEPVNAADAAALEHDKAYDQQLQAGDNPYLRYNHADAEFQERLQEDTSFGGNLGRAVFQAKKRVLEPLGLVEEGAKTAPGKKRPVEPSPQRSPDSSTGIGKKGQQPARKRLNFGQTGDSESVPDPQPLGEPPAAPSGVGPNTMAAGGGAPMADNNEGADGVGSSSGNWHCDSTWLGDRVITTSTRTWALPTYNNHLYKQISNGTSGGATNDNTYFGYSTPWGYFDFNRFHCHFSPRDWQRLINNNWGFRPKRLSFKLFNIQVKEVTQNEGTKTIANNLTSTIQVFTDSEYQLPYVLGSAHQGCLPPFPADVFTIPQYGYLTLNNGSQAVGRSSFYCLEYFPSQMLRTGNNFQFTYTFEDVPFRSSYAHSQSLDRLMNPLIDQYLYYLSRIQTTGGTANTQTLGFSQGGPNTMANQAKNWLPGPCYRQQRVSTTTGQNNNSNFAWTAGTKYHLNGRNSLANPGIAMATHKDDEERFFPSNGILIFGKQNAARDNADYSDVMPTSEEEIKTTNPVATEEYGIVADNLQQQNTAPQIGTVNSQGALPGMVWQNRDVYLQGPIWAKIPHTDGNFHPSPLMGGFGLKHPPPQILIKNTPVPADPPTTFNQSKLNSFITQYSTGQVSVEIEWELQKENSKRWNPEIQYTSNYYKSTSVDFAVNTEGVYSEPRPIGTRYLTRNL

SEQ ID NO: 3025 - protein, 738 aa, synthetic construct
  REGION 1..738: note = source = /note="Description of Artificial Sequence: Synthetic polypeptide"
MAADGYLPDWLEDNLSEGIREWWALKPGAPKPKANQQKQDDGRGLVLPGYKHLGPFNGLDKGEPVNAADAAALEHDKAYDQQLQAGDNPYLRYNHADAEFQERLQEDTSFGGNLGRAVFQAKKRVLEPLGLVEEGAKTAPGKKRPVEPSPQRSPDSSTGIGKKGQQPARKRLNFGQTGDSESVPDPQPLGEPPAAPSGVGPNTMAAGGGAPMADNNEGADGVGSSSGNWHCDSTWLGDRVITTSTRTWALPTYNNHLYKQISNGTSGGATNDNTYFGYSTPWGYFDFNRFHCHFSPRDWQRLINNNWGFRPKRLSFKLFNIQVKEVTQNEGTKTIANNLTSTIQVFTDSEYQLPYVLGSAHQGCLPPFPADVFTIPQYGYLTLNNGSQAVGRSSFYCLEYFPSQMLRTGNNFQFTYTFEDVPFHSSYAHSQSLDRLMNPLIDQYLYYLSRIQTTGGTANTQTLGFSQGGPNTMANQAKNWLPGPCYRQQRVSTTTGQNNNSNFAWTAGTKYHLNGRNSLANPGIAMATHKDDEERFFPSNGILIFGKQNAARDNADYSDVMPTSEEEIKTTNPVATEEYGIVADNLQQQNTAPQIGTVNSQGALPGMVWQNRDVYLQGPIWAKIPHTDGNFHPSPLMGGFGLKHPPPQILIKNTPVPADPPTTFNQSKLNSFITQYSTGQVSVEIEWELQKENSKRWNPEIQYTSNYYKSTSVDFAVNTEGVYSEPRPIGTRYLTRNL

SEQ ID NO: 3026 - protein, 738 aa, synthetic construct
  REGION 1..738: note = source = /note="Description of Artificial Sequence: Synthetic polypeptide"
MAADGYLPDWLEDNLSEGIREWWALKPGAPKPKANQQKQDDGRGLVLPGYKYLGPFNGLDKGEPVNAADAAALEHDKAYDQQLQAGDNPYLRYNHADAEFQERLQEDTSFGGNLGRAVFQAKKRVLEPLGLVEEGAKTAPGKKRPVEPSPQRSPDSSTGIGKKGQQPARKRLNFGQTGDSESVPDPQPLGEPPAAPSGVGPNTMAAGGGAPMADNNEGADGVGSSSGNWHCDSTWLGDRVITTSTRTWALPTYNNHLYKQISNGTSGGATNDNTYFGYSTPWGYFDFNRFHCHFSPRDWQRLINNNWGFRPKRLSFKLFNIQVKEVTQNEGTKTIANNLTSTIQVFTDSEYQLPYVLGSAHQGCLPPFPADVFTIPQYGYLTLNNGSQAVGRSSFYCLEYFPSQMLRTGNNFQFTYTFEDVPFHSSYAHSQSLDRLMNPLIDQYLYYLSRIQTTGGTANTQTLGFSQGGPNTMANQAKNWLPGPCYRQQRVSATTGQNNNSNFAWTAGTKYHLNGRNSLANPGIAMATHKDDEERFFPSNGILIFGKQNAARDNADYSDVMPTSEEEIKTTNPVATEEYGIVADNLQQQNTAPQIGTVNSQGALPGMVWQNRDVYLQGPIWAKIPHTDGNFHPSPLMGGFGLKHPPPQILIKNTPVPADPPTTFNQSKLNSFITQYSTGQVSVEIEWELQKENSKRWNPEIQYTSNYYKSTSVDFAVNTEGVYSEPRPIGTRYLTRNL

SEQ ID NO: 3027 - protein, 738 aa, synthetic construct
  REGION 1..738: note = source = /note="Description of Artificial Sequence: Synthetic polypeptide"
MAADGYLPDWLEDNLSEGIREWWALKPGAPKPKANQQKQDDGRGLVLPGYKYLGPFNGLDKGEPVNAADAAALEHDKAYDQQLQAGDNPYLRYNHADAEFQERLQEDTSFGGNLGRAVFQAKKRVLEPLGLVEEGAKTAPGKKRPVEPSPQRSPDSSTGIGKKGQQPARKRLNFGQTGGSESVPDPQPLGEPPAAPSGVGPNTMAAGGGAPMADNNEGADGVGSSSGNWHCDSTWLGDRVITTSTRTWALPTYNNHLYKQISNGTSGGATNDNTYFGYSTPWGYFDFNRFHCHFSPRDWQRLINNNWGFRPKRLSFKLFNIQVKEVTQNEGTKTIANNLTSTIQVFTDSEYQLPYVLGSAHQGCLPPFPADVFTIPQYGYLTLNNGSQAVGRSSFYCLEYFPSQMLRTGNNFQFTYTFEDVPFHSSYAHSQSLDRLMNPLIDQYLYYLSRIQTTGGTANTQTLGFSQGGPNTMANQAKNWLPGPCYRQQRVSTTTGQNNNSNFAWTAGTKYHLNGRNSLANPGIAMATHKDDEERFFPSNGILIFGKQNAARDNADYSDVMPTSEEEIKTTNPVATEEYGIVADNLQQQNTAPQIGTVNSQGALPGMVWQNRDVYLQGPIWAKIPHTDGNFHPSPLMGGFGLKHPPPQILIKNTPVPADPPTTFNQSKLNSFITQYSTGQVSVEIEWELQKENSKRWNPEIQYTSNYYKSTSVDFAVNTEGVYSEPRPIGTRYLTRNL

SEQ ID NO: 3028 - protein, 738 aa, synthetic construct
  REGION 1..738: note = source = /note="Description of Artificial Sequence: Synthetic polypeptide"
MAADGYLPDWLEDNLSEGIREWWALKPGAPKPKANQQKQDDGRGLVLPGYKYLGPFNGLDKGEPVNAADAAALEHDKAYDQQLQAGDNPYLRYNHADAEFQERLQEDTSFGGNLGRAVFQAKKRVLEPLGLVEEGAKTAPGKKRPVEPSPQRSPDSSTGIGKKGQQPARKRLNFGQTGDSESVPDPQPLGEPPAAPSGVGPNTMAAGGGAPMADNNEGADGVGSSSGNWHCDSAWLGDRVITTSTRTWALPTYNNHLYKQISNGTSGGATNDNTYFGYSTPWGYFDFNRFHCHFSPRDWQRLINNNWGFRPKRLSFKLFNIQVKEVTQNEGTKTIANNLTSTIQVFTDSEYQLPYVLGSAHQGCLPPFPADVFTIPQYGYLTLNNGSQAVGRSSFYCLEYFPSQMLRTGNNFQFTYTFEDVPFHSSYAHSQSLDRLMNPLIDQYLYYLSRIQTTGGTANTQTLGFSQGGPNTMANQAKNWLPGPCYRQQRVSTTTGQNNNSNFAWTAGTKYHLNGRNSLANPGIAMATHKDDEERFFPSNGILIFGKQNAARDNADYSDVMPTSEEEIKTTNPVATEEYGIVADNLQQQNTAPQIGTVNSQGALPGMVWQNRDVYLQGPIWAKIPHTDGNFHPSPLMGGFGLKHPPPQILIKNTPVPADPPTTFNQSKLNSFITQYSTGQVSVEIEWELQKENSKRWNPEIQYTSNYYKSTSVDFAVNTEGVYSEPRPIGTRYLTRNL

SEQ ID NO: 3029 - protein, 738 aa, synthetic construct
  REGION 1..738: note = source = /note="Description of Artificial Sequence: Synthetic polypeptide"
MAADGYLPDWLEDNLSEGIREWWALKPGAPKPKANQQKQDDGRGLVLPGYKYLGPFNGLDKGEPVNAADAAALEHDKAYDQQLQAGDNPYLRYNHADAEFQERLQEDTSFGGNLGRAVFQAKKRVLEPLGLVEEGAKTAPGKKRPVEPSPQRSPDSSTGIGKKGQQPARKRLNFGQTGDSESVPDPQPLGEPPAAPSGVGPNTMAAGGGAPMADNNEGADGVGSSSGNWHCDSTWLGDRVITTSTRTWALPTYNNHLYKQISNGTSGGATNDNTYFGYSTPWGYFDFNRFHCHFSPRDWQRLINNNWGFRPKRLSFKLFNIQVKEVTQNEGTKTIANNLTSTIQVFTDSEYQLPYVLGSAHRGCLPPFPADVFTIPQYGYLTLNNGSQAVGRSSFYCLEYFPSQMLRTGNNFQFTYTFEDVPFHSSYAHSQSLDRLMNPLIDQYLYYLSRIQTTGGTANTQTLGFSQGGPNTMANQAKNWLPGPCYRQQRVSTTTGQNNNSNFAWTAGTKYHLNGRNSLANPGIAMATHKDDEERFFPSNGILIFGKQNAARDNADYSDVMPTSEEEIKTTNPVATEEYGIVADNLQQQNTAPQIGTVNSQGALPGMVWQNRDVYLQGPIWAKIPHTDGNFHPSPLMGGFGLKHPPPQILIKNTPVPADPPTTFNQSKLNSFITQYSTGQVSVEIEWELQKENSKRWNPEIQYTSNYYKSTSVDFAVNTEGVYSEPRPIGTRYLTRNL

SEQ ID NO: 3030 - protein, 738 aa, synthetic construct
  REGION 1..738: note = source = /note="Description of Artificial Sequence: Synthetic polypeptide"
MAADGYLPDWLEDNLSEGIREWWALKPGAPKPKANQQKQDDGRGLVLPGYKYLGPFNGLDKGEPVNAADAAALEHDKAYDQQLQAGDNPYLRYNHADAEFQERLQEDTSFGGNLGRAVFQAKKRVLEPLGLVEEGAKTAPGKKRPVEPSPQRSPDSSTGIGKKGQQPARKRLNFGQTGDSESVPDPQPLGEPPAAPSGVGPNTMAAGGGAPMADNNEGADGVGSSSGNWHCDSTWLGDRVITTSTRTWALPTYNNHLYKQISNGTSGGATNDNTYFGYSTPWGYFDFNRFHCHFSPRDWQRLINNNWGFRPKRLSFKLFNIQVKEVTQNEGTKTIANNLTSTIQVFTDSEYQLPYVLGSAHQGCLPPFPADVFTIPQYGYLTLNNGSQAVGRSSFYCLEYFPSQMLRTGNNFQFTYTFEDVPFHSSYAHSQSLDRLMNPLIDQYLYYLSRIQTTGGTANTQTLGFSQGGPNTMANQAKNWLPGPCYRQQRVSTTTGQNNNSNFAWTAGTKYHLNGRNSLANPGIAMATHKDDEERFFPSNGILIFGKQNAARDNADYSDVMPTSEEEIKTTNPVATEEYGIVADNLQQQNTAPQIGTVNSQGALPGMVWQNRDVYLQGPIWAKIPHTDGNFHPSPLMGGFGLKHPPPQILIKNTPVSADPPTTFNQSKLNSFITQYSTGQVSVEIEWELQKENSKRWNPEIQYTSNYYKSTSVDFAVNTEGVYSEPRPIGTRYLTRNL

SEQ ID NO: 3031 - protein, 738 aa, synthetic construct
  REGION 1..738: note = source = /note="Description of Artificial Sequence: Synthetic polypeptide"
MAADGYLPDWLEDNLSEGIREWWALKPGAPKPKANQQKQDDGRGLVLPGYRYLGPFNGLDKGEPVNAADAAALEHDKAYDQQLQAGDNPYLRYNHADAEFQERLQEDTSFGGNLGRAVFQAKKRVLEPLGLVEEGAKTAPGKKRPVEPSPQRSPDSSTGIGKKGQQPARKRLNFGQTGDSESVPDPQPLGEPPAAPSGVGPNTMAAGGGAPMADNNEGADGVGSSSGNWHCDSTWLGDRVITTSTRTWALPTYNNHLYKQISNGTSGGATNDNTYFGYSTPWGYFDFNRFHCHFSPRDWQRLINNNWGFRPKRLSFKLFNIQVKEVTQNEGTKTIANNLTSTIQVFTDSEYQLPYVLGSAHQGCLPPFPADVFTIPQYGYLTLNNGSQAVGRSSFYCLEYFPSQMLRTGNNFQFTYTFEDVPFHSSYAHSQSLDRLMNPLIDQYLYYLSRIQTTGGTANTQTLGFSQGGPNTMANQAKNWLPGPCYRQQRVSTTTGQNNNSNFAWTAGTKYHLNGRNSLANPGIAMATHKDDEERFFPSNGILIFGKQNAARDNADYSDVMPTSEEEIKTTNPVATEEYGIVADNLQQQNTAPQIGTVNSQGALPGMVWQNRDVYLQGPIWAKIPHTDGNFHPSPLMGGFGLKHPPPQILIKNTPVPADPPTTFNQSKLNSFITQYSTGQVSVEIEWELQKENSKRWNPEIQYTSNYYKSTSVDFAVNTEGVYSEPRPIGTRYLTRNL

SEQ ID NO: 3032 - protein, 738 aa, synthetic construct
  REGION 1..738: note = source = /note="Description of Artificial Sequence: Synthetic polypeptide"
MAADGYLPDWLEDNLSEGIREWWALKPGAPKPKANQQKQDDGRGLVLPGYKYLGPFNGLDKGEPVNAADAAALEHDKAYDQQLQAGDNPYLRYNHADAEFQERLQEDTSFGGNLGRAVFQAKKRVLEPLGLVEEGAKTAPGKKRPVEPSPQRSPDSSTGIGKKGQQPARKRLNFGQTGDSESVPDPQPLGEPPAAPSGVGPNTMAAGGGAPMADNNEGADGVGSSSGNWHCDSTWLGDRVITTSTRTWALPTYNNHLYKQISNGTSGGATNDNTYFGYSTPWGYFDFNRFHCHFSPRDWQRLINNNWGFRPKRLSFKLFNIQVKEVTQNEGTKTIANNLTSTIQVFTDSEYQLPYVLGSAHQGCLPPFPADVFTIPQYGYLTLNNGSQAVGRSSFYCLEYFPSQMLRTGNNFQFTYTFEDVPFHSSYAHSQSLDRLMNPLIDQYLYYLSRIQTTGGTANTQTLGFSQGGPNTMANQAKNWLPGPCYRQQRVSTTTGQNNNSNFAWTAGTKYRLNGRNSLANPGIAMATHKDDEERFFPSNGILIFGKQNAARDNADYSDVMPTSEEEIKTTNPVATEEYGIVADNLQQQNTAPQIGTVNSQGALPGMVWQNRDVYLQGPIWAKIPHTDGNFHPSPLMGGFGLKHPPPQILIKNTPVPADPPTTFNQSKLNSFITQYSTGQVSVEIEWELQKENSKRWNPEIQYTSNYYKSTSVDFAVNTEGVYSEPRPIGTRYLTRNL

SEQ ID NO: 3033 - protein, 738 aa, synthetic construct
  REGION 1..738: note = source = /note="Description of Artificial Sequence: Synthetic polypeptide"
MAADGYLPDWLEDNLSEGIREWWALKPGAPKPKANQQKQDDGRGLVLPGYKYLGPFNGLDKGEPVNAADAAALEHDKAYDQQLQAGDNPYLRYNHADAEFQERLQEDTSFGGNLGRAVFQAKKRVLEPLGLVEEGAKTAPGKKRPVEPSPQRSPDSSTGIGKKGQQPARKRLNFGQTGDSESAPDPQPLGEPPAAPSGVGPNTMAAGGGAPMADNNEGADGVGSSSGNWHCDSTWLGDRVITTSTRTWALPTYNNHLYKQISNGTSGGATNDNTYFGYSTPWGYFDFNRFHCHFSPRDWQRLINNNWGFRPKRLSFKLFNIQVKEVTQNEGTKTIANNLTSTIQVFTDSEYQLPYVLGSAHQGCLPPFPADVFTIPQYGYLTLNNGSQAVGRSSFYCLEYFPSQMLRTGNNFQFTYTFEDVPFHSSYAHSQSLDRLMNPLIDQYLYYLSRIQTTGGTANTQTLGFSQGGPNTMANQAKNWLPGPCYRQQRVSTTTGQNNNSNFAWTAGTKYHLNGRNSLANPGIAMATHKDDEERFFPSNGILIFGKQNAARDNADYSDVMPTSEEEIKTTNPVATEEYGIVADNLQQQNTAPQIGTVNSQGALPGMVWQNRDVYLQGPIWAKIPHTDGNFHPSPLMGGFGLKHPPPQILIKNTPVPADPPTTFNQSKLNSFITQYSTGQVSVEIEWELQKENSKRWNPEIQYTSNYYKSTSVDFAVNTEGVYSEPRPIGTRYLTRNL

SEQ ID NO: 3034 - protein, 738 aa, synthetic construct
  REGION 1..738: note = source = /note="Description of Artificial Sequence: Synthetic polypeptide"
MAADGYLPDWLEDNLSEGIREWWALKPGAPKPKANQQKQDDGRGLVLPGYKYLGPFNGLDKGEPVNAADAAALEHDKAYDQQLQAGDNPYLRYNHADAEFQERLQEDTSFGGNLGRAVFQAKKRVLEPLGLVEEGAKTAPGKKRPVEPSPQRSPDPSTGIGKKGQQPARKRLNFGQTGDSESVPDPQPLGEPPAAPSGVGPNTMAAGGGAPMADNNEGADGVGSSSGNWHCDSTWLGDRVITTSTRTWALPTYNNHLYKQISNGTSGGATNDNTYFGYSTPWGYFDFNRFHCHFSPRDWQRLINNNWGFRPKRLSFKLFNIQVKEVTQNEGTKTIANNLTSTIQVFTDSEYQLPYVLGSAHQGCLPPFPADVFTIPQYGYLTLNNGSQAVGRSSFYCLEYFPSQMLRTGNNFQFTYTFEDVPFHSSYAHSQSLDRLMNPLIDQYLYYLSRIQTTGGTANTQTLGFSQGGPNTMANQAKNWLPGPCYRQQRVSTTTGQNNNSNFAWTAGTKYHLNGRNSLANPGIAMATHKDDEERFFPSNGILIFGKQNAARDNADYSDVMPTSEEEIKTTNPVATEEYGIVADNLQQQNTAPQIGTVNSQGALPGMVWQNRDVYLQGPIWAKIPHTDGNFHPSPLMGGFGLKHPPPQILIKNTPVPADPPTTFNQSKLNSFITQYSTGQVSVEIEWELQKENSKRWNPEIQYTSNYYKSTSVDFAVNTEGVYSEPRPIGTRYLTRNL

SEQ ID NO: 3035 - protein, 738 aa, synthetic construct
  REGION 1..738: note = source = /note="Description of Artificial Sequence: Synthetic polypeptide"
MAADGYLPDWLEDNLSEGIREWWALKPGAPKPKANQQKQDDGRGLVLPGYKYLGPFNGLDKGEPVNAADAAALEHDKAYDQQLQAGDNPYLRYNHADAEFQERLQEDTSFGGNLGRAVFQAKKRVLEPLGLVEEGAKTAPGKKRPVEPSPQRSPDSSTGIGKKGQQPARKRLNFGQTGDSESVPDPQPLGEPPAAPSGVGPNTMAAGGGAPMADNNEGADGVGSSSGNWHCDSTWLGDRVITTSTRTWALPTYNNHLYKQISNGTSGGATNDNTYFGYSTPWGYFDFNRFHCHFSPRDWQRLINNNWGFRPKRLSFKLFNIQVKEVTQNEGTKTIANNLTSTIQVFTDSEYRLPYVLGSAHQGCLPPFPADVFTIPQYGYLTLNNGSQAVGRSSFYCLEYFPSQMLRTGNNFQFTYTFEDVPFHSSYAHSQSLDRLMNPLIDQYLYYLSRIQTTGGTANTQTLGFSQGGPNTMANQAKNWLPGPCYRQQRVSTTTGQNNNSNFAWTAGTKYHLNGRNSLANPGIAMATHKDDEERFFPSNGILIFGKQNAARDNADYSDVMPTSEEEIKTTNPVATEEYGIVADNLQQQNTAPQIGTVNSQGALPGMVWQNRDVYLQGPIWAKIPHTDGNFHPSPLMGGFGLKHPPPQILIKNTPVPADPPTTFNQSKLNSFITQYSTGQVSVEIEWELQKENSKRWNPEIQYTSNYYKSTSVDFAVNTEGVYSEPRPIGTRYLTRNL

SEQ ID NO: 3036 - protein, 738 aa, synthetic construct
  REGION 1..738: note = source = /note="Description of Artificial Sequence: Synthetic polypeptide"
MAADGYLPDWLEDNLSEGIREWWALKPGAPKPKANQQKQDDGRGLVLPGYKYLGPFNGLDKGEPVNAADAAALEHDKAYDQQLQAGDNPYLRYNHADAEFQERLQEDTSFGGNLGRAVFQAKKRVLEPLGLVEEGAKTAPGKKRPVEPSPQRSPDSSTGIGKKGQQPARKRLNFGQTGDSESVPDPQPLGEPPAAPSGVGPNTMAAGGGAPMADNNEGADGVGSSSGNWHCDSTWLGDRVITTSTRTWALPTYNNHLYKQISNGTSGGATNDNTYFGYSTPWGYFDFNRFHCHFSPRDWQRLINNNWGFRPKRLSFKLFNIQVKEVTQNEGTKTIANNLTSTIQVFTDSEYQLPYVLGSAHQGCLPPFPADVFTIPQYGYLTLNNGSQAVGRSSFYCLEYFPSQMLRTGNNFQFTYTFEDVPFHSSYAHSQSLDRLMNPLIDQYLYYLSRIQTTGGTANTQTLGFSQGGPNTMANQAKNWLPGPCYRQQRVSTTTGQNNNSNFAWTAGTKYHLNGRNSLANPGIAMATHKDDEERFFPSNGILIFGKQNAARDNADYSDVMPTSEEEIKTTNPVATEEYGIVADNLQQQNTAPQIGTVNSQGALPGMVWQNRDVYLQGPIWAKIPHTDGNFHPSPLMGGFGLKHPPPQILIKNTPVPADPPTTFNQPKLNSFITQYSTGQVSVEIEWELQKENSKRWNPEIQYTSNYYKSTSVDFAVNTEGVYSEPRPIGTRYLTRNL

SEQ ID NO: 3037 - protein, 738 aa, synthetic construct
  REGION 1..738: note = source = /note="Description of Artificial Sequence: Synthetic polypeptide"
MAADGYLPDWLEDNLSEGIREWWALKPGAPKPKANQQKQDDGRGLVLPGYKYLGPFNGLDKGEPVNAADAAALEHDKAYDQQLQAGGNPYLRYNHADAEFQERLQEDTSFGGNLGRAVFQAKKRVLEPLGLVEEGAKTAPGKKRPVEPSPQRSPDSSTGIGKKGQQPARKRLNFGQTGDSESVPDPQPLGEPPAAPSGVGPNTMAAGGGAPMADNNEGADGVGSSSGNWHCDSTWLGDRVITTSTRTWALPTYNNHLYKQISNGTSGGATNDNTYFGYSTPWGYFDFNRFHCHFSPRDWQRLINNNWGFRPKRLSFKLFNIQVKEVTQNEGTKTIANNLTSTIQVFTDSEYQLPYVLGSAHQGCLPPFPADVFTIPQYGYLTLNNGSQAVGRSSFYCLEYFPSQMLRTGNNFQFTYTFEDVPFHSSYAHSQSLDRLMNPLIDQYLYYLSRIQTTGGTANTQTLGFSQGGPNTMANQAKNWLPGPCYRQQRVSTTTGQNNNSNFAWTAGTKYHLNGRNSLANPGIAMATHKDDEERFFPSNGILIFGKQNAARDNADYSDVMPTSEEEIKTTNPVATEEYGIVADNLQQQNTAPQIGTVNSQGALPGMVWQNRDVYLQGPIWAKIPHTDGNFHPSPLMGGFGLKHPPPQILIKNTPVPADPPTTFNQSKLNSFITQYSTGQVSVEIEWELQKENSKRWNPEIQYTSNYYKSTSVDFAVNTEGVYSEPRPIGTRYLTRNL

SEQ ID NO: 3038 - protein, 738 aa, synthetic construct
  REGION 1..738: note = source = /note="Description of Artificial Sequence: Synthetic polypeptide"
MAADGYLPDWLEDNLSEGIREWWALKPGAPKPKANQQKQDDGRGLVLPGYKYLGPFNGLDKGEPVNAADAAALEHDKAYDQQLQAGDNPYLRYNHADAEFQERLQEDTSFGGNLGRAVFQAKKRVLEPLGLVEEGAKTAPGKKRPVEPSPQRSPDSSTGIGKKGQQPARKRLNFGQTGDSESVPDPQPLGEPPAAPSGVGPNTMAAGGGAPMADNNEGADGVGSSSGNWHCDSTWLGDRVITTSTRTWALPTYNNHLYKQISNGTSGGATNDNTYFGYSTPWGYFDFNRFHCHFSPRDWQRLINNNWGFRPKRLSFKLFNIQVKEVTQNEGTKTIANNLTSTIQVFTDSEYQLPYVLGSAHQGCLPPFPADVFTIPQYGYLTLNNGSQAVGRSSFYCLEYFPSQMLRTGNNFQFTYTFEDVPFHSSYAHSQSLDRLMNPLIDQYLYYLSRIQTTGGTANTQTLGFSQGGPNTMANQAKNWLPGPCYRQQRVSTATGQNNNSNFAWTAGTKYHLNGRNSLANPGIAMATHKDDEERFFPSNGILIFGKQNAARDNADYSDVMPTSEEEIKTTNPVATEEYGIVADNLQQQNTAPQIGTVNSQGALPGMVWQNRDVYLQGPIWAKIPHTDGNFHPSPLMGGFGLKHPPPQILIKNTPVPADPPTTFNQSKLNSFITQYSTGQVSVEIEWELQKENSKRWNPEIQYTSNYYKSTSVDFAVNTEGVYSEPRPIGTRYLTRNL

SEQ ID NO: 3039 - protein, 738 aa, synthetic construct
  REGION 1..738: note = source = /note="Description of Artificial Sequence: Synthetic polypeptide"
MAADGYLPDWLEDNLSEGIREWWALKPGAPKPKANQQKQDDGRGLVLPGYKYLGPFNGLDKGEPVNAADAAALEHDKAYDQQLQAGDNPYLRYNHADAEFQERLQEDTSFGGNLGRAVFQAKKRVLEPLGLVEEGAKTAPGKKRPVEPSPQRSPDSSTGIGKKGQQPARKRLNFGQTGDSESVPDPQPLGEPPAAPSGVGPNTMAAGGGAPMADNNEGADGVGSSSGNWHCDSTWLGDRVITTSTRTWALPTYNNHLYKQISNGTSGGATNDNTYFGYSTPWGYFDFNRFHCHFSPRDWQRLINNNWGFRPKRLSFKLFNIQVKEVTQNEGTKTIANNLTSTIQVFTDSEYQLPYVLGSAHQGCPPPFPADVFTIPQYGYLTLNNGSQAVGRSSFYCLEYFPSQMLRTGNNFQFTYTFEDVPFHSSYAHSQSLDRLMNPLIDQYLYYLSRIQTTGGTANTQTLGFSQGGPNTMANQAKNWLPGPCYRQQRVSTTTGQNNNSNFAWTAGTKYHLNGRNSLANPGIAMATHKDDEERFFPSNGILIFGKQNAARDNADYSDVMPTSEEEIKTTNPVATEEYGIVADNLQQQNTAPQIGTVNSQGALPGMVWQNRDVYLQGPIWAKIPHTDGNFHPSPLMGGFGLKHPPPQILIKNTPVPADPPTTFNQSKLNSFITQYSTGQVSVEIEWELQKENSKRWNPEIQYTSNYYKSTSVDFAVNTEGVYSEPRPIGTRYLTRNL

SEQ ID NO: 3040 - protein, 738 aa, synthetic construct
  REGION 1..738: note = source = /note="Description of Artificial Sequence: Synthetic polypeptide"
MAADGYLPDWLEDNLSEGIREWWALKPGAPKPKANQQKQDDGRGLVLPGYKYLGPFNGLDKGEPVNAADAAALEHDKAYDQQPQAGDNPYLRYNHADAEFQERLQEDTSFGGNLGRAVFQAKKRVLEPLGLVEEGAKTAPGKKRPVEPSPQRSPDSSTGIGKKGQQPARKRLNFGQTGDSESVPDPQPLGEPPAAPSGVGPNTMAAGGGAPMADNNEGADGVGSSSGNWHCDSTWLGDRVITTSTRTWALPTYNNHLYKQISNGTSGGATNDNTYFGYSTPWGYFDFNRFHCHFSPRDWQRLINNNWGFRPKRLSFKLFNIQVKEVTQNEGTKTIANNLTSTIQVFTDSEYQLPYVLGSAHQGCLPPFPADVFTIPQYGYLTLNNGSQAVGRSSFYCLEYFPSQMLRTGNNFQFTYTFEDVPFHSSYAHSQSLDRLMNPLIDQYLYYLSRIQTTGGTANTQTLGFSQGGPNTMANQAKNWLPGPCYRQQRVSTTTGQNNNSNFAWTAGTKYHLNGRNSLANPGIAMATHKDDEERFFPSNGILIFGKQNAARDNADYSDVMPTSEEEIKTTNPVATEEYGIVADNLQQQNTAPQIGTVNSQGALPGMVWQNRDVYLQGPIWAKIPHTDGNFHPSPLMGGFGLKHPPPQILIKNTPVPADPPTTFNQSKLNSFITQYSTGQVSVEIEWELQKENSKRWNPEIQYTSNYYKSTSVDFAVNTEGVYSEPRPIGTRYLTRNL

SEQ ID NO: 3041 - protein, 738 aa, synthetic construct
  REGION 1..738: note = source = /note="Description of Artificial Sequence: Synthetic polypeptide"
MAADGYLPDWLEDNLSEGIREWWALKPGAPKPKANQQKQDDGRGLVLPGYKYLGPFNGLDKGEPVNAADAAALEHDKAYDQQLQAGDNPYLRYNHADAEFQERLQEDTSFGGNLGRAVFQAKKRVLEPLGLVEEGAKTAPGKKRPVEPSPQRSPDSSTGIGKKGQQPARKRLNFGQTGDSESVPDPQPLGEPPAAPSGVGPNTMAAGGGAPMADNNEGADGVGSSSGNWHCDSTWLGDRVITTSTRTWALPTYNNHLYKQISNGTSGGATNDNTYFGYSTPWGYFDFNRFHCHFSPRDWQRLINNNWGFRPKRLSFKLFNIQVKEVTQNEGTKTIANNLTSTIQVFTDSEYQLPYVLGSAHQGCLPPFPADVFTIPQYGYLTLNNGSQAVGRSSFYCLEYLPSQMLRTGNNFQFTYTFEDVPFHSSYAHSQSLDRLMNPLIDQYLYYLSRIQTTGGTANTQTLGFSQGGPNTMANQAKNWLPGPCYRQQRVSTTTGQNNNSNFAWTAGTKYHLNGRNSLANPGIAMATHKDDEERFFPSNGILIFGKQNAARDNADYSDVMPTSEEEIKTTNPVATEEYGIVADNLQQQNTAPQIGTVNSQGALPGMVWQNRDVYLQGPIWAKIPHTDGNFHPSPLMGGFGLKHPPPQILIKNTPVPADPPTTFNQSKLNSFITQYSTGQVSVEIEWELQKENSKRWNPEIQYTSNYYKSTSVDFAVNTEGVYSEPRPIGTRYLTRNL

SEQ ID NO: 3042 - protein, 738 aa, synthetic construct
  REGION 1..738: note = source = /note="Description of Artificial Sequence: Synthetic polypeptide"
MAADGYLPDWLEDNLSEGIREWWALKPGAPKPKANQQKQDDGRGLVLPGYKYLGPFNGLDKGEPVNAADAAALEHDKAYDQQLRAGDNPYLRYNHADAEFQERLQEDTSFGGNLGRAVFQAKKRVLEPLGLVEEGAKTAPGKKRPVEPSPQRSPDSSTGIGKKDQQPARKRLNFGQTGDSESVPDPQPLGEPPAAPSGVGPNTMAAGGGAPMADNNEGADGVGSSSGNWHCDSTWLGDRVITTSTRTWALPTYNNHLYKQISNGTSGGATNDNTYFGYSTPWGYFDFNRFHCHFSPRDWQRLINNNWGFRPKRLSFKLFNIQVKEVTQNEGTKTIANNLTSTIQVFTDSEYQLPYVLGSAHQGCLPPFPADVFTIPQYGYLTLNNGSQAVGRSSFYCLEYFPSQMLRTGNNFQFTYTFEDVPFHSSYAHSQSLDRLMNPLIDQYLYYLSRIQTTGGTANTQTLGFSQGGPNTMANQAKNWLPGPCYRQQRVSTTTGQNNNSNFAWTAGTKYHLNGRNSLANPGIAMATHKDDEERFFPSNGILIFGKQNAARDNADYSDVMPTSEEEIKTTNPVATEEYGIVADNLQQQNTAPQIGTVNSQGALPGMVWQNRDVYLQGPIWAKIPHTDGNFHPSPLMGGFGLKHPPPQILIKNTPVPADPPTTFNQSKLNSFITQYSTGQVSVEIEWELQKENSKRWNPEIQYTSNYYKSTSVDFAVNTEGVYSEPRPIGTRYLTRNL

SEQ ID NO: 3043 - protein, 738 aa, synthetic construct
  REGION 1..738: note = source = /note="Description of Artificial Sequence: Synthetic polypeptide"
MAADGYLPDWLEDNLSEGIREWWALKPGAPKPKANQQKQDDGRGLVLPGYKYLGPFNGLDKGEPVNAADAAALEHDKAYDQQLQAGDNPYLRYNHADAEFQERLQEDTSFGGNLGRAVFQAKKRVLEPLGLVEEGAKTAPGKKRPVEPSPQRSPDSSTGIGKKGQQPARKRLNFGQTGDSESVPDPQPLGEPPAAPSGVGPNTMAAGGGAPMADNNEGADGVGSSSGNWHCDSTWLGDRVITTSTRTWALPTYNNHLYKQISNGTSGGATNDNTYFGYSTPWGYFDFNRFHCHFSPRDWQRLINNNWGFRPKRLSFKLFNIQVKEVTQNEGTKTIANNLTSTIQVFTDSEYQLPYVLGSAHQGCLPPFPADVFTIPQYGYLTLNNGSQAVGRSSFYCLEYFPSQMLRTGNNFQFTYTFEDVPFHSSYAHSQSLDRLMNPLIDQYLYYLSRIQTTGGTANTQTLGFSQGGPNTMANQAKNWLPGPCYRQQRVSTTTGQNNNSNFAWTAGTKYHLNGRNSLANPGIAMATHKDDEERFFPSNGILIFGKQNAARDNADYSDVMPTSEEEIKTTNPVATEEYGIVADNLQQQNTAPQIGTVNSQGALPGMVWQNRDVYLQGPIWAKIPRTDGNFHPSPLMGGFGLKHPPPQILIKNTPVPADPPTTFNQSKLNSFITQYSTGQVSVEIEWELQKENSKRWNPEIQYTSNYYKSTSVDFAVNTEGVYSEPRPIGTRYLTRNL

SEQ ID NO: 3044 - protein, 738 aa, synthetic construct
  REGION 1..738: note = source = /note="Description of Artificial Sequence: Synthetic polypeptide"
MAADGYLPDWLEDNLSEGIREWWALKPGAPKPKANQQKQDDGRGLVLPGYKYLGPFNGLDKGEPVNAADAAALEHDKAYDQQLQAGDNPYLRYNHADAEFQERLQEDTSFGGNLGRAVFQAKKRVLEPLGLVEEGAKTAPGKKRPVEPSPQRSPDSSTGIGKKGQQPARKRLNFGQTGDSESVPDPQPLGEPPAAPSGVGPNTMAAGGGAPMADNNEGADGVGSSSGNWHCDSTWLGDRVITTSTRTWALPTYNNHLYKQISNGTSGGATNDNTYFGYSTPWGYFDFNRFHCHFSPRDWQRLINNNWGFRPKRLSFKLFNIQVKEVTQNEGTKTIANNLTSTIQVFTDSEYQLPYVLGSAHQGCLPPFPADVFTIPQYGYLTLNNGSQAVGRSSFYCLEYFPSQMLRTGNNFQFTYTFEDVPFHSSYAHSQSLDRLMNPLIDQYLYYLSRIQTTGGTANTQTLGFSQGGPNTMANQAKNWLPGPCYRQQRVSTTTGQNNNSNFAWTAGTKYHLNGRNSLANPGIAMATHKDDEERFFPSNGILIFGKQNAARDNADYSDVMPTSEEEIKTTNPVATEEYGIVADNLQQQNTAPQIGTVNSQGALPGMVWQNRDVYLQGPIWAKIPHTDGNFHPSPLMGGFGLKHPPPQILIKNTPVPADPPTTFNQSKLNSFITQYSTGQVSVEIGWELQKENSKRWNPEIQYTSNYYKSTSVDFAVNTEGVYSEPRPIGTRYLTRNL

SEQ ID NO: 3045 - protein, 738 aa, synthetic construct
  REGION 1..738: note = source = /note="Description of Artificial Sequence: Synthetic polypeptide"
MAADGYLPDWLEDNLSEGIREWWALKPGAPKPKANQQKQDDGRGLVLPGYKYLGPFNGLDKGEPVNAADAAALEHDKAYDQQLQAGDNPYLRYNHADAEFQERLQEDTSFGGNLGRAVFQAKKRVLEPLGLVEEGAKTAPGKKRPVEPSPQRSPDSSTGIGKKGQQPARKRLNFGQTGDSESVPDPQPLGEPPAAPSGVGPNTMATGGGAPMADNNEGADGVGSSSGNWHCDSTWLGDRVITTSTRTWALPTYNNHLYKQISNGTSGGATNDNTYFGYSTPWGYFDFNRFHCHFSPRDWQRLINNNWGFRPKRLSFKLFNIQVKEVTQNEGTKTIANNLTSTIQVFTDSEYQLPYVLGSAHQGCLPPFPADVFTIPQYGYLTLNNGSQAVGRSSFYCLEYFPSQMLRTGNNFQFTYTFEDVPFHGSYAHSQSLDRLMNPLIDQYLYYLSRIQTTGGTANTQTLGFSQGGPNTMANQAKNWLPGPCYRQQRVSTTTGQNNNSNFAWTAGTKYHLNGRNSLANPGIAMATHKDDEERFFPSNGILIFGKQNAARDNADYSDVMPTSEEEIKTTNPVATEEYGIVADNLQQQNTAPQIGTVNSQGALPGMVWQNRDVYLQGPIWAKIPHTDGNFHPSPLMGGFGLKHPPPQILIKNTPVPADPPTTFNQSKLNSFITQYSTGQVSVEIEWELQKENSKRWNPEIQYTSNYYKSTSVDFAVNTEGVYSEPRPIGTRYLTRNL

SEQ ID NO: 3046 - protein, 738 aa, synthetic construct
  REGION 1..738: note = source = /note="Description of Artificial Sequence: Synthetic polypeptide"
MAADGYLPDWLEDNLSEGIREWWALKPGAPKPKANQQKQDDGRGLVLPGYKYLGPFNGLDKGEPVNAADAAALEHDKAYDQQLQAGDNPYLRYNHADAEFQERLQEDTSFGGNLGRAVFQAKKRVLEPLGLVEEGAKTAPGKKRPVEPSPQRSPDSSTGIGKKGQQPARKRLNFGQTGDSESVPDPQPLGEPPAAPSGVGPNTMAAGGGAPMADNNEGADGVGSSSGNWHCDSTWLGDRVITTSTRTWALPTYNNHLYKQISNGTSGGATNDNTYFGYSTPWGYFDFNRFHCHFSPRDWQRLINNNWGFRPKRLSFKLFNIQVKEVTQNEGTKTIANNLTSTIQVFTDSEYLLPYVLGSAHQGCLPPFPADVFTIPQYGYLTLNNGSQAVGRSSFYCLEYFPSQMLRTGNNFQFTYTFEDVPFHSSYAHSQSLDRLMNPLIDQYLYYLSRIQTTGGTANTQTLGFSQGGPNTMANQAKNWLPGPCYRQQRVSTTTGQNNNSNFAWTAGTKYHLNGRNSLANPGIAMATHKDDEERFFPSNGILIFGKQNAARDNADYSDVMPTSEEEIKTTNPVATEEYGIVADNLQQQNTAPQIGTVNSQGALPGMVWQNRDVYLQGPIWAKIPHTDGNFHPSPLMGGFGLKHPPPQILIKNTPVPADPPTTFNQSKLNSFITQYSTGQVSVEIEWELQKENSKRWNPEIQYTSNYYKSTSVDFAVNTEGVYSEPRPIGTRYLTRNL

SEQ ID NO: 3047 - protein, 738 aa, synthetic construct
  REGION 1..738: note = source = /note="Description of Artificial Sequence: Synthetic polypeptide"
MAADGYPPDWLEDNLSEGIREWWALKPGAPKPKANQQKQDDGRGLVLPGYKYLGPFNGLDKGEPVNAADAAALEHDKAYDQQLQAGDNPYLRYNHADAEFQERLQEDTSFGGNLGRAVFQAKKRVLEPLGLVEEGAKTAPGKKRPVEPSPQRSPDSSTGIGKKGQQPARKRLNFGQTGDSESVPDPQPLGEPPAAPSGVGPNTMAAGGGAPMADNNEGADGVGSSSGNWHCDSTWLGDRVITTSTRTWALPTYNNHLYKQISNGTSGGATNDNTYFGYSTPWGYFDFNRFHCHFSPRDWQRLINNNWGFRPKRLSFKLFNIQVKEVTQNEGTKTIANNLTSTIQVFTDSEYQLPYVLGSAHQGCLPPFPADVFTIPQYGYLTLNNGSQAVGRSSFYCLEYFPSQMLRTGNNFQFTYTFEDVPFHSSYAHSQSLDRLMNPLIDQYLYYLSRIQTTGGTANTQTLGFSQGGPNTMANQAKNWLPGPCYRQQRVSTTTGQNNNSNFAWTAGTKYHLNGRNSLANPGIAMATHKDDEERFFPSNGILIFGKQNAARDNADYSDVMPTSEEEIKTTNPVATEEYGIVADNLQQQNTAPQIGTVNSQGALPGMVWQNRDVYLQGPIWAKIPHTDGNFHPSPLMGGFGLKHPPPQILIKNTPVPADPPTTFNQSKLNSFITQYSTGQVSVEIEWELQKENSKRWNPEIQYTSNYYKSTSVDFAVNTEGVYSEPRPIGTRYLTRNL

SEQ ID NO: 3048 - protein, 738 aa, synthetic construct
  REGION 1..738: note = source = /note="Description of Artificial Sequence: Synthetic polypeptide"
MAADGYLPDWLEDNLSEGIREWWALKPGAPKPKANQQKQDDGRGLVLPGYKYLGPFNGLDKGEPVNAADAAALEHDKAYDQQLQAGDNPYLRYNHADAEFQERLQEDTSFGGNLGRAVFQAKKRVLEPLGLVEEGAKTAPGKKRPVEPSPQRSPDSSTGIGKKGQQPARKRLNFGQTGDSESVPDPQPLGEPPAAPSGVGPNTMAAGGGAPMADNNEGADGVGSSSGNWHCDSTWLGDRVITTSTRTWALPTYNNHLYKQISNGTSGGATNDNTYFGYSTPWGYFDFNRFHCHFSPRDWQRLINNNWGFRPKRLSFKLFNIQVKEVTQNEGTKTIANNLTSTIQVFTDSEYQLPYVLGSAHQGCLPPFPADVFTIPQYGYLTLNNGSQAVGRSSFYCLEYFPSQMLRTGNNFQFTYTFEDVPFHSSYAHSQSLDRLMNPLIDQYLYYLSRIQTTGGTANTQTLGSSQGGPNTMANQAKNWLPGPCYRQQRVSTTTGQNNNSNFAWTAGTKYHLNGRNSLANPGIAMATHKDDEERFFPSNGILIFGKQNAARDNADYSDVMPTSEEEIKTTNPVATEEYGIVADNLQQQNTAPQIGTVNSQGALPGMVWQNRDVYLQGPIWAKIPHTDGNFHPSPLMGGFGLKHPPPQILIKNTPVPADPPTTFNQSKLNSFITQYSTGQVSVEIEWELQKENSKRWNPEIQYTSNYYKSTSVDFAVNTEGVYSEPRPIGTRYLTRNL

SEQ ID NO: 3049 - protein, 738 aa, synthetic construct
  REGION 1..738: note = source = /note="Description of Artificial Sequence: Synthetic polypeptide"
MAADGYLPDWLEDNLSEGIREWWALKPGAPKPKANQQKQDDGRGLVLPGYKYLGPFNGLDKGEPVNAADAAALEHDKAYDQQLQAGDNPYLRYNHADAEFQERLQEDTSFGGNLGRAVFQAKKRVLEPLGLVEEGAKTAPGKKRPVEPSPQRSPDSSTGIGKKGQQPARKRLNFGQTGDSESVPDPQPLGEPPAAPSGVGPNTMAAGGGAPMADNNEGADGVGSSSGNWHCDSTWLGDRVITTSTRTWALPTYNNHLYKQISNGTSGGATNDNTYFGYSTPWGYFDFNRFHCHFSPRDWQRLINNNWGFRPKRLSFKLFNIQVKEVTQNEGTKTIANNLTSTIQVFTDSEYQLPYVLGSAHQGCLPPFPADVFTIPQYGYLTLNNGSQAVGRSSFYCLEYFPSQMLRTGNNFQFTYTFEDVPFHSSYAHSQSLDRLMNPLIGQYLYYLSRIQTTGGTANTQTLGFSQGGPNTMANQAKNWLPGPCYRQQRVSTTTGQNNNSNFAWTAGTKYHLNGRNSLANPGIAMATHKDDEERFFPSNGILIFGKQNAARDNADYSDVMPTSEEEIKTTNPVATEEYGIVADNLQQQNTAPQIGTVNSQGALPGMVWQNRDVYLQGPIWAKIPHTDGNFHPSPLMGGFGLKHPPPQILIKNTPVPADPPTTFNQSKLNSFITQYSTGQVSVEIEWELQKENSKRWNPEIQYTSNYYKSTSVDFAVNTEGVYSEPRPIGTRYLTRNL

SEQ ID NO: 3050 - protein, 738 aa, synthetic construct
  REGION 1..738: note = source = /note="Description of Artificial Sequence: Synthetic polypeptide"
MAADGYLPDWLEDNLSEGIREWWALKPGAPKPKANQQKQDDGRGLVLPGYKYLGPFNGLDKGEPVNAADAAALEHDKAYDQQLQAGDNPYLRYNHADAEFQERLQEDTSFGGNLGRAVFQAKKRVLEPLGLVEEGAKTAPGKKRPVEPSPQRSPDSSTGIGKKGQQPARKRLNFGQTGDSESVPDPQPLGEPPAAPSGVGPNTMAAGGGAPMADNNEGADGVGSSSGNWHCDSTWLGDRVITTSTRTWALPTYNNHLYKQISNGTSGGATNDNTYFGYSTPWGYFDFNRFHCHFSPRDWQRLINNNWGFRPKRPSFKLFNIQVKEVTQNEGTKTIANNLTSTIQVFTDSEYQLPYVLGSAHQGCLPPFPADVFTIPQYGYLTLNNGSQAVGRSSFYCLEYFPSQMLRTGNNFQFTYTFEDVPFHSSYAHSQSLDRLMNPLIDQYLYYLSRIQTTGGTANTQTLGFSQGGPNTMANQAKNWLPGPCYRQQRVSTTTGQNNNSNFAWTAGTKYHLNGRNSLANPGIAMATHKDDEERFFPSNGILIFGKQNAARDNADYSDVMPTSEEEIKTTNPVATEEYGIVADNLQQQNTAPQIGTVNSQGALPGMVWQNRDVYLQGPIWAKIPHTDGNFHPSPLMGGFGLKHPPPQILIKNTPVPADPPTTFNQSKLNSFITQYSTGQVSVEIEWELQKENSKRWNPEIQYTSNYYKSTSVDFAVNTEGVYSEPRPIGTRYLTRNL

SEQ ID NO: 3051 - protein, 738 aa, synthetic construct
  REGION 1..738: note = source = /note="Description of Artificial Sequence: Synthetic polypeptide"
MAADGYLPDWLEDNLSEGIREWWALKPGAPKPKANQQKQDDGRGLVLPGYKYLGPFNGLDKGEPVNAADAAALEHDKAYDQQLQAGDNPYLRYNHADAEFQERLQEDTSFGGNLGRAVFQAKKRVLEPLGLVEEGAKTAPGKKRPVEPSPQRSPDSSTGIGKKGQQPARKRLNFGQTGDSESVPDPQPLGEPPAAPSGVGPNTMAAGGGAPMADNNEGADGVGSSSGNWHCDSTWLGDRVITTSTRTWALPTYNNHLYKQISNGTSGGATNDNTYFGYSTPWGYFDFNRFHCHFSPRDWQRLINNNWGFRPKRLSFKLFNIQVKEVTQNEGTKTIANNLTSTIQVFTDSEYQLPYVLGSAHQGCLPPFPADVFTIPQYGYLTLNNGSQAVGRSSFYCLEYFPSQMLRTGNNFQFTYTFEDVPFHSSYAHSQSLDRLMNPLIDQYLYYLSRIQTTGGTANTQTLGFSQGGPNTMANQAKNWLPGPCYRQQRVSTTTGQNNNSNFAWTAGTKYHLNGRNSLANPGIAMATHKDDGERFFPSNGILIFGKQNAARDNADYSDVMPTSEEEIKTTNPVATEEYGIVADNLQQQNTAPQIGTVNSQGALPGMVWQNRDVYLQGPIWAKIPHTDGNFHPSPLMGGFGLKHPPPQILIKNTPVPADPPTTFNQSKLNSFITQYSTGQVSVEIEWELQKENSKRWNPEIQYTSNYYKSTSVDFAVNTEGVYSEPRPIGTRYLTRNL

SEQ ID NO: 3052 - protein, 738 aa, synthetic construct
  REGION 1..738: note = source = /note="Description of Artificial Sequence: Synthetic polypeptide"
MAADGYLPDWLEDNLSEGIREWWALKPGAPKPKANQQKQDDGRGLVLPGYKYLGPFNGLDKGEPVNAADAAALEHDKAYDQQLQAGDNPYLRYNHADAEFQERLQEDTSFGGNLGRAVFQAKKRVLEPLGLVEEGAKTAPGKKRPVEPSPQRSPDSSTGIGKKGQQPARKRLNFGQTGDSESVPDPQPLGEPPAAPSGVGPNTMAAGGGAPMADNNEGADGVGSSSGNWHCDSTWLGDRVITTSTRTWAPPTYNNHLYKQISNGTSGGATNDNTYFGYSTPWGYFDFNRFHCHFSPRDWQRLINNNWGFRPKRLSFKLFNIQVKEVTQNEGTKTIANNLTSTIQVFTDSEYQLPYVLGSAHQGCLPPFPADVFTIPQYGYLTLNNGSQAVGRSSFYCLEYFPSQMLRTGNNFQFTYTFEDVPFHSSYAHSQSLDRLMNPLIDQYLYYLSRIQTTGGTANTQTLGFSQGGPNTMANQAKNWLPGPCYRQQRVSTTTGQNNNSNFAWTAGTKYHLNGRNSLANPGIAMATHKDDEERFFPSNGILIFGKQNAARDNADYSDVMPTSEEEIKTTNPVATEEYGIVADNLQQQNTAPQIGTVNSQGALPGMVWQNRDVYLQGPIWAKIPHTDGNFHPSPLMGGFGLKHPPPQILIKNTPVPADPPTTFNQSKLNSFITQYSTGQVSVEIEWELQKENSKRWNPEIQYTSNYYKSTSVDFAVNTEGVYSEPRPIGTRYLTRNL

SEQ ID NO: 3053 - protein, 738 aa, synthetic construct
  REGION 1..738: note = source = /note="Description of Artificial Sequence: Synthetic polypeptide"
MAADGYLPDWLEDNLSEGIREWWALKPGAPKPKANQQKQDDGRGLVLPGYKYLGPFNGLDKGEPVNAADAAALEHDKAYDQQLQAGDNPYLRYNHADAEFQERLQEDTSFGGNLGRAVFQAKKRVLEPLGLVEEGAKTAPGKKRPVEPSPQRSPDSSTGIGKKGQQPARKRLNFGQTGDSESVPDPQPLGEPPAAPSGVGPNTMAAGGGAPMADNNEGADGVGSSSGNWHCDSTWLGDRVITTSTRTWALPTYNNHLYKQISNGTSGGATNDNTYFGYSTPWGYFDFNRFHCHFSPRDWQRLINNNWGFRPKRLGFKLFNIQVKEVTQNEGTKTIANNLTSTIQVFTDSEYQLPYVLGSAHQGCLPPFPADVFTIPQYGYLTLNNGSQAVGRSSFYCLEYFPSQMLRTGNNFQFTYTFEDVPFHSSYAHSQSLDRLMNPLIDQYLYYLSRIQTTGGTANTQTLGFSQGGPNTMANQAKNWLPGPCYRQQRVSTTTGQNNNSNFAWTAGTKYHLNGRNSLANPGIAMATHKDDEERFFPSNGILIFGKQNAARDNADYSDVMPTSEEEIKTTNPVATEEYGIVADNLQQQNTAPQIGTVNSQGALPGMVWQNRDVYLQGPIWAKIPHTDGNFHPSPLMGGFGLKHPPPQILIKNTPVPADPPTTFNQSKLNSFITQYSTGQVSVEIEWELQKENSKRWNPEIQYTSNYYKSTSVDFAVNTEGVYSEPRPIGTRYLTRNL

SEQ ID NO: 3054 - protein, 738 aa, synthetic construct
  REGION 1..738: note = source = /note="Description of Artificial Sequence: Synthetic polypeptide"
MAADGYLPDWLEDNLSEGIREWWALKPGAPKPKANQQKQDDGRGLVLPGYKYLGPFNGLDKGEPVNAADAAALEHDKAYDQQLQAGDNPYLRYNHADAEFQERLQEDTSFGGNLGRAVFQAKKRVLEPLGLVEEGAKTAPGKKRPVEPSPQRSPDSSTGIGKKGQQPARKRLNFGRTGDSESVPDPQPLGEPPAAPSGVGPNTMAAGGGAPMADNNEGADGVGSSSGNWHCDSTWLGDRVITTSTRTWALPTYNNHLYKQISNGTSGGATNDNTYFGYSTPWGYFDFNRFHCHFSPRDWQRLINNNWGFRPKRLSFKLFNIQVKEVTQNEGTKTIANNLTSTIQVFTDSEYQLPYVLGSAHQGCLPPFPADVFTIPQYGYLTLNNGSQAVGRSSFYCLEYFPSQMLRTGNNFQFTYTFEDVPFHSSYAHSQSLDRLMNPLIDQYLYYLSRIQTTGGTANTQTLGFSQGGPNTMANQAKNWLPGPCYRQQRVSTTTGQNNNSNFAWTAGTKYHLNGRNSLANPGIAMATHKDDEERFFPSNGILIFGKQNAARDNADYSDVMPTSEEEIKTTNPVATEEYGIVADNLQQQNTAPQIGTVNSQGALPGMVWQNRDVYLQGPIWAKIPHTDGNFHPSPLMGGFGLKHPPPQILIKNTPVPADPPTTFNQSKLNSFITQYSTGQVSVEIEWELQKENSKRWNPEIQYTSNYYKSTSVDFAVNTEGVYSEPRPIGTRYLTRNL

SEQ ID NO: 3055 - protein, 738 aa, synthetic construct
  REGION 1..738: note = source = /note="Description of Artificial Sequence: Synthetic polypeptide"
MAADGYLPDWLEDNLSEGIREWWALKPGAPKPKANQQKQDDGRGLVLPGYKYLGPFNGLDKGEPVNAADAAALEHDKAYDQQLQAGDNPYLRYNHADAEFQERLQEDTSFGGNLGRAVFQAKKRVLEPLGLVEEGAKTAPGKKRPVEPSPQRSPDSSTGIGKKGQQPARKRLNFGQTGDSESVPDPQPLGEPPAAPSGVGPNTMAAGGGAPMADNNEGADGVGSSSGNWHCDSTWLGDRVITTSTRTWALPTYNNHLYKQISNGTSGGATNDNTYFGYSTPWGYFDFNRFHCHFSPRDWQRLINNNWGFRPKRLSFKLFNIQVKEVTQNEGTKTIANNLTSTIQVFTDSEYQLPYVLGSAHQGCLPPFPADVFTIPQYGYLTLNNGSQAVGRSSFYCLEYFPSQMLRTGNNFQFTYTFEDVPFHSSYAHSQSLDRLMNPLIDQYLYYLSRIQTTGGTANTQTLGFSQGGPNTVANQAKNWLPGPCYRQQRVSTTTGQNNNSNFAWTAGTKYHLNGRNSLANPGIAMATHKDDEERFFPSNGILIFGKQNAARDNADYSDVMPTSEEEIKTTNPVATEEYGIVADNLQQQNTAPQIGTVNSQGALPGMVWQNRDVYLQGPIWAKIPHTDGNFHPSPLMGGFGLKHPPPQILIKNTPVPADPPTTFNQSKLNSFITQYSTGQVSVEIEWELQKENSKRWNPEIQYTSNYYKSTSVDFAVNTEGVYSEPRPIGTRYLTRNL

SEQ ID NO: 3056 - protein, 738 aa, synthetic construct
  REGION 1..738: note = source = /note="Description of Artificial Sequence: Synthetic polypeptide"
MAADGYLPDWLEDNLSEGIREWWALKPGAPKPKANQQKQDDGRGLVLPGYKYLGPFNGLDKGEPVNAADAAALEHDKAYDQQLQAGDNPYLRYNHADAEFQERLQEDTSFGGNLGRAVFQAKKRVLEPLGLVEEGAKTAPGKKRPVEPSPQRSPDSSTGIGKKGQQPARKRLNFGQTGDSESVPDPQPLGEPPAAPSGVGPNTMAAGGGAPMADNNEGADGVGSSSGNWHCDSTWLGDRVITTSTRTWALPTYNNHLYKQISNGTSGGATNDNTYFGYSTPWGYFDFNRFHCHFSPRDWQRLINNNWGFRPKRLSFKLFNIQVKEVTQNEGTKTIANNLTSTIQVFTDSEYQLPYVLGSAHQGCLPPFPADVFTIPQYGYLTLNNGSQAVGRSSFYCPEYFPSQMLRTGNNFQFTYTFEDVPFHSSYAHSQSLDRLMNPLIDQYLYYLSRIQTTGGTANTQTLGFSQGGPNTMANQAKNWLPGPCYRQQRVSTTTGQNNNSNFAWTAGTKYHLNGRNSLANPGIAMATHKDDEERFFPSNGILIFGKQNAARDNADYSDVMPTSEEEIKTTNPVATEEYGIVADNLQQQNTAPQIGTVNSQGALPGMVWQNRDVYLQGPIWAKIPHTDGNFHPSPLMGGFGLKHPPPQILIKNTPVPADPPTTFNQSKLNSFITQYSTGQVSVEIEWELQKENSKRWNPEIQYTSNYYKSTSVDFAVNTEGVYSEPRPIGTRYLTRNL

SEQ ID NO: 3057 - protein, 738 aa, synthetic construct
  REGION 1..738: note = source = /note="Description of Artificial Sequence: Synthetic polypeptide"
MAADGYLPDWLEDNLSEGIREWWALKPGAPKPKANQQKQDDGRGLVLPGYKYLGPFNGLDKGEPVNAADAAALEHDKAYDQQLQAGDNPYLRYNHADAEFQERLQEDTSFGGNLGRAVFQAKKRVLEPLGLVEEGAKTAPGKKRPVEPSPQRSPDSSTGIGKKGQQPARKRLNFGQTGDSESVPDPQPLGEPPAAPSGVGPNTMAAGGGAPMADNNEGADGVGSSSGNWHCDSTWLGDRVITTSTRTWALPTYNNHLYKQISNGTSGGATNDNTYFGYSTPWGYFDFNRFHCHFSPRDWQRLINNNWGFRPKRLSFKLFNIQVKEVTQNEGTKTIANNLTSTIQVFTDSEYQLPYVLGSAHQGCLPPFPADVFTIPQYGYLTLNNGSQAVGRSSFYCLEYFPSQMLRTGNNFQFTYTFEDVPFHSSYAHSQSLDRLMNPLIDQYLYYLSRIQTTGGTANTQTLGFSQGGPNTMANQAKNWLPGPCYRQQRVSTTTGQNNNSNFAWTAGTKYHLNGRNSLANPGIAMATHKDDEERFFPSNGILIFGKQNAARDNADYSDVMPTSEEEIKTTNPVATEEYGIVADSLQQQNTAPQIGTVNSQGALPGMVWQNRDVYLQGPIWAKIPHTDGNFHPSPLMGGFGLKHPPPQILIKNTPVPADPPTTFNQSKLNSFITQYSTGQVSVEIEWELQKENSKRWNPEIQYTSNYYKSTSVDFAVNTEGVYSEPRPIGTRYLTRNL

SEQ ID NO: 3058 - protein, 738 aa, synthetic construct
  REGION 1..738: note = source = /note="Description of Artificial Sequence: Synthetic polypeptide"
MAADGYLPDWLEDNLSEGIREWWALKPGAPKPKANQQKQGDGRGLVLPGYKYLGPFNGLDKGEPVNAADAAALEHDKAYDQQLQAGDNPYLRYNHADAEFQERLQEDTSFGGNLGRAVFQAKKRVLEPLGLVEEGAKTAPGKKRPVEPSPQRSPDSSTGIGKKGQQPARKRLNFGQTGDSESVPDPQPLGEPPAAPSGVGPNTMAAGGGAPMADNNEGADGVGSSSGNWHCDSTWLGDRVITTSTRTWALPTYNNHLYKQISNGTSGGATNDNTYFGYSTPWGYFDFNRFHCHFSPRDWQRLINNNWGFRPKRLSFKLFNIQVKEVTQNEGTKTIANNLTSTIQVFTDSEYQLPYVLGSAHQGCLPPFPADVFTIPQYGYLTLNNGSQAVGRSSFYCLEYFPSQMLRTGNNFQFTYTFEDVPFHSSYAHSQSLDRLMNPLIDQYLYYLSRIQTTGGTANTQTLGFSQGGPNTMANQAKNWLPGPCYRQQRVSTTTGQNNNSNFAWTAGTKYHLNGRNSLANPGIAMATHKDDEERFFPSNGILIFGKQNAARDNADYSDVMPTSEEEIKTTNPVATEEYGIVADNLQQQNTAPQIGTVNSQGALPGMVWQNRDVYLQGPIWAKIPHTDGNFHPSPLMGGFGLKHPPPQILIKNTPVPADPPTTFNQSKLNSFITQYSTGQVSVEIEWELQKENSKRWNPEIQYTSNYYKSTSVDFAVNTEGVYSEPRPIGTRYLTRNL

SEQ ID NO: 3059 - protein, 738 aa, synthetic construct
  REGION 1..738: note = source = /note="Description of Artificial Sequence: Synthetic polypeptide"
MAADGYLPDWLEDNLSEGIREWWALKPGAPKPKANQQKQDDGRGLVLPGYKYLGPFNGLDKGEPVNAADAAALEHDKAYDQQLQAGDNPYLRYNHADAEFQERLQEDTSFGGNLGRAVFQAKKRVLEPLGLVEEGAKTAPGKKRPVEPSPQRSPDSSTGIGKKGQQPARKRLNFGQTGDSESVPDPQPLGEPPAAPSGVGPNTMAAGGGAPMADNNEGADGVGSSSGNWHCDSTWLGDRVITTSTRTWALPTYNNHLYKQISNGTSGGATNDNTYFGYSTPWGYFDFNRFHCHFSPRDWQRLINNNWGFRPKRLSSKLFNIQVKEVTQNEGTKTIANNLTSTIQVFTDSEYQLPYVLGSAHQGCLPPFPADVFTIPQYGYLTLNNGSQAVGRSSFYCLEYFPSQMLRTGNNFQFTYTFEDVPFHSSYAHSQSLDRLMNPLIDQYLYYLSRIQTTGGTANTQTLGFSQGGPNTMANQAKNWLPGPCYRQQRVSTTTGQNNNSNFAWTAGTKYHLNGRNSLANPGIAMATHKDDEERFFPSNGILIFGKQNAARDNADYSDVMPTSEEEIKTTNPVATEEYGIVADNLQQQNTAPQIGTVNSQGALPGMVWQNRDVYLQGPIWAKIPHTDGNFHPSPLMGGFGLKHPPPQILIKNTPVPADPPTTFNQSKLNSFITQYSTGQVSVEIEWELQKENSKRWNPEIQYTSNYYKSTSVDFAVNTEGVYSEPRPIGTRYLTRNL

SEQ ID NO: 3060 - protein, 738 aa, synthetic construct
  REGION 1..738: note = source = /note="Description of Artificial Sequence: Synthetic polypeptide"
MAADGYLPDWLEDNLSEGIREWWALKPGAPKPKANQQKQDDGRGLVLPGYKYLGPFNGLDKGEPVNAADAAALEHDKAYDQQLQAGDNPYLRYNHADAEFQERLQEDTSFGGNLGRAVFQAKKRVLEPLGLVEEGAKTAPGKKRPVEPSPQRSPDSSTGIGKKGQQPARKRLNFGQTGDSESVPDPQPLGEPPAAPSGVGPNTMAAGGGAPMADNNEGADGVGSSSGNWHCDSTWLGDRVITTSTRTWALPTYNNHLYKQISNGTSGGATNDNTYFGYSTPWGYFDFNRFHCHFSPRDWQRLINNNWGFRPKRLSFKLFNIQVKEVTQNEGTKTIANNLTSTIQVFTDSEYQLPYVLGSAHQGCLPPFPADVFTIPQYGYLTLNNGSQAVGRSSFYCLEYFPSQMLRTGNNFQFTYAFEDVPFHSSYAHSQSLDRLMNPLIDQYLYYLSRIQTTGGTANTQTLGFSQGGPNTMANQAKNWLPGPCYRQQRVSTTTGQNNNSNFAWTAGTKYHLNGRNSLANPGIAMATHKDDEERFFPSNGILIFGKQNAARDNADYSDVMPTSEEEIKTTNPVATEEYGIVADNLQQQNTAPQIGTVNSQGALPGMVWQNRDVYLQGPIWAKIPHTDGNFHPSPLMGGFGLKHPPPQILIKNTPVPADPPTTFNQSKLNSFITQYSTGQVSVEIEWELQKENSKRWNPEIQYTSNYYKSTSVDFAVNTEGVYSEPRPIGTRYLTRNL

SEQ ID NO: 3061 - protein, 738 aa, synthetic construct
  REGION 1..738: note = source = /note="Description of Artificial Sequence: Synthetic polypeptide"
MAADGYLPDWLEDNLSEGIREWWALKPGAPKPKANQQKQDDGRGLVLPGYKYLGPFNGLDKGEPVNAADAAALEHDKAYDQQLQAGDNPYLRYNHADAEFQERLQEDTSFGGNLGRAVFQAKKRVLEPLGLVEEGAKTAPGKKRPVEPSPQRSPDSSTGIGKKGQQPARKRLNFGQTGDSESVPDPQPLGEPPAAPSGVGPNTMAAGGGAPMADNNEGADGVGSSSGNWHCDSTWLGDRVITTSTRTWALPAYNNHLYKQISNGTSGGATNDNTYFGYSTPWGYFDFNRFHCHFSPRDWQRLINNNWGFRPKRLSFKLFNIQVKEVTQNEGTKTIANNLTSTIQVFTDSEYQLPYVLGSAHQGCLPPFPADVFTIPQYGYLTLNNGSQAVGRSSFYCLEYFPSQMLRTGNNFQFTYTFEDVPFHSSYAHSQSLDRLMNPLIDQYLYYLSRIQTTGGTANTQTLGFSQGGPNTMANQAKNWLPGPCYRQQRVSTTTGQNNNSNFAWTAGTKYHLNGRNSLANPGIAMATHKDDEERFFPSNGILIFGKQNAARDNADYSDVMPTSEEEIKTTNPVATEEYGIVADNLQQQNTAPQIGTVNSQGALPGMVWQNRDVYLQGPIWAKIPHTDGNFHPSPLMGGFGLKHPPPQILIKNTPVPADPPTTFNQSKLNSFITQYSTGQVSVEIEWELQKENSKRWNPEIQYTSNYYKSTSVDFAVNTEGVYSEPRPIGTRYLTRNL

SEQ ID NO: 3062 - protein, 738 aa, synthetic construct
  REGION 1..738: note = source = /note="Description of Artificial Sequence: Synthetic polypeptide"
MAADGYLPDWLEDNLSEGIREWWALKPGAPKPKANQQKQDDGRGLVLPGYKYLGPFNGLDKGEPVNAADAAALEHDKAYDQQLQAGDNPYLRYNHADAEFQERLQEDTSFGGSLGRAVFQAKKRVLEPLGLVEEGAKTAPGKKRPVEPSPQRSPDSSTGIGKKGQQPARKRLNFGQTGDSESVPDPQPLGEPPAAPSGVGPNTMAAGGGAPMADNNEGADGVGSSSGNWHCDSTWLGDRVITTSTRTWALPTYNNHLYKQISNGTSGGATNDNTYFGYSTPWGYFDFNRFHCHFSPRDWQRLINNNWGFRPKRLSFKLFNIQVKEVTQNEGTKTIANNLTSTIQVFTDSEYQLPYVLGSAHQGCLPPFPADVFTIPQYGYLTLNNGSQAVGRSSFYCLEYFPSQMLRTGNNFQFTYTFEDVPFHSSYAHSQSLDRLMNPLIDQYLYYLSRIQTTGGTANTQTLGFSQGGPNTMANQAKNWLPGPCYRQQRVSTTTGQNNNSNFAWTAGTKYHLNGRNSLANPGIAMATHKDDEERFFPSNGILIFGKQNAARDNADYSDVMPTSEEEIKTTNPVATEEYGIVADNLQQQNTAPQIGTVNSQGALPGMVWQNRDVYLQGPIWAKIPHTDGNFHPSPLMGGFGLKHPPPQILIKNTPVPADPPTTFNQSKLNSFITQYSTGQVSVEIEWELQKENSKRWNPEIQYTSNYYKSTSVDFAVNTEGVYSEPRPIGTRYLTRNL

SEQ ID NO: 3063 - protein, 738 aa, synthetic construct
  REGION 1..738: note = source = /note="Description of Artificial Sequence: Synthetic polypeptide"
MAADGYLPDWLEDNLSEGIREWWALKPGAPKPKANQQKQDDGRGLVLPGYKYLGPFNGLDKGEPVNAADAAALEHDKAYDQQLQAGDNPYLRYNHADAEFQERLQEDTSFGGNLGRAVFQAKKRVLEPLGLVEEGAKTAPGKKRPVEPSPQRSPDSSTGIGKKGQQPARKRLNFGQTGDSESVPDPQPLGEPPAAPSGVGPNTMAAGGGAPMADNNEGADGVGSSSGNWHCDSTWLGDRVITTSTRTWALPTYNNHLYKQISNGTSGGATNDNTYFGYSTPWGYFDFNRFHCHFSPRDWQRLINNNWGFRPKRLSFKLFNIQVKEVTQNEGTKTIANNLTSTIQVFTDSEYQLPYVLGSAHQGCLPPFPADVFTIPQYGYLTLNNGSQAVGRSSFYCLEYFPSQMLRTGNNFQFTYTFEDVPFHSSYAHSQSLDRLMNPLIDQYLYYLSRIQTTGGTANTQTLGFSQGGPNTMANQATNWLPGPCYRQQRVSTTTGQNNNSNFAWTAGTKYHLNGRNSLANPGIAMATHKDDEERFFPSNGILIFGKQNAARDNADYSDVMPTSEEEIKTTNPVATEEYGIVADNLQQQNTAPQIGTVNSQGALPGMVWQNRDVYLQGPIWAKIPHTDGNFHPSPLMGGFGLKHPPPQILIKNTPVPADPPTTFNQSKLNSFITQYSTGQVSVEIEWELQKENSKRWNPEIQYTSNYYKSTSVDFAVNTEGVYSEPRPIGTRYLTRNL

SEQ ID NO: 3064 - protein, 738 aa, synthetic construct
  REGION 1..738: note = source = /note="Description of Artificial Sequence: Synthetic polypeptide"
MAADGYLPDWLEDNLSEGIREWWALKPGAPKPKANQQKQDDGRGLVLPGYKYLGPFNGLDKGEPVNAADAAALEHDKAYGQQLQAGDNPYLRYNHADAEFQERLQEDTSFGGNLGRAVFQAKKRVLEPLGLVEEGAKTAPGKKRPVEPSPQRSPDSSTGIGKKGQQPARKRLNFGQTGDSESVPDPQPLGEPPAAPSGVGPNTMAAGGGAPMADNNEGADGVGSSSGNWHCDSTWLGDRVITTSTRTWALPTYNNHLYKQISNGTSGGATNDNTYFGYSTPWGYFDFNRFHCHFSPRDWQRLINNNWGFRPKRLSFKLFNIQVKEVTQNEGTKTIANNLTSTIQVFTDSEYQLPYVLGSAHQGCLPPFPADVFTIPQYGYLTLNNGSQAVGRSSFYCLEYFPSQMLRTGNNFQFTYTFEDVPFHSSYAHSQSLDRLMNPLIDQYLYYLSRIQTTGGTANTQTLGFSQGGPNTMANQAKNWLPGPCYRQQRVSTTTGQNNNSNFAWTAGTKYHLNGRNSLANPGIAMATHKDDEERFFPSNGILIFGKQNAARDNADYSDVMPTSEEEIKTTNPVATEEYGIVADNLQQQNTAPQIGTVNSQGALPGMVWQNRDVYLQGPIWAKIPHTDGNFHPSPLMGGFGLKHPPPQILIKNTPVPADPPTTFNQSKLNSFITQYSTGQVSVEIEWELQKENSKRWNPEIQYTSNYYKSTSVDFAVNTEGVYSEPRPIGTRYLTRNL

SEQ ID NO: 3065 - protein, 738 aa, synthetic construct
  REGION 1..738: note = source = /note="Description of Artificial Sequence: Synthetic polypeptide"
MAADGYLPDWLEDNLSEGIREWWALKPGAPKPKANQQKQDDGRGLVLPGYKYLGPFNGLDKGEPVNAADAAALEHDKAYDQQLQAGDNPYLRYNHADAEFQERLQEDTSFGGNLGRAVFQAKKRVLEPLGLVEEGAKTAPGKKRPVEPSPQRSPDSSTGIGKKGQQPARKRLNFGQTGDSESVPDPQPLGEPPAAPSGVGPNTMAAGGGAPMADNNEGADGVGSSSGNWHCDSTWLGDRVITTSTRTWALPTYNNHLYKQISNGTSGGATNDNTYFGYSTPWGYFDFNRFHCHFSPRDWQRLINNNWGFRPKRLSFKLLNIQVKEVTQNEGTKTIANNLTSTIQVFTDSEYQLPYVLGSAHQGCLPPFPADVFTIPQYGYLTLNNGSQAVGRSSFYCLEYFPSQMLRTGNNFQFTYTFEDVPFHSSYAHSQSLDRLMNPLIDQYLYYLSRIQTTGGTANTQTLGFSQGGPNTMANQAKNWLPGPCYRQQRVSTTTGQNNNSNFAWTAGTKYHLNGRNSLANPGIAMATHKDDEERFFPSNGILIFGKQNAARDNADYSDVMPTSEEEIKTTNPVATEEYGIVADNLQQQNTAPQIGTVNSQGALPGMVWQNRDVYLQGPIWAKIPHTDGNFHPSPLMGGFGLKHPPPQILIKNTPVPADPPTTFNQSKLNSFITQYSTGQVSVEIEWELQKENSKRWNPEIQYTSNYYKSTSVDFAVNTEGVYSEPRPIGTRYLTRNL

SEQ ID NO: 3066 - protein, 738 aa, synthetic construct
  REGION 1..738: note = source = /note="Description of Artificial Sequence: Synthetic polypeptide"
MAADGYLPDWLEDNLSEGIREWWALKPGAPKPKANQQKQDDGRGLVLPGYKYLGPFNGLDKGEPVNAADAAALEHDKAYDQQLQAGDNPYLRYNHADAEFQERLQEDTSFGGNLGRAVFQAKKRVLEPLGLVEEGAKTAPGKKRPVEPSPQRSPDSSTGIGKKGQQPARKRLNFGQTGDSESVPDPQPLGEPPAAPSGVGPNTMAAGGGAPMADNNEGADGVGSSSGNWHCDSTWLGDRVITTSTRTWALPTYNNHLYKQISNGTSGGATNDNTYFGYSTPWGYFDFNRFHCHFSPRDWQRLINNNWGFRPKRLSFKLFNIQVKEVTQNEGTKTIANNLTSTIQVFTDSEYQLPYVLGSAHQGCLPPFPADVFTIPQYGYLTLNNGSQAVGRSSFYCLEYFPSQMLRTGNNFQFTYTFEDVPFHSSYAHSQSLDRLMNPLIDQYLYYLSRIQTTGGTANTQTLGFSQGGPNTMANQAKNWLPGPCYRQQRVSTTTGQNNNSNFAWTAGTKYHLNGRNSLANPGIAMATHKDDEERFFPSNGILIFGKQNAARDNADYSDVVPTSEEEIKTTNPVATEEYGIVADNLQQQNTAPQIGTVNSQGALPGMVWQNRDVYLQGPIWAKIPHTDGNFHPSPLMGGFGLKHPPPQILIKNTPVPADPPTTFNQSKLNSFITQYSTGQVSVEIEWELQKENSKRWNPEIQYTSNYYKSTSVDFAVNTEGVYSEPRPIGTRYLTRNL

SEQ ID NO: 3067 - protein, 738 aa, synthetic construct
  REGION 1..738: note = source = /note="Description of Artificial Sequence: Synthetic polypeptide"
MAADGYLPDWLEDNLSEGIREWWALKPGAPKPKANQQKQDDGRGLVLPGYKYLGPFNGLDKGEPVNAADAAALEHDKAYDQQLQAGDNPYLRYNHADAEFQERLQEDTSFGGNLGRAVFQAKKRVLEPLGLVEEGAKTAPGKKRPVEPSPQRSPDSSTGIGKKGRQPARKRLNFGQTGDSESVPDPQPLGEPPAAPSGVGPNTMAAGGGAPMADNNEGADGVGSSSGNWHCDSTWLGDRVITTSTRTWALPTYNNHLYKQISNGTSGGATNDNTYFGYSTPWGYFDFNRFHCHFSPRDWQRLINNNWGFRPKRLSFKLFNIQVKEVTQNEGTKTIANNLTSTIQVFTDSEYQLPYVLGSAHQGCLPPFPADVFTIPQYGYLTLNNGSQAVGRSSFYCLEYFPSQMLRTGNNFQFTYTFEDVPFHSSYAHSQSLDRLMNPLIDQYLYYLSRIQTTGGTANTQTLGFSQGGPNTMANQAKNWLPGPCYRQQRVSTTTGQNNNSNFAWTAGTKYHLNGRNSLANPGIAMATHKDDEERFFPSNGILIFGKQNAARDNADYSDVMPTSEEEIKTTNPVATEEYGIVADNLQQQNTAPQIGTVNSQGALPGMVWQNRDVYLQGPIWAKIPHTDGNFHPSPLMGGFGLKHPPPQILIKNTPVPADPPTTFNQSKLNSFITQYSTGQVSVEIEWELQKENSKRWNPEIQYTSNYYKSTSVDFAVNTEGVYSEPRPIGTRYLTRNL

SEQ ID NO: 3068 - protein, 738 aa, synthetic construct
  REGION 1..738: note = source = /note="Description of Artificial Sequence: Synthetic polypeptide"
MAADGYLPDWLEDNLSEGIREWWALKPGAPKPKANQQKQDDGRGLVLPGYKYLGPFNGLDKGEPVNAADAAALEHDKAYDQQLQAGDNPYLRYNHADAEFQERLQEDTSFGGNLGRAVFQAKKRVLEPLGLVEEGAKTAPGKKRPVESSPQRSPDSSTGIGKKGQQPARKRLNFGQTGDSESVPDPQPLGEPPAAPSGVGPNTMAAGGGAPMADNNEGADGVGSSSGNWHCDSTWLGDRVITTSTRTWALPTYNNHLYKQISNGTSGGATNDNTYFGYSTPWGYFDFNRFHCHFSPRDWQRLINNNWGFRPKRLSFKLFNIQVKEVTQNEGTKTIANNLTSTIQVFTDSEYQLPYVLGSAHQGCLPPFPADVFTIPQYGYLTLNNGSQAVGRSSFYCLEYFPSQMLRTGNNFQFTYTFEDVPFHSSYAHSQSLDRLMNPLIDQYLYYLSRIQTTGGTANTQTLGFSQGGPNTMANQAKNWLPGPCYRQQRVSTTTGQNNNSNFAWTAGTKYHLNGRNSLANPGIAMATHKDDEERFFPSNGILIFGKQNAARDNADYSDVMPTSEEEIKTTNPVATEEYGIVADNLQQQNTAPQIGTVNSQGALPGMVWQNRDVYLQGPIWAKIPHTDGNFHPSPLMGGFGLKHPPPQILIKNTPVPADPPTTFNQSKLNSFITQYSTGQVSVEIEWELQKENSKRWNPEIQYTSNYYKSTSVDFAVNTEGVYSEPRPIGTRYLTRNL

SEQ ID NO: 3069 - protein, 738 aa, synthetic construct
  REGION 1..738: note = source = /note="Description of Artificial Sequence: Synthetic polypeptide"
MAADGYLPDWLEDNLSEGIREWWALKPGAPKPKANQQKQDDGRGLVLPGYKYLGPFNGLDKGEPVNAADAAALEHDKAYDQQLQAGDNPYLRYNHADAEFQERLQEDTSFGGNLGRAVFQAKKRVLEPLGLVEEGAKTAPGKKRPVEPSPQRSPDSSTGIGKKGQQPARKRLNFGQTGDSESVPDPQPLGEPPAAPSGAGPNTMAAGGGAPMADNNEGADGVGSSSGNWHCDSTWLGDRVITTSTRTWALPTYNNHLYKQISNGTSGGATNDNTYFGYSTPWGYFDFNRFHCHFSPRDWQRLINNNWGFRPKRLSFKLFNIQVKEVTQNEGTKTIANNLTSTIQVFTDSEYQLPYVLGSAHQGCLPPFPADVFTIPQYGYLTLNNGSQAVGRSSFYCLEYFPSQMLRTGNNFQFTYTFEDVPFHSSYAHSQSLDRLMNPLIDQYLYYLSRIQTTGGTANTQTLGFSQGGPNTMANQAKNWLPGPCYRQQRVSTTTGQNNNSNFAWTAGTKYHLNGRNSLANPGIAMATHKDDEERFFPSNGILIFGKQNAARDNADYSDVMPTSEEEIKTTNPVATEEYGIVADNLQQQNTAPQIGTVNSQGALPGMVWQNRDVYLQGPIWAKIPHTDGNFHPSPLMGGFGLKHPPPQILIKNTPVPADPPTTFNQSKLNSFITQYSTGQVSVEIEWELQKENSKRWNPEIQYTSNYYKSTSVDFAVNTEGVYSEPRPIGTRYLTRNL

SEQ ID NO: 3070 - protein, 738 aa, synthetic construct
  REGION 1..738: note = source = /note="Description of Artificial Sequence: Synthetic polypeptide"
MAADGYLPDWLEDNLSEGIREWWALKPGAPKPKANQQKQDDGRGLVLPGYKYLGPFNGLDKGEPVNAADAAALEHDKAYDQQLQAGDNPYLRYNHADAEFQERLQEDTSFGGNLGRAVFQAKKRVLEPLGLVEEGAKTAPGKKRPVEPSPQRSPDSSTGIGKKGQQPARKRLNFGQTGDSESVPDPQPLGEPPAAPSGVGPNTMAAGGGAPMADNNEGADGVGSSSGNWHCDSTWLGDRVITTSTRTWALPTYNNHLYKQISNGTSGGATNDNTYFGYSTPWGYFDFNRFHCHFSPRDWQRLINNNWGFRPKRLSFKLFNIQVKEVTQNEGTKTIANNLTSTIQVFTDSEYQLPYVLGSAHQGCLPPFPADVFTIPQYGYLTLNNGSQAVGRSSFYCLEYFPSQMLRTGNNFQFTYTFEDVPFHSSYAHSQSLDRLMNPLIDQYPYYLSRIQTTGGTANTQTLGFSQGGPNTMANQAKNWLPGPCYRQQRVSTTTGQNNNSNFAWTAGTKYHLNGRNSLANPGIAMATHKDDEERFFPSNGILIFGKQNAARDNADYSDVMPTSEEEIKTTNPVATEEYGIVADNLQQQNTAPQIGTVNSQGALPGMVWQNRDVYLQGPIWAKIPHTDGNFHPSPLMGGFGLKHPPPQILIKNTPVPADPPTTFNQSKLNSFITQYSTGQVSVEIEWELQKENSKRWNPEIQYTSNYYKSTSVDFAVNTEGVYSEPRPIGTRYLTRNL

SEQ ID NO: 3071 - protein, 738 aa, synthetic construct
  REGION 1..738: note = source = /note="Description of Artificial Sequence: Synthetic polypeptide"
MAADGYLPDWLEDNLSEGIREWWALKPGAPKPKANQQKQDDGRGLVLPGYKYLGPFNGLDKGEPVNAADAAALEHDKAYDQQLQAGDNPYLRYNHADAEFQERLQEDTSFGGNLGRAVFQAKKRVLEPLGLVEEGAKTAPGKKRPVEPSPQRSPDSSTGIGKKGQQPARKRLNFGQTGDSESVPDPQPLGEPPAAPSGVGPNTMAAGGGAPMADNNEGADGVGSSSGNWHCDSTWLGDRVITTSTRTWALPTYNNHLYKQISNGTSGGATNDNTYFGYSTPWGYFDFNRFHCHFSPRDWQRLINNNWGFRPKRLSFKLFNIQVKEVTQNEGTKTIANNLTSTIQVFTDSEYQLPYVLGSAHQGCLPPFPADVFTIPQYGYLTLNNGSQAVGRSSFYCLEYFPSQMLRTGNNFQFTYTFEDVPFHSSYAHSQSLDRLMNPLIDQYLYYLSRIQTTGGTANTQTLGFSQGGPNTMANQAKNWLPGPCYRQQRVSTTTGQSNNSNFAWTAGTKYHLNGRNSLANPGIAMATHKDDEERFFPSNGILIFGKQNAARDNADYSDVMPTSEEEIKTTNPVATEEYGIVADNLQQQNTAPQIGTVNSQGALPGMVWQNRDVYLQGPIWAKIPHTDGNFHPSPLMGGFGLKHPPPQILIKNTPVPADPPTTFNQSKLNSFITQYSTGQVSVEIEWELQKENSKRWNPEIQYTSNYYKSTSVDFAVNTEGVYSEPRPIGTRYLTRNL

SEQ ID NO: 3072 - protein, 738 aa, synthetic construct
  REGION 1..738: note = source = /note="Description of Artificial Sequence: Synthetic polypeptide"
MAADGYLPDWLEDNLSEGIREWWALKPGAPKPKANQQKQDDGRGLVLPGYKYLGPFNGLDKGEPVNAADAAALEHDKAYDQQLQAGDNPYLRYNHADAEFQERLQEDTSFGGNLGRAVFQAKKRVLEPLGLVEEGAKTAPGKKRPVEPSPQRSPDSSTGIGKKGQQPARKRLNFGQTGDSESVPDPQPLGEPPAAPSGVGPNTMAAGGGAPMADNNEGADGVGSSSGNWHCDSTWLGDRVITTSTRTWALPTYNNHLYKQISNGTSGGATNDNTYFGYSTPWGYFDFNRFHCHFSPRDWQRLINNNWGFRPKRLSFKLFNIQVKEVTQNEGTKTIANNLTSTIQVFTDSEYQLPYVLGSAHQGCLPPFPADVFTIPQYGYLTLNNGSQAVGRSSFYCLEYFPSQMLRTGNNFQFTYTFEDVPFHSSYAHSQSLDRLMNPLIDQYLYYLSRIQTTGGTANTQTLGFSQGGPNTMANQAKNWLPGPRYRQQRVSTTTGQNNNSNFAWTAGTKYHLNGRNSLANPGIAMATHKDDEERFFPSNGILIFGKQNAARDNADYSDVMPTSEEEIKTTNPVATEEYGIVADNLQQQNTAPQIGTVNSQGALPGMVWQNRDVYLQGPIWAKIPHTDGNFHPSPLMGGFGLKHPPPQILIKNTPVPADPPTTFNQSKLNSFITQYSTGQVSVEIEWELQKENSKRWNPEIQYTSNYYKSTSVDFAVNTEGVYSEPRPIGTRYLTRNL

SEQ ID NO: 3073 - protein, 738 aa, synthetic construct
  REGION 1..738: note = source = /note="Description of Artificial Sequence: Synthetic polypeptide"
MAADGYLPDWLEDNLSEGIREWWALKPGAPKPKANQQKQDDGRGLVLPGYKYLGPFNGLDKGEPVNAADAAALEHDKAYDQQLQAGDNPYLRYNHADAEFQERLQEDTSFGGNLGRAVFQAKKRVLEPLGLVEEGAKTAPGKKRPVEPSPQRSPDSSTGIGKKGQQPARKRLNFGQTGDSESVPDPQPLGEPPAAPSGVGPNTMAAGGGAPMADNNEGADGVGSSSGNWHCDSTWLGDRVITTSTRTWALPTYNNHLYKQISNGTSGGATNDNTYFGYSTPWGYFDFNRFHCHFSPRDWQRLINNNWGFRPKRLSFKLFNIQVKEVTQNEGTKTIANNLTSTIQVFTDSEYQLPYVLGSAHQGCLPPFPADVFTIPQYGYLTLNNGSQAVGRSSFYCLEYFPSQMLRTGNNFQFTYTFEDVPFHSSYAHSQSLDRLMNPLIDQYLYYLSRIQTTGGTANTQTLGFSQGGPNTMANQAKNWLPGPCYRQQRVSTTTGQNNNSNFAWTAGTKYHLNGRNSLANPGIAMATHKDDEERFFPSNGILIFGKQNAARDNADYSDVMPTSEEEIKTTNPVATEEYGIVADNLQQQNTAPQIGTVNSQGALPGMVWQNRDVYLQGPIWAKIPHTDGNFHPSPLMGGFGLKHPPPQILIKNAPVPADPPTTFNQSKLNSFITQYSTGQVSVEIEWELQKENSKRWNPEIQYTSNYYKSTSVDFAVNTEGVYSEPRPIGTRYLTRNL

SEQ ID NO: 3074 - protein, 738 aa, synthetic construct
  REGION 1..738: note = source = /note="Description of Artificial Sequence: Synthetic polypeptide"
MAADGYLPDWLEDNLSEGIREWWALKPGAPKPKANQQKQDDGRGLVLPGYKYLGPFNGLDKGEPVNAADAAALEHDKAYDQQLQAGDNPYLRYNHADAEFQERLQEDTSFGGNLGRAVFQAKKRVLEPLGLVEEGAKTAPGKKRPVEPSPQRSPDSSTGIGKKGQQPARKRLNFGQTGDSESVPDPQPLGEPPAAPSGVGPNTMAAGGGAPMADNNEGADGVGSSSGNWHCDSTWLGDRVITTSTRTWALPTYNNHLYKQISNGTSGGATNDNTYFGYSTPWGYFDFNRFHCHFSPRDRQRLINNNWGFRPKRLSFKLFNIQVKEVTQNEGTKTIANNLTSTIQVFTDSEYQLPYVLGSAHQGCLPPFPADVFTIPQYGYLTLNNGSQAVGRSSFYCLEYFPSQMLRTGNNFQFTYTFEDVPFHSSYAHSQSLDRLMNPLIDQYLYYLSRIQTTGGTANTQTLGFSQGGPNTMANQAKNWLPGPCYRQQRVSTTTGQNNNSNFAWTAGTKYHLNGRNSLANPGIAMATHKDDEERFFPSNGILIFGKQNAARDNADYSDVMPTSEEEIKTTNPVATEEYGIVADNLQQQNTAPQIGTVNSQGALPGMVWQNRDVYLQGPIWAKIPHTDGNFHPSPLMGGFGLKHPPPQILIKNTPVPADPPTTFNQSKLNSFITQYSTGQVSVEIEWELQKENSKRWNPEIQYTSNYYKSTSVDFAVNTEGVYSEPRPIGTRYLTRNL

SEQ ID NO: 3075 - protein, 738 aa, synthetic construct
  REGION 1..738: note = source = /note="Description of Artificial Sequence: Synthetic polypeptide"
MAADGYLPDWLEDNLSEGIREWWALKPGAPKPKANQQKQDDGRGLVLPGYKYLGPFNGLDKGEPVNAADAAALEHDKAYDQQLQAGDNPYLRYNHADAEFQERLQEDTSFGGNLGRAVFQAKKRVLEPLGLVEEGAKTAPGKKRPVEPSPQRSPDSSTGIGKKGQQPARKRLNFGQTGDSESVPDPQPLGEPPAAPSGVGPNTMAAGGGAPMADNNEGADGVGSSSGNWHCDSTWLGDRVITTSTRTWALPTYNNHLYKQISNGTSGGATNDNTYFGYSTPWGYFDFNRFHCHFSPRDWQRLINNNWGFRPKRLSFKLFNIQVKEVTQNEGTKTIANNLTSTIQVFTDSEYQLPYVLGSAHQGCLPPFPADVFTIPQYGYLTLNNGSQAVGRSSFYCLEYFPSQMLRTGNNFQFTYTFEDVPFHSSYAHSQSLDRLMNPLIDQYLYYLSRIQTTGGTANTQTLGFSQGGPNTMANQAKNWLPGPCYRQQRVSTTTGQNNNSNFAWTAGTKYHLNGRNSLANPGIAMATHKDDEERFFPSNGILIFGKQNAARDNADYSDVMPTSEEEIKTTNPVATEEYGIVADNLQQQNTAPQIGTVNSQGALPGMVWQNRDVYLQGPIWAKIPHTDGSFHPSPLMGGFGLKHPPPQILIKNTPVPADPPTTFNQSKLNSFITQYSTGQVSVEIEWELQKENSKRWNPEIQYTSNYYKSTSVDFAVNTEGVYSEPRPIGTRYLTRNL

SEQ ID NO: 3076 - protein, 738 aa, synthetic construct
  REGION 1..738: note = source = /note="Description of Artificial Sequence: Synthetic polypeptide"
MAADGYLPDWLEDNLSEGIREWWALKPGAPKPKANQQKQDDGRGLVLPGYKYLGPFNGLDKGEPVNAADAAALEHDKAYDQQLQAGDNPYLRYNHADAEFQERLQEDTSFGGNLGRAVFQAKKRVLEPLGLVEEGAKTAPGKKRPVEPSPQRSPDSSTGIGKKGQQPARKRLNFGQTGDSESVPDPQPLGEPPTAPSGVGPNTMAAGGGAPMADNNEGADGVGSSSGNWHCDSTWLGDRVITTSTRTWALPTYNNHLYKQISNGTSGGATNDNTYFGYSTPWGYFDFNRFHCHFSPRDWQRLINNNWGFRPKRLSFKLFNIQVKEVTQNEGTKTIANNLTSTIQVFTDSEYQLPYVLGSAHQGCLPPFPADVFTIPQYGYLTLNNGSQAVGRSSFYCLEYFPSQMLRTGNNFQFTYTFEDVPFHSSYAHSQSLDRLMNPLIDQYLYYLSRIQTTGGTANTQTLGFSQGGPNTMANQAKNWLPGPCYRQQRVSTTTGQNNNSNFAWTAGTKYHLNGRNSLANPGIAMATHKDDEERFFPSNGILIFGKQNAARDNADYSDVMPTSEEEIKTTNPVATEEYGIVADNLQQQNTAPQIGTVNSQGALPGMVWQNRDVYLQGPIWAKIPHTDGNFHPSPLMGGFGLKHPPPQILIKNTPVPADPPTTFNQSKLNSFITQYSTGQVSVEIEWELQKENSKRWNPEIQYTSNYYKSTSVDFAVNTEGVYSEPRPIGTRYLTRNL

SEQ ID NO: 3077 - protein, 738 aa, synthetic construct
  REGION 1..738: note = source = /note="Description of Artificial Sequence: Synthetic polypeptide"
MAADGYLPDWLEDNLSEGIREWWALKPGAPKPKANQQKQDDGRGLVLPGYKYLGPFNGLDKGEPVNAADAAALEHDKAYDQQLQAGDNPYLRYNHADAEFQERLQEDTSFGGNLGRAVFQAKKRVLEPLGLVEEGAKTAPGKKRPVEPSPQRSPDSSTGIGKKGQQPARKRLNFGQTGDSESVPDPQPLGEPPAAPSGVGPNTMAAGGGAPMADNNEGADGVGSSSGNWHCDSTWLGDRVITTSTRTWALPTYNNHLYKQISNGTSGGATNDNTYFGYSTPWGYFDFNRFHCHFSPRDWQRLINNNWGFRPKRLSFKLFNIQVKEVTQNEGTKTIANNLTSTIQVFTDSEYQLPYVLGSAHQGCLPPFPADVFTIPQYGYLTLNNGSQAVGRSSFYCLEYFPSQMLRTGNNFQFTYTFEDVPFHSSYAHSQSLDRLMNPLIDQYLYYLSRIQTTGGTANTQTLGFSQGGPNTMANQAKNWLPGPCYRQQRVSTTTGQNNNSNFAWTAGTKYHLNGRNSLANPGIAMATHKDDEERFFPSNGILIFGKQNAARDNADYSDVMPTSEEEIKTTNPVATEEYGIVADNLQQQNTAPQIGTVNSQGALPGMVWQNRDVYLQGPIWAKIPHTDGNFHPSPLMGGFGLKHPPPQILIKNTPVPADPPTTFNQSKLNSFITQYSTGQVSVEIEWELQKENSKRWNPEIQYTSNYYKSTSVDFAVNAEGVYSEPRPIGTRYLTRNL

SEQ ID NO: 3078 - protein, 738 aa, synthetic construct
  REGION 1..738: note = source = /note="Description of Artificial Sequence: Synthetic polypeptide"
MAADGYLPDWLEDNLSEGIREWWALKPGAPKPKANQQKQDDGRGLVLPGYKYLGPFNGLDKGEPVNAADAAALEHDKAYDQQLQAGDNPYLRYNHADAEFQERLQEDTSFGGNLGRAVFQAKKRVLEPLGLVEEGAKTAPGKKRPVEPSPQRSPDSSTGIGKKGQQPARKRLNFGQTGDSESVPDPQPLGEPPAAPSGVGPNTMAAGGGAPMADNNEGADGAGSSSGNWHCDSTWLGDRVITTSTRTWALPTYNNHLYKQISNGTSGGATNDNTYFGYSTPWGYFDFNRFHCHFSPRDWQRLINNNWGFRPKRLSFKLFNIQVKEVTQNEGTKTIANNLTSTIQVFTDSEYQLPYVLGSAHQGCLPPFPADVFTIPQYGYLTLNNGSQAVGRSSFYCLEYFPSQMLRTGNNFQFTYTFEDVPFHSSYAHSQSLDRLMNPLIDQYLYYLSRIQTTGGTANTQTLGFSQGGPNTMANQAKNWLPGPCYRQQRVSTTTGQNNNSNFAWTAGTKYHLNGRNSLANPGIAMATHKDDEERFFPSNGILIFGKQNAARDNADYSDVMPTSEEEIKTTNPVATEEYGIVADNLQQQNTAPQIGTVNSQGALPGMVWQNRDVYLQGPIWAKIPHTDGNFHPSPLMGGFGLKHPPPQILIKNTPVPADPPTTFNQSKLNSFITQYSTGQVSVEIEWELQKENSKRWNPEIQYTSNYYKSTSVDFAVNTEGVYSEPRPIGTRYLTRNL

SEQ ID NO: 3079 - protein, 738 aa, synthetic construct
  REGION 1..738: note = source = /note="Description of Artificial Sequence: Synthetic polypeptide"
MAADGYLPDWLEDNLSEGIREWWALKPGAPKPKANQQKQDDGRGLVLPGYKYLGPFNGLDKGEPVNAADAAALEHDKAYDQQLQAGDNPYLRYNHADAEFQERLQEDTSFGGNLGRAVFQAKKRVLEPLGLVEEGAKTAPGKKRPVEPSPQRSPDSSTGIGKKGQQPARKRLNFGQTGDSESVPDPQPLGEPPAAPSGVGPNTMAAGGGAPMADNNEGADGVGSSSGNWHCDSTWLGDRAITTSTRTWALPTYNNHLYKQISNGTSGGATNDNTYFGYSTPWGYFDFNRFHCHFSPRDWQRLINNNWGFRPKRLSFKLFNIQVKEVTQNEGTKTIANNLTSTIQVFTDSEYQLPYVLGSAHQGCLPPFPADVFTIPQYGYLTLNNGSQAVGRSSFYCLEYFPSQMLRTGNNFQFTYTFEDVPFHSSYAHSQSLDRLMNPLIDQYLYYLSRIQTTGGTANTQTLGFSQGGPNTMANQAKNWLPGPCYRQQRVSTTTGQNNNSNFAWTAGTKYHLNGRNSLANPGIAMATHKDDEERFFPSNGILIFGKQNAARDNADYSDVMPTSEEEIKTTNPVATEEYGIVADNLQQQNTAPQIGTVNSQGALPGMVWQNRDVYLQGPIWAKIPHTDGNFHPSPLMGGFGLKHPPPQILIKNTPVPADPPTTFNQSKLNSFITQYSTGQVSVEIEWELQKENSKRWNPEIQYTSNYYKSTSVDFAVNTEGVYSEPRPIGTRYLTRNL

SEQ ID NO: 3080 - protein, 738 aa, synthetic construct
  REGION 1..738: note = source = /note="Description of Artificial Sequence: Synthetic polypeptide"
MAADGYLPDWLEDNLSEGIREWWALKPGAPKPKANQQKQDDGRGLVLPGYKYLGPFNGLDKGEPVNAADAAALEHDKAYDQQLQAGDNPYLRYNHADAEFQERLQEDTSFGGNLGRAVFQAKKRVLEPLGLVEEGAKTAPGKKRPVEPSPQRSPDSSTGIGKKGQQPARKRLNFGQTGDSESVPDPQPLGEPPAAPSGVGPNTMAAGGGAPMADNNEGADGVGSSSGNWHCDSTWLGDRVITTSTRTWALPTYNNHLYKQISNGTSGGATNDNTYFGYSTPWGYFDFNRFHCHFSPRDWQRLINNNWGFRPKRLSFKLFNIQVKEVTQNEGTKTIANNLTSTIQVFTDSEYQLPYVLGSAHQGCLPPFPADVFTIPQYGYLTLNNGSQAVGRSSFYCLEYFPSQMLRTGNNFQFTYTFEDVPFHSSYAHSQSLDRLMNPLIDQYLYYLSRIQTTGGTANTQTLGFSQGGPNTMANQAKNWLPGPCYRQQRVSTTTGQNNNSNFAWTAGTKYHLNGRNSLANPGVAMATHKDDEERFFPSNGILIFGKQNAARDNADYSDVMPTSEEEIKTTNPVATEEYGIVADNLQQQNTAPQIGTVNSQGALPGMVWQNRDVYLQGPIWAKIPHTDGNFHPSPLMGGFGLKHPPPQILIKNTPVPADPPTTFNQSKLNSFITQYSTGQVSVEIEWELQKENSKRWNPEIQYTSNYYKSTSVDFAVNTEGVYSEPRPIGTRYLTRNL

SEQ ID NO: 3081 - protein, 738 aa, synthetic construct
  REGION 1..738: note = source = /note="Description of Artificial Sequence: Synthetic polypeptide"
MAADGYLPDWLEDNLSEGIREWWALKPGAPKPKANQQKQDDGRGLVLPGYKYLGPFNGLDKGEPVNAADAAALEHDKAYDQQLQAGDNPYLRYNHADAEFQERLQEDTSFGGNLGRAVFQAKKRVLEPLGLVEEGAKTAPGKKRPVEPSPQRSPDSSTGIGKKGQQPARKRLNFGQTGDSESVPDPQPLGEPPAAPSGVGPNTMAAGGGAPMADNNEGADGVGSSSGNWHCDSTWLGDRVITTSTRTWALPTYNNHLYKQISNGTSGGATNDNTYFGYSTPWGYFDFNRFHCHFSPRDWQRLINNNWGFRPKRLSFKLFNIQVKEVTQNEGTKTIANNLTGTIQVFTDSEYQLPYVLGSAHQGCLPPFPADVFTIPQYGYLTLNNGSQAVGRSSFYCLEYFPSQMLRTGNNFQFTYTFEDVPFHSSYAHSQSLDRLMNPLIDQYLYYLSRIQTTGGTANTQTLGFSQGGPNTMANQAKNWLPGPCYRQQRVSTTTGQNNNSNFAWTAGTKYHLNGRNSLANPGIAMATHKDDEERFFPSNGILIFGKQNAARDNADYSDVMPTSEEEIKTTNPVATEEYGIVADNLQQQNTAPQIGTVNSQGALPGMVWQNRDVYLQGPIWAKIPHTDGNFHPSPLMGGFGLKHPPPQILIKNTPVPADPPTTFNQSKLNSFITQYSTGQVSVEIEWELQKENSKRWNPEIQYTSNYYKSTSVDFAVNTEGVYSEPRPIGTRYLTRNL

SEQ ID NO: 3082 - protein, 738 aa, synthetic construct
  REGION 1..738: note = source = /note="Description of Artificial Sequence: Synthetic polypeptide"
MAADGYLPDWLEDNLSEGIREWWALKPGAPKPKANQQKQDDGRGLVLPGYKYLGPFNGLDKGEPVNAADAAALEHDKAYDQQLQAGDNPYLRYNHADAEFQERLQEDTSFGGNLGRAVFQAKKRVLEPLGLVEEGAKTAPGKKRPVEPSPQRSPDSSTGIGKKGQQPARKRLNFGQTGDSESVPDPQPLGEPPAAPSGVGPNTMAAGGGAPMADNNEGADGVGSSSGNWHCDSTWLGDRVITTSTRTWALPTYNNHLYKQISNGTSGGATNDNTYFGYSTPWGYFDFNRFHCHFSPRDWQRLINNNWGFRPKRLSFKLFNIQVKEVTQNEGTKTIANNLTSTIQVFTDSEYQLPYVLGSAHQGCLPPFPADVFTIPQYGYLTLNNGSQAVGRSSFYCLEYFPSQMLRTGNNFQFTYTFEDVPFHSSYAHSQSLDRLMNPLIDQYLYYLSRIQTTGGTANTQTLGFSQGGPNTMANQAKNWLPGPCYRQQRVSTTTGQNNNSNFAWTAGTKYHLNGRNSLANPGIAMATHKDDEERFFPSNGILIFGKQNAVRDNADYSDVMPTSEEEIKTTNPVATEEYGIVADNLQQQNTAPQIGTVNSQGALPGMVWQNRDVYLQGPIWAKIPHTDGNFHPSPLMGGFGLKHPPPQILIKNTPVPADPPTTFNQSKLNSFITQYSTGQVSVEIEWELQKENSKRWNPEIQYTSNYYKSTSVDFAVNTEGVYSEPRPIGTRYLTRNL

SEQ ID NO: 3083 - protein, 738 aa, synthetic construct
  REGION 1..738: note = source = /note="Description of Artificial Sequence: Synthetic polypeptide"
MAADGYLPDWLEDNLSEGIREWWALKPGAPKPKANQQKQDDGRGLVLPGYKYLGPFNGLDKGEPVNAADAAALEHDKAYDQQLQAGDNPYLRYNHADAEFQERLQEDTSFGGNLGRAVFQAKKRVLEPLGLVEEGAKTAPGKKRPVEPSPQRSPDSSTGIGKKGQQPARKRLNFGQTGDSESVPDPQPLGEPPAAPSGVGPNTMAAGGGAPMADNNEGADGVGSSSGNWHCDSTWLGDRVITTSTRTWALPTYNNHLYKQISNGTSGGATNDNTYFGYSTPWGYFDFNRFHCHFSPRDWQRLINNNWGFRPKRLSFKLFNIQVKEVTQNEGTKTIANNLTSTIQVFTDSEYQLPYVLGSAHQGCLPPFPADVFTIPQYGYLTLNNGSQAVGRSSFYCLEYFPSQMLRTGNNFQFTYTFEDVPFHSSYAHSQSLDRLMNPLIDQYLYYLSRIQTTGGTANTQTLGFSQGGPNTMANQAKNWLPGPCYRQQRVSTTTGQNNNSNFAWTAGTKYHLNGRNSLANPGIAMATHKDDEERFFPSNGILIFGKQNAARDNADYSDVMPTSEEEIKTTNPVATEEYGIVADNLQQQNTAPQIGTVNSQGALPGMVWQNRDVYLQGPIWAKIPHTDGNFHPSPLMGGFGLKHPPPQILIKNTPVPADPPTTFNQSKLNSFIAQYSTGQVSVEIEWELQKENSKRWNPEIQYTSNYYKSTSVDFAVNTEGVYSEPRPIGTRYLTRNL

SEQ ID NO: 3084 - protein, 738 aa, synthetic construct
  REGION 1..738: note = source = /note="Description of Artificial Sequence: Synthetic polypeptide"
MAADGYLPDWLEDNLSEGIREWWALKPGAPKPKANQQKQDDGRGLVLPGYKYLGPFNGLDKGEPVNAADAAALEHDKAYDQQLQAGDNPYLRYNHADAEFQERLQEDTSFGGNLGRAVFQAKKRVLEPLGLVEEGAKTAPGKKRPVEPSPQRSPDSSTGIGKKGQQPARKRLNFGQTGDSESVPDPQPLGEPPAAPSGVGPNTMAAGGGAPMADNNEGADGVGSSSGNWHCDSTWLGDRVITTSTRTWALPTYNNHLYKQISNGTSGGATNDNTYFGYSTPWGYFDFNRFHCHFSPRDWQRLINNNWGFRPKRLSFKLFNIQVKEVTQNEGTKTIANNLTSTIQVFTDSEYQLPYVLGSAHQGCLPPFPADVFTIPQYGYLTLNNGSQAVGRSSFYCLEYFPSQMLRTGNNFQFTYTFEDVPFHSSYAHSQSLDRLMNPLIDQYLYYLSRIQTTGGTANTQTLGFSQGGPNTMANQAKNWLPGPCYRQQRVSTTTGQNNNSNFAWTAGTKYHLNGRNSLANPGIAMATHKDGEERFFPSNGILIFGKQNAARDNADYSDVMPTSEEEIKTTNPVATEEYGIVADNLQQQNTAPQIGTVNSQGALPGMVWQNRDVYLQGPIWAKIPHTDGNFHPSPLMGGFGLKHPPPQILIKNTPVPADPPTTFNQSKLNSFITQYSTGQVSVEIEWELQKENSKRWNPEIQYTSNYYKSTSVDFAVNTEGVYSEPRPIGTRYLTRNL

SEQ ID NO: 3085 - protein, 738 aa, synthetic construct
  REGION 1..738: note = source = /note="Description of Artificial Sequence: Synthetic polypeptide"
MAADGYLPDWLEDNLSEGIREWWALKPGAPKPKANQQKQDDGRGLVLPGYKYLGPFNGLDKGEPVNAADAAALEHDKAYDQQLQAGDNPYLRYNHADAEFQERLQEDTSFGGNLGRAVFQAKKRVLEPLGLVEEGAKTAPGKKRPVEPSPQRSPDSSTGIGKKGQQPARKRLNFGQTGDSESVPDPQPLGEPPAAPSGVGPNTMAAGGGAPMADNNEGADGVGSSSGNWHCDSTWLGDRVITTSTRTWALPTYNNHLYKQISNGTSGGATNDNTYFGYSTPWGYFDFNRFHCHFSPRDWQRLINNNWGFRPKRLSFKLFNIQVKEVTQNEGTKTIANNLTSTIQVFTDSEYQLPYVLGSAHQGCLPPFPADVFTIPQYGYLTLNNGSQAVGRSSFYCLEYFPSQMLRTGNNFQFTYTFEDVPFHSSYAHSQSLDRLMNPLIDQYLYYLSRIQTTGGTANTQTLGFSQGGPNTMANQAKNWLPGPCYRQQRVSTTTGQNNNSNFAWTAGTKYHLNGRNSLANPGIAMATHKGDEERFFPSNGILIFGKQNAARDNADYSDVMPTSEEEIKTTNPVATEEYGIVADNLQQQNTAPQIGTVNSQGALPGMVWQNRDVYLQGPIWAKIPHTDGNFHPSPLMGGFGLKHPPPQILIKNTPVPADPPTTFNQSKLNSFITQYSTGQVSVEIEWELQKENSKRWNPEIQYTSNYYKSTSVDFAVNTEGVYSEPRPIGTRYLTRNL

SEQ ID NO: 3086 - protein, 738 aa, synthetic construct
  REGION 1..738: note = source = /note="Description of Artificial Sequence: Synthetic polypeptide"
MAADGYLPDWLEDNLSEGIREWWALKPGAPKPKANQQKQDDGRGLVLPGYKYLGPFNGLDKGEPVNAADAAALEHDKAYNQQLQAGDNPYLRYNHADAEFQERLQEDTSFGGNLGRAVFQAKKRVLEPLGLVEEGAKTAPGKKRPVEPSPQRSPDSSTGIGKKGQQPARKRLNFGQTGDSESVPDPQPLGEPPAAPSGVGPNTMAAGGGAPMADNNEGADGVGSSSGNWHCDSTWLGDRVITTSTRTWALPTYNNHLYKQISNGTSGGATNDNTYFGYSTPWGYFDFNRFHCHFSPRDWQRLINNNWGFRPKRLSFKLFNIQVKEVTQNEGTKTIANNLTSTIQVFTDSEYQLPYVLGSAHQGCLPPFPADVFTIPQYGYLTLNNGSQAVGRSSFYCLEYFPSQMLRTGNNFQFTYTFEDVPFHSSYAHSQSLDRLMNPLIDQYLYYLSRIQTTGGTANTQTLGFSQGGPNTMANQAKNWLPGPCYRQQRVSTTTGQNNNSNFAWTAGTKYHLNGRNSLANPGIAMATHKDDEERFFPSNGILIFGKQNAARDNADYSDVMPTSEEEIKTTNPVATEEYGIVADNLQQQNTAPQIGTVNSQGALPGMVWQNRDVYLQGPIWAKIPHTDGNFHPSPLMGGFGLKHPPPQILIKNTPVPADPPTTFNQSKLNSFITQYSTGQVSVEIEWELQKENSKRWNPEIQYTSNYYKSTSVDFAVNTEGVYSEPRPIGTRYLTRNL

SEQ ID NO: 3087 - protein, 738 aa, synthetic construct
  REGION 1..738: note = source = /note="Description of Artificial Sequence: Synthetic polypeptide"
MAADGYLPDWLEDNLSEGIREWWALKPGAPKPKANQQKQDDGRGLVLPGYKYLGPFNGLDKGEPVNAADAAALEHDKAYDQQLQAGDNPYLRYNHADAEFQERLQEDTSFGGNLGRAVFQAKKRVLEPLGLVEEGAKTAPGKKRPVEPSPQRSPDSSTGIGKKGQQPARKRLNFGQTGDSESVPDPQPLGEPPAAPSGVGPNTMAAGGGAPMADNNEGADGVGSSSGNWHCDSTWLGDRVITTSTRTWALPTYNNHLYKQISNGTSGGATNDNTYFGYSTPWGYFDFNRFHCHFSPRDWQRLINNNWGFRPKRLSFKLFNIQVKEVTQNEGTKTIANNLTSTIQVFTDSEYQLPYVLGSAHQGCLPPFPADVFTIPQYGYLTLNNGSQAVGRSSFYCLEYFPSQMLRTGNNFQFTYTFEDVPFHSSYAHSQSLDRLMNPLIDQYLYYLSRIQTTGGTANTQTLGFSQGGPNTMANQAKNWLPGPCYRQQRVSTTTGQNNNSNFAWTAGTKYHLNGRNSLANPGIAMATHKDDEERFFPSNGILIFGKQNAARDNADYSDVMPTSEEEIKTTNPVATEEYGIVADNLQQQNTAPQIGTVNSQGALPGMVWQNRDVYLQGPTWAKIPHTDGNFHPSPLMGGFGLKHPPPQILIKNTPVPADPPTTFNQSKLNSFITQYSTGQVSVEIEWELQKENSKRWNPEIQYTSNYYKSTSVDFAVNTEGVYSEPRPIGTRYLTRNL

SEQ ID NO: 3088 - protein, 738 aa, synthetic construct
  REGION 1..738: note = source = /note="Description of Artificial Sequence: Synthetic polypeptide"
MAADGYLPDWLEDNLSEGIREWWALKPGAPKPKANQQKQDDGRGLVLPGYKYLGPFNGLDKGEPVNAADAAALEHDKAYDQQLQAGDNPYLRYNHADAEFQERLQEDTSFGGNLGRAVFQAKKRVLEPLGLVEEGAKTAPGKKRPVEPSPQRSPDSSTGIGKKGQQPARKRLNFGQTGDSESVPDPQPLGEPPAAPSGVGPNTMAAGGGAPMADNNEGADGVGSSSGNWHCDSTWLGDRVITTSTRTWALPTYNNHLYKQISNGTSGGATNDNTYFGYSTPWGYFDFNRFHCHFSPRDWQRLINNNWGFRPKRLSFKLFNIQVKEVTQNEGTKTIANNLTSTIQVFTDSEYQLPYVLGSAHQGCLPPFPADVFTIPQYGYLTLNNGSQAVGRSSFYCLEYFPSQMLRTGNNFQFTYTFEDVPFHSSYAHSQSLDRLMNPLIDQYLYYLSRIQTTGGTANTQTLGFSQGGPNTMANQAKNWLPGPCYRQQRVSTTTGQNNNSNFAWTAGTKYHLNGRNSLANPGIAMATHKDDEERFFPSNGILIFGKQNAARDNADYSDVMPTSEEEIKTTNPVATEEYGIVADNLRQQNTAPQIGTVNSQGALPGMVWQNRDVYLQGPIWAKIPHTDGNFHPSPLMGGFGLKHPPPQILIKNTPVPADPPTTFNQSKLNSFITQYSTGQVSVEIEWELQKENSKRWNPEIQYTSNYYKSTSVDFAVNTEGVYSEPRPIGTRYLTRNL

SEQ ID NO: 3089 - protein, 738 aa, synthetic construct
  REGION 1..738: note = source = /note="Description of Artificial Sequence: Synthetic polypeptide"
MAADGYLPDWLEDNLSEGIREWWALKPGAPKPKANQQKQDDGRGLVLPGYKYLGPFNGLDKGEPVNAADAAALEHDKAYDQQLQAGDNPYLRYNHADAEFQERLQEDTSFGGNLGRAVFQAKKRVLEPLGLVEEGAKTAPGKKRPVEPSPQRSPDSSTGIGKKGQQPARKRLNFGQTGDSESVPDPQPLGEPPAAPSGVGPNTMAAGGGAPMADNNEGADGVGSSSGNWHCDSTWLGDRVITTSTRTWALPTYNNHLYKQISNGTSGGATNDNTYFGYSTPWGYFDFNRFHCHFSPRDWQRLINNNWGFRPKRLSFKLFNIQVKEVTQNEGTKTIANNLTSTIQVFTDSEYQLPYVLGSAHQGCLPPFPADVFTIPQYGYLTLNNGSQAVGRSSFYCLEYFPSQMLRTGNNFQFTYTFEDVPFHSSYAHSQSLDRLMNPLIDQYLYYLSRIQTTGGTANTQTLGFSQGGPNTMANQAKNWLPGPCYRQQRVSTTTGQNNNSNFAWTAGTKYHLNGRNSLANPGIAMATHKDDEERFFPSNGILIFGKQNAARDNADYSDAMPTSEEEIKTTNPVATEEYGIVADNLQQQNTAPQIGTVNSQGALPGMVWQNRDVYLQGPIWAKIPHTDGNFHPSPLMGGFGLKHPPPQILIKNTPVPADPPTTFNQSKLNSFITQYSTGQVSVEIEWELQKENSKRWNPEIQYTSNYYKSTSVDFAVNTEGVYSEPRPIGTRYLTRNL

SEQ ID NO: 3090 - protein, 738 aa, synthetic construct
  REGION 1..738: note = source = /note="Description of Artificial Sequence: Synthetic polypeptide"
MAADGYLPDWLEDNLSEGIREWWALKPGAPKPKANQQKQDDGRGLVLPGYKYLGPFNGLDKGEPVNAADAAALEHDKAYDQQLQAGDNPYLRYNHADAEFQERLQEDTSFGGNLGRAVFQAKKRVLEPLGLVEEGAKTAPGKKRPVEPSPQRSPDSSTGIGKKGQQPARKRLNFGQTGDSESVPDPQPLGEPPAAPSGVGPNTMAAGGGAPMADNNEGADGVGSSSGNWHCDSTWLGDRVITTSTRTWALPTYNNHLYKQISNGTSGGATNGNTYFGYSTPWGYFDFNRFHCHFSPRDWQRLINNNWGFRPKRLSFKLFNIQVKEVTQNEGTKTIANNLTSTIQVFTDSEYQLPYVLGSAHQGCLPPFPADVFTIPQYGYLTLNNGSQAVGRSSFYCLEYFPSQMLRTGNNFQFTYTFEDVPFHSSYAHSQSLDRLMNPLIDQYLYYLSRIQTTGGTANTQTLGFSQGGPNTMANQAKNWLPGPCYRQQRVSTTTGQNNNSNFAWTAGTKYHLNGRNSLANPGIAMATHKDDEERFFPSNGILIFGKQNAARDNADYSDVMPTSEEEIKTTNPVATEEYGIVADNLQQQNTAPQIGTVNSQGALPGMVWQNRDVYLQGPIWAKIPHTDGNFHPSPLMGGFGLKHPPPQILIKNTPVPADPPTTFNQSKLNSFITQYSTGQVSVEIEWELQKENSKRWNPEIQYTSNYYKSTSVDFAVNTEGVYSEPRPIGTRYLTRNL

SEQ ID NO: 3091 - protein, 738 aa, synthetic construct
  REGION 1..738: note = source = /note="Description of Artificial Sequence: Synthetic polypeptide"
MAADGYLPDWLEDNLSEGIREWWALKPGAPKPKANQQKQDDGRGLVLPGYKYLGPFNGLDKGEPVNAADAAALEHDKAYDQQLQAGDNPYLRYNHADAEFQERLQEDTSFGGNLGRAVFQAKKRVLEPLGLVEEGAKTAPGKKRPVEPSPQRSPDSSTGIGKKGQQPARKRLNFGQTGDSESVPDPQPLGEPPAAPSGVGPNTMAAGGGAPMADNNEGADGVGSSSGNWHCDSTWLGDRVITTSTRTWALPTYNNHLYKQISNGTSGGATNDNTYFGYSTPWGYFDFNRFHCHFSPRDWQRLINNNWGFRPKRLSFKLFNIQVKEVAQNEGTKTIANNLTSTIQVFTDSEYQLPYVLGSAHQGCLPPFPADVFTIPQYGYLTLNNGSQAVGRSSFYCLEYFPSQMLRTGNNFQFTYTFEDVPFHSSYAHSQSLDRLMNPLIDQYLYYLSRIQTTGGTANTQTLGFSQGGPNTMANQAKNWLPGPCYRQQRVSTTTGQNNNSNFAWTAGTKYHLNGRNSLANPGIAMATHKDDEERFFPSNGILIFGKQNAARDNADYSDVMPTSEEEIKTTNPVATEEYGIVADNLQQQNTAPQIGTVNSQGALPGMVWQNRDVYLQGPIWAKIPHTDGNFHPSPLMGGFGLKHPPPQILIKNTPVPADPPTTFNQSKLNSFITQYSTGQVSVEIEWELQKENSKRWNPEIQYTSNYYKSTSVDFAVNTEGVYSEPRPIGTRYLTRNL

SEQ ID NO: 3092 - protein, 738 aa, synthetic construct
  REGION 1..738: note = source = /note="Description of Artificial Sequence: Synthetic polypeptide"
MAADGYLPDWLEDNLSEGIREWWALKPGAPKPKANQQKQDDGRGLVLPGYKYLGPFNGLDKGEPVNAADAAALEHDKAYDQQLQAGDNPYLRYNHADAEFQERLQEDTSFGGNLGRAVFQAKKRVLEPLGLVEEGAKTAPGKKRPVEPSPQRSPDSSTGIGKKGQQPARKRLNFGQTGDSESVPDPQPLGEPPAAPSGVGPNTMAAGGGAPMADNNEGADGVGSSSGNWHCDSTWLGDRVITTSTRTWALPTYNNHLYKQISNGTSGGATNDNTYFGYSTPWGYFDFNRFHCHFSPRDWQRLINNNWGFRPKRLSFKLFNIQVKEVTQNEGTKTIANNLTSTIQVFTDSEYQLPYVLGSAHQGCLPPFPADVFTIPQYGYLTLNNGSQAVGRSSFYCLEYFPSQMLRTGNNFQFTYTFEDVPFHSSYAHSQSLDRLMNPLIDQYLYYLSRIQTTGGTANTQTLGFSQGGPNTMANQAKNWLPGPCYRQQRVSTTTGQNNNSNFAWTAGTKYHLNGRNSLANPGIAMATHKDDEERFFPSNGILIFGKQNAARDNADYSDVMPTSEEEIKTTNPVATEEYGIVADNLQQQNTAPQIGTVNSQGALPGMVWQNRDVYLQGPIWAKIPHTDGNFHPSPLMGGFGLKHPPPQILIKNTPVPADPPTTFNQSKLNSFITQYSTGQVSAEIEWELQKENSKRWNPEIQYTSNYYKSTSVDFAVNTEGVYSEPRPIGTRYLTRNL

SEQ ID NO: 3093 - protein, 738 aa, synthetic construct
  REGION 1..738: note = source = /note="Description of Artificial Sequence: Synthetic polypeptide"
MAADGYLPDWLEDNLSEGIREWWALKPGAPKPKANQQKQDDGRGLVLPGYKYLGPFNGLDKGEPVNAADAAALEHDKAYDQQLQAGDNPYLRYNHADAEFQERLQEDTSFGGNLGRAVFQAKKRVLEPLGLVEEGAKTAPGKKRPVEPSPQRSPDSSTGIGKKGQQPARKRLNFGQTGDSESVPDPQPLGEPPAAPSGVGPNTMAAGGGAPMADNNEGADGVGSSSGNWHCDSTWLGDRVITTSTRTWALPTYNNHLYKQISNGTSGGATNDNTYFGYSTPWGYFDFNRFHCHFSPRDWQRLINNNWGFRPKRLSFKLFNIQVKEVTQNEGTKTIANNLTSTIQVFTDSEYQLPYVLGSAHQGCLPPFPADVFTIPQYGYLTLNNGSQAVGRSSFYCLEYFPSQMLRTGNNFQFTYTFEDVPFHSSYAHSQGLDRLMNPLIDQYLYYLSRIQTTGGTANTQTLGFSQGGPNTMANQAKNWLPGPCYRQQRVSTTTGQNNNSNFAWTAGTKYHLNGRNSLANPGIAMATHKDDEERFFPSNGILIFGKQNAARDNADYSDVMPTSEEEIKTTNPVATEEYGIVADNLQQQNTAPQIGTVNSQGALPGMVWQNRDVYLQGPIWAKIPHTDGNFHPSPLMGGFGLKHPPPQILIKNTPVPADPPTTFNQSKLNSFITQYSTGQVSVEIEWELQKENSKRWNPEIQYTSNYYKSTSVDFAVNTEGVYSEPRPIGTRYLTRNL

SEQ ID NO: 3094 - protein, 738 aa, synthetic construct
  REGION 1..738: note = source = /note="Description of Artificial Sequence: Synthetic polypeptide"
MAADGYLPDWLEDNLSEGIREWWALKPGAPKPKANQQKQDDGRGLVLPGYKYLGPFNGLDKGEPVNAADAAALEHDKAYDQQLQAGDNPYLRYNHADAEFQERLQEDTSFGGNLGRAVFQAKKRVLEPLGLVEEGAKTAPGKKRPVEPSPQRSPDSSTGIGKKGQQPARKRLNFGQTGDSESVPDPQPLGEPPAAPSGVGPNTMAAGGGAPMADNNEGADGVGSSSGNWHCDSTWLGDRVITTSTRTWALPTYNNHLYKQISNGTSGGATNDNTYFGYSTPWGYFDFNRFHCHFSPRDWQRLINNNWGFRPKRLSFKLFNIQVKEVTQNEGTKTIANNLTSTIQVFTDSEYQLPYVLGSAHQGCLPPFPADVFTIPQYGYLTLNNGSQAVGRSSFYCLEYFPSQMLRTGSNFQFTYTFEDVPFHSSYAHSQSLDRLMNPLIDQYLYYLSRIQTTGGTANTQTLGFSQGGPNTMANQAKNWLPGPCYRQQRVSTTTGQNNNSNFAWTAGTKYHLNGRNSLANPGIAMATHKDDEERFFPSNGILIFGKQNAARDNADYSDVMPTSEEEIKTTNPVATEEYGIVADNLQQQNTAPQIGTVNSQGALPGMVWQNRDVYLQGPIWAKIPHTDGNFHPSPLMGGFGLKHPPPQILIKNTPVPADPPTTFNQSKLNSFITQYSTGQVSVEIEWELQKENSKRWNPEIQYTSNYYKSTSVDFAVNTEGVYSEPRPIGTRYLTRNL

SEQ ID NO: 3095 - protein, 738 aa, synthetic construct
  REGION 1..738: note = source = /note="Description of Artificial Sequence: Synthetic polypeptide"
MAADGYLPDWLEDNLSEGIREWWALKPGAPKPKANQQKQDDGRGLVLPGYKYLGPFNGLDKGEPVNAADAAALEHDKAYDQQLQAGDNPYLRYNHADAEFQERLQEDTSFGGNLGRAVFQAKKRVLEPLGLVEEGAKTAPGKKRPVEPSPQRSPDSSTGIGKKGQQPARKRLNFGQTGDSESVPDPQPLGEPPAAPSGVGPNTMAAGGGAPMADNNEGADGVGSSSGNWHCDSTWLGDRVITTSTRTWALPTYNNHLYKQISNGTSGGATNDNTYFGYSTPWGYFDFNRFHCHFSPRDWQRLINNNWGFRPKRLSFKLFNIQVKEVTQNEGTKTIANNLTSTIQVFTDSEYQLPYVLGSAHQGCLPPFPADVFTIPQYGYLTLNNGSQAVGRSSFYCLEYFPSQMLRTGNNFQFTYTFEDVPFHSSYAHSQSLDRLMNPLIDQYLYYLSRIQTTGGTANTQTLGFSQGGPNTMANQAKNWLPGPCYRQQRVSTTTGQNNNSNFAWTAGTKYHLNGRNSLANPGIAMATHKDDEERFFPSNGILIFGKQNAARDNADYSDVMPTSEEEIKTTNPVATEEYGIVADNLQQQNTAPQIGTVNSQGALPGMVWQNRDVYLQGPIWAKIPHTDGNFHPSPLMGGFGLKHPPPQILIKNTPVPADPPTTFNQSKLNSFITQYSTGQVSVEIEWELRKENSKRWNPEIQYTSNYYKSTSVDFAVNTEGVYSEPRPIGTRYLTRNL

SEQ ID NO: 3096 - protein, 738 aa, synthetic construct
  REGION 1..738: note = source = /note="Description of Artificial Sequence: Synthetic polypeptide"
MAADGYLPDWLEDNLSEGIREWWALKPGAPKPKANQQKQDDGRGLVLPGYKYLGPFNGLDKGEPVNAADAAALEHDKAYDQQLQAGDNPYLRYNHADAEFQERLQEDTSFGGNLGRAVFQAKKRVLEPLGLVEEGAKTAPGKKRPVEPSPQRSPDSSTGIGKKGQQPARKRLNFGQTGDSESVPDPQPLGEPPAAPSGVGPNTMAAGGGAPMADNNEGADGVGSSSGNWHCDSTWLGDRVITTSTRTWALPTYNNHLYKQISNGTSGGATNDNTYFGYSTPWGYFDFNRFHCHFSPRDWQRLINNNWGFRPKRLSFKLFNIQVKEVTQNEGTKTIANNLTSTIQVFTDSEYQLPYVLGSAHQGCLPPFPADVFTIPQYGYLTLNNGSQAVGRSSFYCLEYFPSQMLRTGNNFQFTYTFEDAPFHSSYAHSQSLDRLMNPLIDQYLYYLSRIQTTGGTANTQTLGFSQGGPNTMANQAKNWLPGPCYRQQRVSTTTGQNNNSNFAWTAGTKYHLNGRNSLANPGIAMATHKDDEERFFPSNGILIFGKQNAARDNADYSDVMPTSEEEIKTTNPVATEEYGIVADNLQQQNTAPQIGTVNSQGALPGMVWQNRDVYLQGPIWAKIPHTDGNFHPSPLMGGFGLKHPPPQILIKNTPVPADPPTTFNQSKLNSFITQYSTGQVSVEIEWELQKENSKRWNPEIQYTSNYYKSTSVDFAVNTEGVYSEPRPIGTRYLTRNL

SEQ ID NO: 3097 - protein, 738 aa, synthetic construct
  REGION 1..738: note = source = /note="Description of Artificial Sequence: Synthetic polypeptide"
MAADGYLPDWLEDNLSEGIREWWALKPGAPKPKANQQKQDDGRGLVLPGYKYLGPFNGLDKGEPVNAADAAALEHDKAYDQQLQAGDNPYLRYNHADAEFQERLQEDTSFGGNLGRAVFQAKKRVLEPLGLVEEGAKTAPGKKRPVEPSPQRSPDSSTGIGKKGQQPARKRLNFGQTGDSESVPDPQPLGEPPAAPSGVGPNTMAAGGGAPMADNNEGADGVGSSSGNWHCDSTWLGDRVITASTRTWALPTYNNHLYKQISNGTSGGATNDNTYFGYSTPWGYFDFNRFHCHFSPRDWQRLINNNWGFRPKRLSFKLFNIQVKEVTQNEGTKTIANNLTSTIQVFTDSEYQLPYVLGSAHQGCLPPFPADVFTIPQYGYLTLNNGSQAVGRSSFYCLEYFPSQMLRTGNNFQFTYTFEDVPFHSSYAHSQSLDRLMNPLIDQYLYYLSRIQTTGGTANTQTLGFSQGGPNTMANQAKNWLPGPCYRQQRVSTTTGQNNNSNFAWTAGTKYHLNGRNSLANPGIAMATHKDDEERFFPSNGILIFGKQNAARDNADYSDVMPTSEEEIKTTNPVATEEYGIVADNLQQQNTAPQIGTVNSQGALPGMVWQNRDVYLQGPIWAKIPHTDGNFHPSPLMGGFGLKHPPPQILIKNTPVPADPPTTFNQSKLNSFITQYSTGQVSVEIEWELQKENSKRWNPEIQYTSNYYKSTSVDFAVNTEGVYSEPRPIGTRYLTRNL

SEQ ID NO: 3098 - protein, 738 aa, synthetic construct
  REGION 1..738: note = source = /note="Description of Artificial Sequence: Synthetic polypeptide"
MAADGYLPDWLEDNLSEGIREWWALKPGAPKPKANQQKQDDGRGLVLPGYKYLGPFNGLDKGEPVNAADAAALEHDKAYDQQLQAGDNPYLRYNHADAEFQERLQEDTSFGGNLGRAVFQAKKRVLEPLGLVEEGAKTAPGKKRPVEPSPQRSPDSSTGIGKKGQQPARKRLNFGQTGDSESVPDPQPLGEPPAAPSGVGPNTMAAGGGAPMADNNEGADGVGSSSGNWHCDSTWLGDRVITTSTRTWALPTYNNHLYKQISNGTSGGATNDNTYFGYSTPWGYFDFNRFHCHFSPRDWQRLINNNWGFRPKRLSFKLFNIQVKEVTQNEGTKTIANNLTSTIQVFTDSEYQLPYVLGSAHQGCLPPFPADVFTIPQYGYLTLNNGSQAVGRSSFYCLEYFPSQMLRTGNNFQFTYTFEDVPFHSSYAHSQSLDRLMNPLIDQYLYYLSRIQTTGGTANTQTLGFSQGGPNTMANQAKNWLPGPCYRQQRVSTTTGQNNNSNFAWTAGTKYHLNGRNSLANPGIAMATHKDDEERFFPSNGILIFGKQNAARDNADYSDVMPTSEEEIKTTNPVATEEYGIVADNLQQQNTAPQIGTVNSQGALPGMVWQNRDVYLQGPIWAKIPHTDGNFHPSPLMGGFGLKHPPPQILIKNTPVPADPPTTFNQSKLNSFITQYSTGQVSVEIEWELQKENSKRRNPEIQYTSNYYKSTSVDFAVNTEGVYSEPRPIGTRYLTRNL

SEQ ID NO: 3099 - protein, 738 aa, synthetic construct
  REGION 1..738: note = source = /note="Description of Artificial Sequence: Synthetic polypeptide"
MAADGYLPDWLEDNLSEGIREWWALKPGAPKPKANQQKQDDGRGLVLPGYKYLGPFNGLDKGEPVNAADAAALEHDKAYDQQLQAGDNPYLRYNHADAEFQERLQEDTSFGGNLGRAVFQAKKRVLEPLGLVEEGAKTAPGKKRPVEPSPQRSPDSSTGIGKKGQQPARKRLNFGQTGDSEPVPDPQPLGEPPAAPSGVGPNTMAAGGGAPMADNNEGADGVGSSSGNWHCDSTWLGDRVITTSTRTWALPTYNNHLYKQISNGTSGGATNDNTYFGYSTPWGYFDFNRFHCHFSPRDWQRLINNNWGFRPKRLSFKLFNIQVKEVTQNEGTKTIANNLTSTIQVFTDSEYQLPYVLGSAHQGCLPPFPADVFTIPQYGYLTLNNGSQAVGRSSFYCLEYFPSQMLRTGNNFQFTYTFEDVPFHSSYAHSQSLDRLMNPLIDQYLYYLSRIQTTGGTANTQTLGFSQGGPNTMANQAKNWLPGPCYRQQRVSTTTGQNNNSNFAWTAGTKYHLNGRNSLANPGIAMATHKDDEERFFPSNGILIFGKQNAARDNADYSDVMPTSEEEIKTTNPVATEEYGIVADNLQQQNTAPQIGTVNSQGALPGMVWQNRDVYLQGPIWAKIPHTDGNFHPSPLMGGFGLKHPPPQILIKNTPVPADPPTTFNQSKLNSFITQYSTGQVSVEIEWELQKENSKRWNPEIQYTSNYYKSTSVDFAVNTEGVYSEPRPIGTRYLTRNL

SEQ ID NO: 3100 - protein, 738 aa, synthetic construct
  REGION 1..738: note = source = /note="Description of Artificial Sequence: Synthetic polypeptide"
MAADGYLPDWLEDNLSEGIREWWALKPGAPKPKANQQKQDDGRGLVLPGYKYLGPFNGLDKGEPVNAADAAALEHDKAYDQQLQAGDNPYLRYNHADAEFQERLQEDTSFGGNLGRAVFQAKKRVLEPLGLVEEGAKTAPGKKRPVEPSPQRSPDSSTGIGKKGQQPARKRLNFGQTGDSESVPDPQPLGEPPAAPSGVGPNTMAAGGGAPMADNNEGADGVGSSSGNWHCDSTWLGDRVITTSTRTWALPTYNNHLYKQISNGTSGGATNDNTYFGYSTPWGYFDFNRFHCHFSPRDWQRLINNNWGFRPKRLSFKLFNIQVKEVTQNEGTKTIANNLTSTIQVFTDSEYQLPYVLGSAHQGCLPPFPADVFTIPQYGYLTLNNGSQAVGRSSFYCLEYFPSQMLRTGNNFQFTYTFEDVPFHSSYAHSQSLDRLMNPLIDQYLYYLSRIQTTGGTANTQTLGFSQGGPNTMANQAKNWLPGPCYRQQRVSTTTGQNNNSNFAWTAGTKYHLNGRNSLANPGIAMATHKDDEERFFPSNGIPIFGKQNAARDNADYSDVMPTSEEEIKTTNPVATEEYGIVADNLQQQNTAPQIGTVNSQGALPGMVWQNRDVYLQGPIWAKIPHTDGNFHPSPLMGGFGLKHPPPQILIKNTPVPADPPTTFNQSKLNSFITQYSTGQVSVEIEWELQKENSKRWNPEIQYTSNYYKSTSVDFAVNTEGVYSEPRPIGTRYLTRNL

SEQ ID NO: 3101 - protein, 738 aa, synthetic construct
  REGION 1..738: note = source = /note="Description of Artificial Sequence: Synthetic polypeptide"
MAADGYLPDWLEDNLSEGIREWWALKPGAPKPKANQQKQDDGRGLVLPGYKYLGPFNGLDKGEPVNAADAAALEHDKAYDQQLQAGDNPYLRYNHADAEFQERLQEDTSFGGNLGRAVFQAKKRVLEPLGLVEEGAKTAPGKKRPVEPSPQRSPDSSTGIGKKGQQPARKRLNFGQTGDSESVPDPQPLGEPPAAPSGVGPNTMAAGGGAPMADNNEGADGVGSSSGNWHCDSTWLGDRVITTSTRTWALPTYNNHLYKQISNGTSGGATNDNTYFGYSTPWGYFDFNRFHCHFSPRDWQRLINNNWGFRPKRLSFKLFNIQVKEVTQNEGTKTIANNLTSTIQVFTDSEYQLPYVLGSAHQGCLPPFPADVFTIPQYGYLTLNNGSQAVGRSSFYCLEYFPSQMLRTGNNFQFTYTFEDVPFHSSYAHSQSLDRLMNPLIDQYLYYLSRIQTTGGTANTQTLGFSQGGPNTMANQAKNWLPGPCYRQQRVSTTTGQNNNSNFAWTAGTKYHLNGRNSLANPGIAMATHKDDEERFFPSNGILIFGKQNAARDNADYSDVMPTSEEEIKTTNPVATEEYGIVADNLQQQNTAPQIGTVNSQGALPGMVWQNRDVYLQGPIWAKIPHTDGNFHPSPLMGGFGLKHPPPQILIKNTPVPADPPTTFNQSKLNSFITQYSTGQVSVEIEWELQKENSKRWNPEIQHTSNYYKSTSVDFAVNTEGVYSEPRPIGTRYLTRNL

SEQ ID NO: 3102 - protein, 738 aa, synthetic construct
  REGION 1..738: note = source = /note="Description of Artificial Sequence: Synthetic polypeptide"
MAADGYLPDWLEDNLSEGIREWWALKPGAPKPKANQQKQDDGRGLVLPGYKYLGPFNGLDKGEPVNAADAAALEHDKAYDQQLQAGDNPYLRYNHADAEFQERLQEDTSFGGNLGRAVFQAKKRVLEPLGLVEEGAKTAPGKKRPVEPSPQRSPDSSTGIGKKGQQPARKRLNFGQTGDSESVPDPQPLGEPPAAPSGVGPNTMAAGGGAPMADNNEGADGVGSSSGNWHCDSTWLGDRVITTSTRTWALPTYNNHLYKQISNGTSGGATNDNTYFGYSTPWGYFDFNRFHCHFSPRDWQRLINNNWGFRPKRLSFKLFNIQVKEVTQNEGTKTIANNLTSTIQVFTDSEYQLPYVLGSAHQGCLPPFPADVFTIPQYGYLTLNNGSQAVGRSSFYCLEYFPSQMLRTGNNFQFTYTFEDVPFHSSYAHSQSLDRLMNPLIDQYLYYLSRIQTTGGTANTQTLGFSQGGPNTMANQAKNWLPGPCYRQQRVSTTTGQNNNSNFAWTAGTKYHLNGRNSLANPGIAMATHKDDEERFFPSNGILIFGKQNAARDNADYSDVMPTSEEEIKTTNPVATEEYGIVADNLQQQNTAPQIGTVNSQGALPGMVWQNRDVYLQGPIWAKIPHTDGNFHPSPLMGGFGLKHPPPQILIKNTPVPADPPTTFNQSKLNPFITQYSTGQVSVEIEWELQKENSKRWNPEIQYTSNYYKSTSVDFAVNTEGVYSEPRPIGTRYLTRNL

SEQ ID NO: 3103 - protein, 738 aa, synthetic construct
  REGION 1..738: note = source = /note="Description of Artificial Sequence: Synthetic polypeptide"
MAADGYLPDWLEDNLSEGIREWWALKPGAPKPKANQQKQDDGRGLVLPGYKYLGPFNGLDKGEPVNAADAAALEHDKAYDQQLQAGDNPYLRYNHADAEFQERLQEDTSFGGNLGRAVFQAKKRVLEPLGLVEEGAKTAPGKKRPVEPSPQRSPDSSTGIGKKGQQPARKRLNFGQTGDSESVPDPQPLGEPPAAPSGVGPNTMAAGGGAPMADNNEGADGVGSSSGNWHCDSTWLGDRVITTSTRTWALPTYNNHLYKQISNGTSGGATNDNTYFGYSTPWGYFDFNRFHCHFSPRDWQRLINNNWGFRPKRLSFKLFNIQVKEVTQNEGTKTIANNLTSTIQVFTDSEYQLPYVLGSAHQGCLPPFPADVFTIPQYGYLTLNNGSQAVGRSSFYCLEYFPSQMLRTGNNFQFTYTFEDVPFHSSYAHSQSLDRLMNPLIDQYLYYLSRIQTTGGTANTQTLGFSQGGPNTMANQAKNWLPGPCYRQQRVSTTTGQNNNSNFAWTAGTKYHLNGRNSLANPGIAMATHKDDEERFFPSNGILIFGKQNAARDNADYSDVMPTSEEEIKTTNPVATEEYGIVADNLQQQNTAPQIGTVNSQGALPGMVWQNRDVYLQGPIWAKIPHTDGNFRPSPLMGGFGLKHPPPQILIKNTPVPADPPTTFNQSKLNSFITQYSTGQVSVEIEWELQKENSKRWNPEIQYTSNYYKSTSVDFAVNTEGVYSEPRPIGTRYLTRNL

SEQ ID NO: 3104 - protein, 738 aa, synthetic construct
  REGION 1..738: note = source = /note="Description of Artificial Sequence: Synthetic polypeptide"
MAADGYLPDWLEDNLSEGIREWWALKPGAPKPKANQQKQDDGRGLVLPGYKYLGPFNGLDKGEPVNAADAAALEHDKAYDQQLQAGDNPYLRYNHADAEFQERLQEDTSFGGNLGRAVFQAKKRVLEPLGLVEEGAKTAPGKKRPVEPSPQRSPDSSTGIGKKGQQPARKRLNFGQTGDSESVPDPQPLGEPPAAPSGVGPNTMAAGGGAPMADNNEGADGVGSSSGNWHCDSTWLGDRVITTSTRTWALPTYNNHLYKQISNGTSGGATNDNTYFGYSTPWGYFDFNRFHCHFSPRDWQRLINNNWGFRPKRLSFKLFNIQVKEVTQNEGTKTIANNLTSTIQVFTDSEYQLPYVLGSAHQGCLPPFPADVFTIPQYGYLTLNNGSQAVGRSSFYCLEYFPSQMLRTGNNFQFTYTFEDVPFHSSYAHSQSLDRLMNPLIDQYLYYLSRIQTTGGTANTQTLGFSQGGPNTMANQAKNWLPGPCYRQQRVSTTTGQNNNSNFAWTAGTKYHLNGRNSLANPGIAMATHKDDEERFFPSNGILIFGKQNAARDNADYSDVMPTSEEEIKTTNPVATEEYGIVADNLQQQNTAPQIGTVNSQGALPGMVWQNRDVYLQGPIWAKIPHTDGNFHPSPLMGGFGLKHPPPQILIKNTPVPADPPTTFNQSKLNSFITQYSTGQVSVEIEWELQKENSKRWNPEIQYTSNYYKSTSVDFAVNTEGVYSEPRPIGARYLTRNL

SEQ ID NO: 3105 - protein, 738 aa, synthetic construct
  REGION 1..738: note = source = /note="Description of Artificial Sequence: Synthetic polypeptide"
MAADGYLPDWLEDNLSEGIREWWALKPGAPKPKANQQKQDDGRGLVLPGYKYLGPFNGLDKGESVNAADAAALEHDKAYDQQLQAGDNPYLRYNHADAEFQERLQEDTSFGGNLGRAVFQAKKRVLEPLGLVEEGAKTAPGKKRPVEPSPQRSPDSSTGIGKKGQQPARKRLNFGQTGDSESVPDPQPLGEPPAAPSGVGPNTMAAGGGAPMADNNEGADGVGSSSGNWHCDSTWLGDRVITTSTRTWALPTYNNHLYKQISNGTSGGATNDNTYFGYSTPWGYFDFNRFHCHFSPRDWQRLINNNWGFRPKRLSFKLFNIQVKEVTQNEGTKTIANNLTSTIQVFTDSEYQLPYVLGSAHQGCLPPFPADVFTIPQYGYLTLNNGSQAVGRSSFYCLEYFPSQMLRTGNNFQFTYTFEDVPFHSSYAHSQSLDRLMNPLIDQYLYYLSRIQTTGGTANTQTLGFSQGGPNTMANQAKNWLPGPCYRQQRVSTTTGQNNNSNFAWTAGTKYHLNGRNSLANPGIAMATHKDDEERFFPSNGILIFGKQNAARDNADYSDVMPTSEEEIKTTNPVATEEYGIVADNLQQQNTAPQIGTVNSQGALPGMVWQNRDVYLQGPIWAKIPHTDGNFHPSPLMGGFGLKHPPPQILIKNTPVPADPPTTFNQSKLNSFITQYSTGQVSVEIEWELQKENSKRWNPEIQYTSNYYKSTSVDFAVNTEGVYSEPRPIGTRYLTRNL

SEQ ID NO: 3106 - protein, 738 aa, synthetic construct
  REGION 1..738: note = source = /note="Description of Artificial Sequence: Synthetic polypeptide"
MAADGYLPDWLEDNLSEGIREWWALKPGAPKPKANQQKQDDGRGLVLPGYKYLGPFNGLDKGEPVNAADAAALEHDKAYDQQLQAGDNPYLRYNHADAEFQERLQEDTSFGGNLGRAVFQAKKRVLEPLGLVEEGAKTAPGKKRPVEPSPQRSPDSSTGIGKKGQQPARKRLNFGQTGDSESVPDPQPLGEPPAAPSGVGPNTMAAGGGAPMADNSEGADGVGSSSGNWHCDSTWLGDRVITTSTRTWALPTYNNHLYKQISNGTSGGATNDNTYFGYSTPWGYFDFNRFHCHFSPRDWQRLINNNWGFRPKRLSFKLFNIQVKEVTQNEGTKTIANNLTSTIQVFTDSEYQLPYVLGSAHQGCLPPFPADVFTIPQYGYLTLNNGSQAVGRSSFYCLEYFPSQMLRTGNNFQFTYTFEDVPFHSSYAHSQSLDRLMNPLIDQYLYYLSRIQTTGGTANTQTLGFSQGGPNTMANQAKNWLPGPCYRQQRVSTTTGQNNNSNFAWTAGTKYHLNGRNSLANPGIAMATHKDDEERFFPSNGILIFGKQNAARDNADYSDVMPTSEEEIKTTNPVATEEYGIVADNLQQQNTAPQIGTVNSQGALPGMVWQNRDVYLQGPIWAKIPHTDGNFHPSPLMGGFGLKHPPPQILIKNTPVPADPPTTFNQSKLNSFITQYSTGQVSVEIEWELQKENSKRWNPEIQYTSNYYKSTSVDFAVNTEGVYSEPRPIGTRYLTRNL

SEQ ID NO: 3107 - protein, 738 aa, synthetic construct
  REGION 1..738: note = source = /note="Description of Artificial Sequence: Synthetic polypeptide"
MAADGYLPDWLEDNLSEGIREWWALKPGAPKPKANQQKQDDGRGLVLPGYKYLGPFNGLDKGEPVNAADAAALEHDKAYDQQLQAGDNPYLRYNHADAEFQERLQEDTSFGGNLGRAVFQAKKRVLEPLGLVEEGAKTAPGKKRPVEPSPQRSPDSSTGIGKKGQQPARKRLNFGQTGDSESVPDPQPLGEPPAAPSGVGPNTMAAGGGAPMADNNEGADGVGSSSGNWHCDSTWLGDRVITTSTRTWALPTYNNHLYKQISNGTSGGATNDNTYFGYSTPWGYFDFNRFHCHFSPRDWQRLINNNWGFRPKRLSFKLFNIQVKEVTQNEGTKTIANNLTSTIQVFTDSEYQLPYVLGSAHQGCLPPFPADVFTIPQYGYLTLNNGSQAVGRSSFYCLEYFPSQMLRTGNNFQFTYTFEDVPFHSSYAHSQSLDRLMNPLIDQYLYYLSRIQTTGGTANTQTLGFSQGGPNTMANQAKNWLPGPCYRQQRVSTTTGQNNNSNFAWTAGTKYHLNGRNSLANPGIAMATHKDDEERFFPSNGILIFGKQNAARDNADYGDVMPTSEEEIKTTNPVATEEYGIVADNLQQQNTAPQIGTVNSQGALPGMVWQNRDVYLQGPIWAKIPHTDGNFHPSPLMGGFGLKHPPPQILIKNTPVPADPPTTFNQSKLNSFITQYSTGQVSVEIEWELQKENSKRWNPEIQYTSNYYKSTSVDFAVNTEGVYSEPRPIGTRYLTRNL

SEQ ID NO: 3108 - protein, 738 aa, synthetic construct
  REGION 1..738: note = source = /note="Description of Artificial Sequence: Synthetic polypeptide"
MAADGYLPDWLEDNLSEGIREWWALKPGAPKPKANQQKQDDGRGLVLPGYKYLGPFNGLDKGEPVNAADAAALEHDKAYDQQLQAGDNPYLRYNHADAEFQERLQEDTSFGGNLGRAVFQAKKRVLEPLGLVEEGAKTAPGKRRPVEPSPQRSPDSSTGIGKKGQQPARKRLNFGQTGDSESVPDPQPLGEPPAAPSGVGPNTMAAGGGAPMADNNEGADGVGSSSGNWHCDSTWLGDRVITTSTRTWALPTYNNHLYKQISNGTSGGATNDNTYFGYSTPWGYFDFNRFHCHFSPRDWQRLINNNWGFRPKRLSFKLFNIQVKEVTQNEGTKTIANNLTSTIQVFTDSEYQLPYVLGSAHQGCLPPFPADVFTIPQYGYLTLNNGSQAVGRSSFYCLEYFPSQMLRTGNNFQFTYTFEDVPFHSSYAHSQSLDRLMNPLIDQYLYYLSRIQTTGGTANTQTLGFSQGGPNTMANQAKNWLPGPCYRQQRVSTTTGQNNNSNFAWTAGTKYHLNGRNSLANPGIAMATHKDDEERFFPSNGILIFGKQNAARDNADYSDVMPTSEEEIKTTNPVATEEYGIVADNLQQQNTAPQIGTVNSQGALPGMVWQNRDVYLQGPIWAKIPHTDGNFHPSPLMGGFGLKHPPPQILIKNTPVPADPPTTFNQSKLNSFITQYSTGQVSVEIEWELQKENSKRWNPEIQYTSNYYKSTSVDFAVNTEGVYSEPRPIGTRYLTRNL

SEQ ID NO: 3109 - protein, 738 aa, synthetic construct
  REGION 1..738: note = source = /note="Description of Artificial Sequence: Synthetic polypeptide"
MAADGYLPDWLEDNLSEGIREWWALKPGAPKPKANQQKQDDGRGLVLPGYKYLGPFNGLDKGEPVNAADAAALEHDKAYDQQLQAGDNPYLRYNHADAEFQERLQEDTSFGGNLGRAVFQAKKRVLEPLGLVEEGAKTAPGKKRPVEPSPQRSPDSSTGIGKKGQQPARKRLNFGQTGDSESVPDPQPLGEPPAAPSGVGPNTMAAGGGAPMADNNEGADGVGSSSGNWHCDSTWLGDRVITTSTRTWALPTYNNHLYKQISNGTSGGATNDNTYFGYSTPWGYFDFNRFHCHFSPRDWQRLINNNWGFRPKRLSFKLFNIQVKEVTQNEGTKTIANNLTSTIQVFTDSEYQLPYVLGSAHQGCLPPFPADVFTIPQYGYLTLNNGSQAVGRSSFYCLEYFPSQMLRTGNNFQFTYTFEDVPFHSSYAHSQSLDRLMNPLIDQYLYYLSRIQTTGGTANTQTLGFSQGGPNTMANQAKNWLPGPCYRQQRVPTTTGQNNNSNFAWTAGTKYHLNGRNSLANPGIAMATHKDDEERFFPSNGILIFGKQNAARDNADYSDVMPTSEEEIKTTNPVATEEYGIVADNLQQQNTAPQIGTVNSQGALPGMVWQNRDVYLQGPIWAKIPHTDGNFHPSPLMGGFGLKHPPPQILIKNTPVPADPPTTFNQSKLNSFITQYSTGQVSVEIEWELQKENSKRWNPEIQYTSNYYKSTSVDFAVNTEGVYSEPRPIGTRYLTRNL

SEQ ID NO: 3110 - protein, 738 aa, synthetic construct
  REGION 1..738: note = source = /note="Description of Artificial Sequence: Synthetic polypeptide"
MAADGYLPDWLEDNLSEGIREWWALKPGAPKPKANQQKQDDGRGLVLPGYKYLGPFNGLDKGEPVNAADAAALEHDKAYDQQLQAGDNPYLRYNHADAEFQERLQEDTSFGGNLGRAVFQAKKRVLEPLGLVEEGAKTAPGKKRPVEPSPQRSPDSSTGIGKKGQQPARKRLNFGQTGDSESVPDPQPLGEPPAAPSGVGPNTMAAGGGAPMADNNEGADGVGSSSGNWHCDSTWLGDRVITTSTRTWALPTYNNHLYKQISNGTSGGATNDNTYFGYSTPWGYFDFNRFHCHFSPRDWQRLINNNWGFRPKRLSFKLFNIQVKEVTQNEGTKTIANNLTSTIQVFTDSEYQLPYVLGSAHQGCLPPFPADVFTIPQYGYLTLNNGSQAVGRSSFYCLEYFPSQMLRTGNNFQFTYTFEDVPFHSSYAHSQSLDRLMNPLIDQYLYYLSRIQTTGGTANTQTLGFSQGGPNTMANQAKNWLPGPCYRQQRVSTTTGQNNNSNFAWTAGTKYHLNGRNSLANPGIAMATHKDDEERFFPSNGILIFGKQNAARDNADYSDVMPTSEEEIKTTNPVATEEYGIVADNLQQQNTAPQIGTVNSQGALPGMVWQNRDVYLQGPIWAKIPHTDGNFHPSPLMGGFGLKHPPPQILIKNTPVPADPPTTFNQSKLNSFITQYSTGQVSVEIEWELQKENSKRWNPEIQYTSNYYKSTSVDFAVNTEGVYSEPRPIGTRYLTRNL

SEQ ID NO: 3111 - protein, 738 aa, synthetic construct
  REGION 1..738: note = source = /note="Description of Artificial Sequence: Synthetic polypeptide"
MAADGYLPDWLEDNLSEGIREWWALKPGAPKPKANQQKQDDGRGLVLPGYKYLGPFNGLDKGEPVNAADAAALEHDKAYDQQLQAGDNPYLRYNHADAEFQERLQEDTSFGGNLGRAVFQAKKRVLEPLGLVEEGAKTAPGKKRPVEPSPQRSPDSSTGIGKKGQQPARKRLNFGQTGDSESVPDPQPLGEPPAAPSGVGPNTMAAGGGAPMADNNEGADGVGSSSGNWHCDSTWLGDRVITTSTRTWALPTYNNHLYKQISNGTSGGATNDNTYFGYSTPWGYFDFNRFHRHFSPRDWQRLINNNWGFRPKRLSFKLFNIQVKEVTQNEGTKTIANNLTSTIQVFTDSEYQLPYVLGSAHQGCLPPFPADVFTIPQYGYLTLNNGSQAVGRSSFYCLEYFPSQMLRTGNNFQFTYTFEDVPFHSSYAHSQSLDRLMNPLIDQYLYYLSRIQTTGGTANTQTLGFSQGGPNTMANQAKNWLPGPCYRQQRVSTTTGQNNNSNFAWTAGTKYHLNGRNSLANPGIAMATHKDDEERFFPSNGILIFGKQNAARDNADYSDVMPTSEEEIKTTNPVATEEYGIVADNLQQQNTAPQIGTVNSQGALPGMVWQNRDVYLQGPIWAKIPHTDGNFHPSPLMGGFGLKHPPPQILIKNTPVPADPPTTFNQSKLNSFITQYSTGQVSVEIEWELQKENSKRWNPEIQYTSNYYKSTSVDFAVNTEGVYSEPRPIGTRYLTRNL

SEQ ID NO: 3112 - protein, 738 aa, synthetic construct
  REGION 1..738: note = source = /note="Description of Artificial Sequence: Synthetic polypeptide"
MAADGYLPDWLEDNLSEGIREWWALKPGAPKPKANQQKQDDGRGLVLPGYKYLGPFNGLDKGEPVNAADAAALEHDKAYDQQLQAGDNPYLRYNHADAEFQERLQEDTSFGGNLGRAVFQAKKRVLEPLGLVEEGAKTAPGKKRPVEPSPQRSPDSSTGIGKKGQQPARKRLNFGQTGDSESVPDPQPLGEPPAAPSGVGPNTMAAGGGAPMADNNEGADGVGSSSGNWHCDSTWLGDRVITTSTRTWALPTYNNHLYKQISNGTSGGATNDNTYFGYSTPWGYFDFNRFHCHFSPRDWQRLINNNWGFRPKRLSFKLFNIQVKEVTQNEGTKTIANNLTSTIQVFTDSECQLPYVLGSAHQGCLPPFPADVFTIPQYGYLTLNNGSQAVGRSSFYCLEYFPSQMLRTGNNFQFTYTFEDVPFHSSYAHSQSLDRLMNPLIDQYLYYLSRIQTTGGTANTQTLGFSQGGPNTMANQAKNWLPGPCYRQQRVSTTTGQNNNSNFAWTAGTKYHLNGRNSLANPGIAMATHKDDEERFFPSNGILIFGKQNAARDNADYSDVMPTSEEEIKTTNPVATEEYGIVADNLQQQNTAPQIGTVNSQGALPGMVWQNRDVYLQGPIWAKIPHTDGNFHPSPLMGGFGLKHPPPQILIKNTPVPADPPTTFNQSKLNSFITQYSTGQVSVEIEWELQKENSKRWNPEIQYTSNYYKSTSVDFAVNTEGVYSEPRPIGTRYLTRNL

SEQ ID NO: 3113 - protein, 738 aa, synthetic construct
  REGION 1..738: note = source = /note="Description of Artificial Sequence: Synthetic polypeptide"
MAADGYLPDWLEDNLSEGIREWWALKPGAPKPKANQQKQDDGRGLVLPGYKYLGPFNGLDKGEPVNAADAAALEHDKAYDQQLQAGDNPYLRYNHADAEFQERLQEDTSFGGNLGRAVFQAKKRVLEPLGLVEEGAKTAPGKKRPVEPSPQRSPDSSTGIGKKGQQPARKRLNFGQTGDSESVPDPQPLGEPPAAPSGVGPNTMAAGGGAPMADNNEGADGVGSSSGNWHCDSTWLGDRVITTSTRTWALPTYNNHLYKQISNGTSGGATNDNAYFGYSTPWGYFDFNRFHCHFSPRDWQRLINNNWGFRPKRLSFKLFNIQVKEVTQNEGTKTIANNLTSTIQVFTDSEYQLPYVLGSAHQGCLPPFPADVFTIPQYGYLTLNNGSQAVGRSSFYCLEYFPSQMLRTGNNFQFTYTFEDVPFHSSYAHSQSLDRLMNPLIDQYLYYLSRIQTTGGTANTQTLGFSQGGPNTMANQAKNWLPGPCYRQQRVSTTTGQNNNSNFAWTAGTKYHLNGRNSLANPGIAMATHKDDEERFFPSNGILIFGKQNAARDNADYSDVMPTSEEEIKTTNPVATEEYGIVADNLQQQNTAPQIGTVNSQGALPGMVWQNRDVYLQGPIWAKIPHTDGNFHPSPLMGGFGLKHPPPQILIKNTPVPADPPTTFNQSKLNSFITQYSTGQVSVEIEWELQKENSKRWNPEIQYTSNYYKSTSVDFAVNTEGVYSEPRPIGTRYLTRNL

SEQ ID NO: 3114 - protein, 738 aa, synthetic construct
  REGION 1..738: note = source = /note="Description of Artificial Sequence: Synthetic polypeptide"
MAADGYLPDWLEDNLSEGIREWWALKPGAPKPKANQQKQDDGRGLVLPGYKYLGPFNGLDKGEPVNAADAAALEHDKAYDQQLQAGDNPYLRYNHADAEFQERLQEDTSFGGNLGRAVFQAKKRVLEPLGLVEEGAKTAPGKKRPVEPSPQRSPDSSTGIGKKGQQPARKRLNFGQTGDSESVPDPQPLGEPPAAPSGVGPNTMAAGGGAPMADNNEGADGVGSSSGNWHCDSTWLGDRVITTSTRTWALPTYNNHLYKQISNGTSGGATNDNTYFGYSTPWGYFDFNRFHCHFSPRDWQRLINNNWGFRPKRLSFKLFNIQVKEVTQNEGTKTIANNLTSTIQVFTDSEYQLPYVLGSAHQGCLPPFPADVFTIPQYGYLTLNNGSQAVGRSSFYCLEYFPSQMLRTGNNFQFTYTFEDVPFHSSYAHSQSLDRLMNPLIDQYLYYLSRIQTTGGTANTQTLGFSQGGPNTMANQAKNWLPGPCYRQQRVSTTTGQNNNSNFAWTAGTKYHLNGRNSLANPGIAMATHKDDEERFFPSNGILIFGKQNAARGNADYSDVMPTSEEEIKTTNPVATEEYGIVADNLQQQNTAPQIGTVNSQGALPGMVWQNRDVYLQGPIWAKIPHTDGNFHPSPLMGGFGLKHPPPQILIKNTPVPADPPTTFNQSKLNSFITQYSTGQVSVEIEWELQKENSKRWNPEIQYTSNYYKSTSVDFAVNTEGVYSEPRPIGTRYLTRNL

SEQ ID NO: 3115 - protein, 738 aa, synthetic construct
  REGION 1..738: note = source = /note="Description of Artificial Sequence: Synthetic polypeptide"
MAADGYLPDWLEDNLSEGIREWWALKPGAPKPKANQQKQDDGRGLVLPGYKYLGPFNGLDKGEPVNAADAAALEHDKAYDQQLQAGDNPYLRYNHADAEFQERLQEDTSFGGNLGRAVFQAKKRVLEPLGLVEEGAKTAPGKKRPVEPSPQRSPDSSTGIGKKGQQPARKRLNFGQTGDSESVPDPQPLGEPPAAPSGVGPNTMAAGGGAPMADNNEGADGVGSSSGNWHCDSTWLGDRVITTSTRTWALPTYNNHLYKQISNGTSGGATNDNTYFGYSTPWGYFDFNRFHCHFSPRDWQRLINNNWGFRPKRLSFKLFNIQVKEVTQNEGTKTIANNLTSTIQVFTDSEYQLPYVLGSAHQGCLPPFPADVFTIPQYGYLTLNNGSQAVGRSSFYCLEYFPSQMLGTGNNFQFTYTFEDVPFHSSYAHSQSLDRLMNPLIDQYLYYLSRIQTTGGTANTQTLGFSQGGPNTMANQAKNWLPGPCYRQQRVSTTTGQNNNSNFAWTAGTKYHLNGRNSLANPGIAMATHKDDEERFFPSNGILIFGKQNAARDNADYSDVMPTSEEEIKTTNPVATEEYGIVADNLQQQNTAPQIGTVNSQGALPGMVWQNRDVYLQGPIWAKIPHTDGNFHPSPLMGGFGLKHPPPQILIKNTPVPADPPTTFNQSKLNSFITQYSTGQVSVEIEWELQKENSKRWNPEIQYTSNYYKSTSVDFAVNTEGVYSEPRPIGTRYLTRNL

SEQ ID NO: 3116 - protein, 738 aa, synthetic construct
  REGION 1..738: note = source = /note="Description of Artificial Sequence: Synthetic polypeptide"
MAADGYLPDWLEDNLSEGIREWWALKPGAPKPKANQQKQDDGRGLVLPGYKYLGPFNGLDKGEPVNAADAAALEHDKAYDQQLQAGDNPHLRYNHADAEFQERLQEDTSFGGNLGRAVFQAKKRVLEPLGLVEEGAKTAPGKKRPVEPSPQRSPDSSTGIGKKGQQPARKRLNFGQTGDSESVPDPQPLGEPPAAPSGVGPNTMAAGGGAPMADNNEGADGVGSSSGNWHCDSTWLGDRVITTSTRTWALPTYNNHLYKQISNGTSGGATNDNTYFGYSTPWGYFDFNRFHCHFSPRDWQRLINNNWGFRPKRLSFKLFNIQVKEVTQNEGTKTIANNLTSTIQVFTDSEYQLPYVLGSAHQGCLPPFPADVFTIPQYGYLTLNNGSQAVGRSSFYCLEYFPSQMLRTGNNFQFTYTFEDVPFHSSYAHSQSLDRLMNPLIDQYLYYLSRIQTTGGTANTQTLGFSQGGPNTMANQAKNWLPGPCYRQQRVSTTTGQNNNSNFAWTAGTKYHLNGRNSLANPGIAMATHKDDEERFFPSNGILIFGKQNAARDNADYSDVMPTSEEEIKTTNPVATEEYGIVADNLQQQNTAPQIGTVNSQGALPGMVWQNRDVYLQGPIWAKIPHTDGNFHPSPLMGGFGLKHPPPQILIKNTPVPADPPTTFNQSKLNSFITQYSTGQVSVEIEWELQKENSKRWNPEIQYTSNYYKSTSVDFAVNTEGVYSEPRPIGTRYLTRNL

SEQ ID NO: 3117 - protein, 738 aa, synthetic construct
  REGION 1..738: note = source = /note="Description of Artificial Sequence: Synthetic polypeptide"
MAADGYLPDWLEDNLSEGIREWWALKPGAPKPKANQQKQDDGRGLVLPGYKYLGPFNGLDKGEPVNAADAAALEHDKAYDQQLQAGDNPYLRYNHADAEFQERLQEDTSFGGNLGRAVFQAKKRVLEPLGLVEEGAKTAPGKKRPVEPSPQRSPDSSTGIGKKGQQPARKRLNFGQTGDSESVPDPQPLGEPPAAPSGVGPNTMAAGGGAPMADNNEGADGVGSSSGNWHCDSTWLGDRVITTSTRTWALPTYNNHLYKQISNGTSGGATNDNTYFGYSTPWGYFDFNRFHCHFSPRDWQRLINNNWGFRPKRLSFKLFNIQVKEVTQNEGTKTIANNLTSTIQVFTDSEYQLPYVLGPAHQGCLPPFPADVFTIPQYGYLTLNNGSQAVGRSSFYCLEYFPSQMLRTGNNFQFTYTFEDVPFHSSYAHSQSLDRLMNPLIDQYLYYLSRIQTTGGTANTQTLGFSQGGPNTMANQAKNWLPGPCYRQQRVSTTTGQNNNSNFAWTAGTKYHLNGRNSLANPGIAMATHKDDEERFFPSNGILIFGKQNAARDNADYSDVMPTSEEEIKTTNPVATEEYGIVADNLQQQNTAPQIGTVNSQGALPGMVWQNRDVYLQGPIWAKIPHTDGNFHPSPLMGGFGLKHPPPQILIKNTPVPADPPTTFNQSKLNSFITQYSTGQVSVEIEWELQKENSKRWNPEIQYTSNYYKSTSVDFAVNTEGVYSEPRPIGTRYLTRNL

SEQ ID NO: 3118 - protein, 738 aa, synthetic construct
  REGION 1..738: note = source = /note="Description of Artificial Sequence: Synthetic polypeptide"
MAADGYLPDWLEDNLSEGIREWWALKPGAPKPKANQQKQDDGRGLVLPGYKYLGPFNGLDKGEPVNAADAAALEHDKAYDQQLQAGDNPYLRYNHADAEFQERLQEDTSFGGNLGRAVFQAKKRVLEPLGLVGEGAKTAPGKKRPVEPSPQRSPDSSTGIGKKGQQPARKRLNFGQTGDSESVPDPQPLGEPPAAPSGVGPNTMAAGGGAPMADNNEGADGVGSSSGNWHCDSTWLGDRVITTSTRTWALPTYNNHLYKQISNGTSGGATNDNTYFGYSTPWGYFDFNRFHCHFSPRDWQRLINNNWGFRPKRLSFKLFNIQVKEVTQNEGTKTIANNLTSTIQVFTDSEYQLPYVLGSAHQGCLPPFPADVFTIPQYGYLTLNNGSQAVGRSSFYCLEYFPSQMLRTGNNFQFTYTFEDVPFHSSYAHSQSLDRLMNPLIDQYLYYLSRIQTTGGTANTQTLGFSQGGPNTMANQAKNWLPGPCYRQQRVSTTTGQNNNSNFAWTAGTKYHLNGRNSLANPGIAMATHKDDEERFFPSNGILIFGKQNAARDNADYSDVMPTSEEEIKTTNPVATEEYGIVADNLQQQNTAPQIGTVNSQGALPGMVWQNRDVYLQGPIWAKIPHTDGNFHPSPLMGGFGLKHPPPQILIKNTPVPADPPTTFNQSKLNSFITQYSTGQVSVEIEWELQKENSKRWNPEIQYTSNYYKSTSVDFAVNTEGVYSEPRPIGTRYLTRNL

SEQ ID NO: 3119 - protein, 738 aa, synthetic construct
  REGION 1..738: note = source = /note="Description of Artificial Sequence: Synthetic polypeptide"
MAADGYLPDWLEDNLSEGIREWWALKPGAPKPKANQQKQDDGRGLVLPGYKYLGPFNGLDKGEPVNAADAAALEHDKAYDQQLQAGDNPYLRYNHADAEFQERLQEDTSFGGNLGRAVFQAKKRVLEPLGLVEEGAKTAPGKKRPVEPSPQRSPDSSTGIGKKGQQPARKRLNFGQTGDSESVPDPQPLGEPPAAPSGVGPNTMAAGGGAPMADNNEGADGVGSSSGNWHCDSTWLGDRVITTSTRTWALPTYNNHLYKQISNGTSGGATNDNTYFGYSTPWGYFDFNRFHCHFSPRDWQRLINNNWGFRPKRLSFKLFNIQVKEVTQNEGTKTIANNLTSTIQVFTDSEYQLPYVLGSAHQGCLPPFPADVFTIPQYGYLTLNNGSQAVGRSSFYCLEYFPSQMLRTGNNFQFTYTFEDVPFHSSYAHSQSLDRLMNPLIDQYLYYLSRIQTTGGTANTQTLGFSQGGPNTMANQAKNWLPGPCYRQQRVSTTTGQNNNSNFAWTAGTKYHLNGRNSLANPGIAMATHKDDEERFFPSNGILIFGKQNAARDNADYSDVMPTSEEEIKTTNPVATEEYGIVADNLQQQNTAPQIGTVNSQGALPGMVWQNRDVYLQGPIWAKIPHTDGNFHPSPLMGGFGLKHPPPQILIKNTPVPADPPTTFNQSKLNSFITQYSTGQVSVEIEWELQKESSKRWNPEIQYTSNYYKSTSVDFAVNTEGVYSEPRPIGTRYLTRNL

SEQ ID NO: 3120 - protein, 738 aa, synthetic construct
  REGION 1..738: note = source = /note="Description of Artificial Sequence: Synthetic polypeptide"
MAADGYLPDWLEDNLSEGIREWWALKPGAPKPKANQQKQDDGRGLVLPGYKYLGPFNGLDKGEPVNAADAAALEHDKAYDQQLQAGDNPYLRYNHADAEFQERLQEDTSFGGNLGRAVFQAKKRVLEPLGLVEEGAKTAPGKKRPVEPSPQRSPDSSTGIGKKGQQPARKRLNFGQTGDSESVPDPQPLGEPPAAPSGVGPNTMAAGGGAPMADNNEGADGVGSSSGNWHCDSTWLGDRVITTSTRTWALPTYNNHLYKQISNGTSGGATNDNTYFGYSTPWGYFDFNRFHCHFSPRDWQRLINNNWGFRPKRLSFKLFNIQVKEVTQNEGTKTIANNLTSTIQVFTDSEYQLPYVLGSAHQGCLPPFPADVFTIPQYGYLTLNNGSQAVGRSSFYCLEYFPSQMLRTGNNFQFTYTFEDVPFHSSYAHSQSLDRLMNPLIDQYLYYLSRIQTTGGTANTQTLGFSQGGPNTMANQAKNWLPGPCYRQQRVSTTTGQNNNSNFAWTAGTKYHLNGRNSLANPGIAMATHKDDEERFFPSNGILIFGKQNAARDNADYSDVMPASEEEIKTTNPVATEEYGIVADNLQQQNTAPQIGTVNSQGALPGMVWQNRDVYLQGPIWAKIPHTDGNFHPSPLMGGFGLKHPPPQILIKNTPVPADPPTTFNQSKLNSFITQYSTGQVSVEIEWELQKENSKRWNPEIQYTSNYYKSTSVDFAVNTEGVYSEPRPIGTRYLTRNL

SEQ ID NO: 3121 - protein, 738 aa, synthetic construct
  REGION 1..738: note = source = /note="Description of Artificial Sequence: Synthetic polypeptide"
MAADGYLPDWLEDNLSEGIREWWALKPGAPKPKANQQKQDDGRGLVLPGYKYLGPFNGLDKGEPVNAADAAALEHDKAYDQQLQAGDNPYLRYNHADAEFQERLQEDTSFGGNLGRAVFQAKKRVLEPLGLVEEGAKTAPGKKRPVEPSPQRSPDSSTGIGKKGQQPARKRLNFGQTGDSESVPDPQPLGEPPAAPSGVGPNTMAAGGGAPMADNNEGADGVGSSSGNWHCDSTWLGDRVITTSTRTWALPTYNNHLYKQISNGTSGGATNDNTYFGYSTPWGYFDFNRFHCHFSPRDWQRLINNNWGFRPKRLSFKLFNIQVKEVTQNEGTKTIANNLTSTIQVFTDSEYQLPYVLGSAHQGCLPPFPADVLTIPQYGYLTLNNGSQAVGRSSFYCLEYFPSQMLRTGNNFQFTYTFEDVPFHSSYAHSQSLDRLMNPLIDQYLYYLSRIQTTGGTANTQTLGFSQGGPNTMANQAKNWLPGPCYRQQRVSTTTGQNNNSNFAWTAGTKYHLNGRNSLANPGIAMATHKDDEERFFPSNGILIFGKQNAARDNADYSDVMPTSEEEIKTTNPVATEEYGIVADNLQQQNTAPQIGTVNSQGALPGMVWQNRDVYLQGPIWAKIPHTDGNFHPSPLMGGFGLKHPPPQILIKNTPVPADPPTTFNQSKLNSFITQYSTGQVSVEIEWELQKENSKRWNPEIQYTSNYYKSTSVDFAVNTEGVYSEPRPIGTRYLTRNL

SEQ ID NO: 3122 - protein, 738 aa, synthetic construct
  REGION 1..738: note = source = /note="Description of Artificial Sequence: Synthetic polypeptide"
MAADGYLPDWLEDNLSEGIREWWALKPGAPKPKANQQKQDDGRGLVLPGYKYLGPFNGLDKGEPVNAADAAALEHDKAYDQQLQAGDNPYLRYNHADAEFQERLQEDTSFGGNLGRAVFQAKKRVLEPLGLVEEGAKTAPGKKRPVEPSPQRSPDSSTGIGKKGQQPARKRLNFGQTGDSESVPDPQPLGEPPAAPSGVGPNTMAAGGGAPMADNNEGADGVGSSSGNWHCDSTWLGDRVITTSTRTWALPTYNNHLYKQISNGTSGGATNDNTYFGYSTPWGYFDFNRFHCHFSPRDWQRLINNNWGFRPKRLSFKLFNIQVKEVTQNEGTKTIANNLTSTIRVFTDSEYQLPYVLGSAHQGCLPPFPADVFTIPQYGYLTLNNGSQAVGRSSFYCLEYFPSQMLRTGNNFQFTYTFEDVPFHSSYAHSQSLDRLMNPLIDQYLYYLSRIQTTGGTANTQTLGFSQGGPNTMANQAKNWLPGPCYRQQRVSTTTGQNNNSNFAWTAGTKYHLNGRNSLANPGIAMATHKDDEERFFPSNGILIFGKQNAARDNADYSDVMPTSEEEIKTTNPVATEEYGIVADNLQQQNTAPQIGTVNSQGALPGMVWQNRDVYLQGPIWAKIPHTDGNFHPSPLMGGFGLKHPPPQILIKNTPVPADPPTTFNQSKLNSFITQYSTGQVSVEIEWELQKENSKRWNPEIQYTSNYYKSTSVDFAVNTEGVYSEPRPIGTRYLTRNL

SEQ ID NO: 3123 - protein, 738 aa, synthetic construct
  REGION 1..738: note = source = /note="Description of Artificial Sequence: Synthetic polypeptide"
MAADGYLPDWLEDNLSEGIREWWALKPGAPKPKANQQKQDDGRGLVLPGYKYLGPFNGLDKGEPVNAADAAALEHDKAYDQQLQAGDNPYLRYNHADAEFQERLQEDTSFGGNLGRAVFQAKKRVLEPLGLVEEGAKTAPGKKRPVEPSPQRSPDSSTGIGKKGQQPARKRLNFGQTGDSESVPDPQPLGEPPAAPSGVGPNTMAAGGGAPMADNNEGADGVGSSSGNWHCDSTWLGDRVITTSTRTWALPTYNNHLYKQISNGTSGGATNDNTYFGYSTPWGYFDFNRFHCHFSPRDWRRLINNNWGFRPKRLSFKLFNIQVKEVTQNEGTKTIANNLTSTIQVFTDSEYQLPYVLGSAHQGCLPPFPADVFTIPQYGYLTLNNGSQAVGRSSFYCLEYFPSQMLRTGNNFQFTYTFEDVPFHSSYAHSQSLDRLMNPLIDQYLYYLSRIQTTGGTANTQTLGFSQGGPNTMANQAKNWLPGPCYRQQRVSTTTGQNNNSNFAWTAGTKYHLNGRNSLANPGIAMATHKDDEERFFPSNGILIFGKQNAARDNADYSDVMPTSEEEIKTTNPVATEEYGIVADNLQQQNTAPQIGTVNSQGALPGMVWQNRDVYLQGPIWAKIPHTDGNFHPSPLMGGFGLKHPPPQILIKNTPVPADPPTTFNQSKLNSFITQYSTGQVSVEIEWELQKENSKRWNPEIQYTSNYYKSTSVDFAVNTEGVYSEPRPIGTRYLTRNL

SEQ ID NO: 3124 - protein, 738 aa, synthetic construct
  REGION 1..738: note = source = /note="Description of Artificial Sequence: Synthetic polypeptide"
MAADGYLPDWLEDNLSEGIREWWALKPGAPKPKANQQKQDDGRGLVLPGYKYLGPFNGLDKGEPVNAADAAALEHDKAYDQQLQAGDNPYLRYNHADAEFQERLQEDTSFGGNLGRAVFQAKKRVLEPLGLVEEGAKTAPGKKRPVEPSPQRSPDSSTGIGKKGQQPARKRLNFGQTGDSESVPDPQPLGEPPAAPSGVGPNTMAAGGGAPMADNNEGADGVGSSSGNWHCDSTWLGDRVITTSTRTWALPTYNNHLYKQISNGTSGGATNDNTYFGYSTPWGYFDFNRFHCHFSPRDWQRLINNNWGFRPKRLSFKLFNIQVKEVTQNEGTKTIANNLTSTIQVFTDSEYQLPYVLGSAHQGCLPPFPADVFMIPQYGYLTLNNGSQAVGRSSFYCLEYFPSQMLRTGNNFQFTYTFEDVPFHSSYAHSQSLDRLMNPLIDQYLYYLSRTQTTGGTASTQTLGFSQGGPNTMANQAKNWLPGPCYRQQRVSTTTGQNNNSNFAWTAGTKYHLNGRNSLANPGIAMATHKDDEERFFPSNGILIFGKQNAARDNADYSDVMLTSEEEIKTTNPVATEEYGIVADNLQQQNTAPQIGTVNSQGALPGMVWQNRDVYLQGPIWAKIPHTDGNFHPSPLMGGFGLKHPPPQILIKNTPVPADPPTTFNQSKLNSFITQYSTGQVSVEIEWELQKENSKRWNPEIQYTSNYYKSTSVDFAVNTEGVYSEPRPIGTRYLTRNL

SEQ ID NO: 3125 - protein, 738 aa, synthetic construct; identical to SEQ ID NO: 116
  REGION 1..738: note = source = /note="Description of Artificial Sequence: Synthetic polypeptide"

SEQ ID NO: 3126 - protein, 738 aa, synthetic construct
  REGION 1..738: note = source = /note="Description of Artificial Sequence: Synthetic polypeptide"
MAADGYLPDWLEDNLSEGIREWWALKPGAPKPKANQQKQDDGRGQVLPGYKYLGPFNGLDKGEPVNAADAAALEHDKAYDQQLQAGDNPYLRYNHADAEFQERLQEDTSFGGNLGRAVFQAKKRVLEPLGLVEEGAKTAPGKKRPVEPSPQRSPDSSTGIGKKGQQPARKRLNFGQTGDSESVPDPQPLGEPPAAPSGVGPNTMAAGGGAPMADNNEGADGVGSSSGNWHCDSTWLGDRVITTSTRTWALPTYNNHLYKQISNGTSGGATNDNTYFGYSTPWGYFDFNRFHCHFSPRDWQRLINNNWGFRPKRLSFKLFNIQVKEVTQNEGTKTIANNLTSTIQVFTDSEYQLPYVLGSAHQGCLPPFPADVFMIPQYGYLTLNNGSQAVGRSSFYCLEYFPSQMLRTGNNFQFTYTFEDVPFHSSYAHSQSLDRLMNPLIDQYLYYLSRTQTTGGTANTQTLGFSQGGPNTMANQAKNWLPGPCYRQQRVSTTTGQNNNSNFAWTAGTKYHLNGRNSLANPGIAMATHKDDEERFFPSNGILIFGKQNAARDNADYSDVMLTSEEEIKTTNPVATEEYGIVADNLQQQNTAPQIGTVNSQGALPGMVWQNRDVYLQGPVWAKIPHTDGNFHPSPLMGGFGLKHPPPQILIKNTPVPADPPTTFNQSKLNSFITQYSTGQVSVEIEWELQKENSKRWNPEIQYTSNYYKSTSVDFAVNTEGVYSEPRPIGTRYLTRNL

SEQ ID NO: 3127 - protein, 738 aa, synthetic construct
  REGION 1..738: note = source = /note="Description of Artificial Sequence: Synthetic polypeptide"
MAADGYLPDWLEDNLSEGIREWWALKPGAPKPKANQQKQDDGRGLVLPGYKYLGPFNGLDKGEPVNAADAAALEHDKAYDQQLQAGDNPYLRYNHADAEFQERLQEDTSFGGNLGRAVFQAKKRVLEPLGLVEEGAKTAPGKKRPVEPSPQRSPDSSTGIGKKGQQPARKRLNFGQTGDSESVPDPQPLGEPPAAPSGVGPNTMAAGGGAPMADNNEGADGVGSSSGNWHCDSTWLGDRVITTSTRTWALPTYNNHLYKQISNGTSGGATNDNTYFGYSTPWGYFDFNRFHCHFSPRDWQRLINSNWGFRPKRLSFKLFNIQVKEVTQNEGTKTIANNLTSTIQVFTDSEYQLPYVLGSAHQGCLPPFPADVFMIPQYGYLTLNNGSQAVGRSSFYCLEYFPSQMLRTGNNFQFTYTFEDVPFHSSYAHSQSLDRLMNPLIDQYLYYLSRTQTTGGTANTQTLGFSQGGPNTMANQAKNWLPGPCYRQQRVSTTTGQNNNSNFAWTAGTKYHLNGRNSLANPGIAMATHKDDEERFFPSNGILIFGKQNAARDNADYSDVMLTSEEEIKTTNPVATEEYGIVADNLQQQNTAPQIGTVNSQGALPGMVWQNRDVYLQGPIWAKIPHTDGNFHPSPLMGGFGLKHPPPQILIKNTPVPADPPTTFNQSKLNSFITQYSTGQVSVEIEWELQKENSKRWNPEIQYTSNYYKSTSVDFAVNTEGVYSEPRPIGTRYLTRNL

SEQ ID NO: 3128 - protein, 738 aa, synthetic construct
  REGION 1..738: note = source = /note="Description of Artificial Sequence: Synthetic polypeptide"
MAADGYLPDWLEDNLSEGIREWWALKPGAPKPKANQQKQDDGRGLVLPGYKYLGPFNGLDKGEPVNAADAAALEHDKAYDQQLQAGDNPYLRYNHADAEFQERLQEDTSFGGNLGRAVFQAKKRVLEPLGLVEEGAKTAPGKKRPVEPSPQRSPDSSTGIGKKGQQPARKRLNFGQTGDSESVPDPQPLGEPPAAPSGVGPNTMAAGGGAPMADNNEGADGVGSSSGNWHCDSTWLGDRVITTSTRTWALPTYNNHLYKQISNGTSGGATNDNTYFGYSTPWGYFDFNRFHCHFSPRDWQRLINNNWGFRPKRLSFKLFNIQVKEVTQNEGTKTIANNLTSTIQVFTDSEYQLPYVLGSAHQGCLPPFPADVFTIPQYGYLTLNNGSQAVGRSSFYCLEYFPSQMLRTGNNFQFTYTFEDVPFHSSYAHSQSLDRLMNPLIDQYLYYLSRTQTTGGTANTQTLGFSQGGPNTMANQAKNWLPGPCYRQQRVSTTTGQNNNSNFAWTAGTKYHLNGRNSLANPGIAMATHKDDEERFFPSNGILIFGKQNAARDNADYSDVMLTSEEEIKTTNPVATEEYGIVADNLQQQNTAPQIGTVNSQGALPGMVWQNRDVYLQGPIWAKIPHTDGNFHPSPLMGGFGLKHPPPQILIKNTPVPADPPTTFNQSKLNSFITQYSTGQVSVEIEWELQKENSKRWNPEIQYTSNYYKSTSVDFAVNTEGVYSEPRPIGTRYLTRNL

SEQ ID NO: 3129 - protein, 738 aa, synthetic construct
  REGION 1..738: note = source = /note="Description of Artificial Sequence: Synthetic polypeptide"
MAADGYLPDWLEDNLSEGIREWWALKPGAPKPKANQQKQDDGRGLVLPGYKYLGPFNGLDKGEPVNAADAAALEHDKAYDQQLQAGDNPYLRYNHADAEFQERLQEDTSFGGNLGRAVFQAKKRVLEPLGLVEEGAKTAPGKKRPVEPSPQRSPDSSTGIGKKGQQPARKRLNFGQTGDSESVPDPQPLGEPPAAPSGVGPNTMAAGGGAPMADNNEGADGVGSSSGNWHCDSTWLGDRVITTSTRTWALPTYNNHLYKQISNGTSGGATNDNTYFGYSTPWGYFDFNRFHCHFSPRDWQRLIDNNWGFRPKRLSFKLFNIQVKEVTQNEGTKTIANNLTSTIQVFTDSEYQLPYVLGSAHQGCLPPFPADVFMIPQYGYLTLNNGSQAVGRSSFYCLEYFPSQMLRTGNNFQFTYTFEDVPFHSSYAHSQSLDRLMNPLIDQYLYYLSRTQTTGGTANTQTLGFSQGGPNTMANQAKNWLPGPCYRQQRVSTTTGQNNNSNFAWTAGTKYHLNGRNSLANPGIAMATHKDDEERFFPSNGILIFGKQNAARDNADYSDVMLTSEEEIKTTNPVATEEYGIVADNLQQQNTAPQIGTVNSQGALPGMVWQNRDVYLQGPIWAKIPHTDGNFHPSPLMGGFGLKHPPPQILIKNTPVPADPPTTFNQSKLNSFITQYSTGQVSVEIEWELQKENSKRWNPEIQYTSNYYKSTSVDFAVNTEGVYSEPRPIGTRYLTRNL

SEQ ID NO: 3130 - protein, 738 aa, synthetic construct
  REGION 1..738: note = source = /note="Description of Artificial Sequence: Synthetic polypeptide"
MAADGYLPDWLEDNLSEGIREWWALKPGAPKPKANQQKQDDGRGLVLPGYKYLGPFNGLDKGEPVNAADAAALEHDKAYDQQLQAGDNPYLRYNHADAEFQERLQEDTSFGGNLGRAVFQAKKRVLEPLGLVEEGAKTAPGKKRPVEPSPQRSPDSSTGIGKKGQQPARKRLNFGQTGDSESVPDPQPLGEPPAAPSGVGPNTMAAGGGAPMADNNEGADGVGSSSGNWHCDSTWLGDRVITTSTRTWALPAYNNHLYKQISNGTSGGATNDNTYFGYSTPWGYFDFNRFHCHFSPRDWQRLINNNWGFRPKRLSFKLFNIQVKEVTQNEGTKTIANNLTSTIQVFTDSEYQLPYVLGSAHQGCLPPFPADVFTIPQYGYLTLNNGSQAVGRSSFYCLEYFPSQMLRTGNNFQFTYTFEDVPFHSSYAHSQSLDRLMNPLIDQYLYYLSRTQTTGGTANTQTLGFSQGGPNTMANQAKNWLPGPCYRQQRVSTTTGQNNNSNFAWTAGTKYHLNGRNSLANPGIAMATHKDDEERFFPSNGILIFGKQNAARDNADYSDVMLTSEEEIKTTNPVATEEYGIVADNLQQQNTAPQIGTVNSQGALPGMVWQNRDVYLQGPIWAKIPHTDGNFHPSPLMGGFGLKHPPPQILIKNTPVPADPPTTFNQSKLNSFITQYSTGQVSVEIEWELQKENSKRWNPEIQYTSNYYKSTNVDFAVNTEGVYSEPRPIGTRYLTRNL

SEQ ID NO: 3131 - protein, 738 aa, synthetic construct
  REGION 1..738: note = source = /note="Description of Artificial Sequence: Synthetic polypeptide"
MAADGYLPDWLEDNLSEGIREWWALKPGAPKPKANQQKQDDGRGLVLPGYKYLGPFNGLDKGEPVNAADAAALEHDKAYDQQLQAGDNPYLRYNHADAEFQERLQEDTSFGGNLGRAVFQAKKRVLEPLGLVEEGAKTAPGKKRPVEPSPQRSPDSSTGIGKKGQQPARKRLNFGQTGDSESVPDPQPLGEPPAAPSGVGPNTMAAGGGAPMADNNEGADGVGSSSGNWHCDSTWLGDRVITTSTRTWALPTYNNHLYKQISNGTSGGATNDNTYFGYSTPWGYFDFNRFHCHFSPRDWQRLINNNWGFRPKRLSFKLFNIQVKEVTQNEGTKTIANNLTSTIQVFTDSEYQLPYVLGSAHQGCLPPFPADVFMIPQYGYLTLNDGSQAVGRSSFYCLEYFPSQMLRTGNNFQFTYTFEDVPFHSSYAHSQSLDRLMNPLIDQYLYYLSRTQTTGGTANTQTLGFSQGGPNTMANQAKNWLPGPCYRQQRVSTTTGQNNNSNFAWTAGTKYHLNGRNSLANPGIAMATHKDDEERFFPSNGILIFGKQNAARDNADYSDVMLTSEEEIKTTNPVATEEYGIVADNLQQQNTAPQIGTVNSQGALPGMVWQNRDVYLQGPIWAKIPHTDGNFHPSPLMGGFGLKHPPPQILIKNTPVPADPPTTFNQSKLNSFITQYSTGQVSVEIEWELQKENSKRWNPEIQYTSNYYKSTSVDFAVNTEGVYSEPRPIGTRYLTRNL

SEQ ID NO: 3132 - protein, 738 aa, synthetic construct
  REGION 1..738: note = source = /note="Description of Artificial Sequence: Synthetic polypeptide"
MAADGYLPDWLEDNLSEGIREWWALKPGAPKPKANQQKQDDGRGLVLPGYKYLGPFNGLDKGEPVNAADAAALEHDKAYDQQLQAGDNPYLRYNHADAEFQERLQEDTSFGGNLGRAVFQAKKRVLEPLGLVEEGAKTAPGKKRPVEPSPQRSPDSSTGIGKKGQQPARKRLNFGQTGDSESVPDPQPLGEPPAAPSGVGPNTMAAGGGAPMADNNEGADGVGSSSGNWHCDSTWLGDRVITTSTRTWAQPTYNNHLYKQISNGTSGGATNDNTYFGYSTPWGYFDFNRFHCHFSPRDWQRLINNNWGFRPKRLSFKLFNIQVKEVTQNEGTKTIANNLTSTIQVFTDSEYQLPYVLGSAHQGCLPPFPADVFMIPQYGYLTLNNGSQAVGRSSFYCLEYFPSQMLRTGNNFQFTYTFEDVPFHSSYAHSQSLDRLMNPLIDQYLYYLSRTQTTGGTANTQTLGFSQGGPNTMANQAKNWLPGPCYRQQRVSTTTGQNNNSNFAWTAGTKYHLNGRNSLANPGIAMATHKDDEERFFPSNGILIFGKQNAARDNADYSDVMLTSEEEIKTTNPVATEEYGIVADNLQQQNTAPQIGTVNSQGALPGMVWQNRDVYLQGPIWAKIPHTDGNFHPSPLMGGFGLKHPPPQILIKNTPVPADPPTTFNQSKLNSFITQYSTGQVSVEIEWELQKENSKRWNPEIQYTSNYYKSTSVDFAVNTEGVYSEPRPIGTRYLTRNL

SEQ ID NO: 3133 - protein, 735 aa, synthetic construct
  REGION 1..735: note = source = /note="Description of Artificial Sequence: Synthetic polypeptide"
MAADGYLPDWLEDTLSEGIRQWWKLKPGPPPPKPAERHKDDSRGLVLPGYKYLGPFNGLDKGEPVNEADAAALEHDKAYDRQLDSGDNPYLKYNHADAEFQERLKEDTSFGGNLGRAVFQAKKRVLEPLGLVEEPVKTAPGKKRPVEHSPAEPDSSSGTGKAGQQPARKRLNFGQTGDADSVPDPQPLGQPPAAPSGLGTNTMATGSGAPMADNNEGADGVGNSSGNWHCDSTWMGDRVITTSTRTWALPTYNNHLYKQISSQSGASNDNHYFGYSTPWGYFDFNRFHCHFSPRDWQRLINNNWGFRPKRLSFKLFNIQVKEVTQNDGTTTIANNLTSTVQVFTDSEYQLPYVLGSAHQGCLPPFPADVFMVPQYGYLTLNNGSQAVGRSSFYCLEYFPSQMLRTGNNFTFSYTFEDVPFHSSYAHSQSLDRLMNPLIDQYLYYLSKTNAPSGTTTMSRLQFSQAGASDIRDQSRNWLPGPCYRQQRVSKTAADNNNSDYSWTGATKYHLNGRDSLVNPGPAMASHKDDEEKYFPQSGVLIFGKQGSNKTNVDIEKVMITDEEEIRTTNPVATEQYGAVSTNLQSGNTQAATSDVNTQGVLPGMVWQDRDVYLQGPIWAKIPHTDGHFHPSPLMGGFGLKHPPPQILIKNTPVPANPSTTFSAAKFASFITQYSTGQVSVEIEWELQKENSKRWNPEIQYTSNYNKSVNVDFTVDTNGVYSEPRPIGTRYLTRNL

SEQ ID NO: 3134 - protein, 735 aa, synthetic construct
  REGION 1..735: note = source = /note="Description of Artificial Sequence: Synthetic polypeptide"
MAADGYLPDWLEDTLSEGIRQWWKLKPGPPPPKPAERHKDDSRGLVLPGYKYLGPFNGLDKGEPVNEADAAALEHDKAYDRQLDSGDNPYLKYNHADAEFQERLKEDTSFGGNLGRAVFQAKKRVLEPLGLVEEPVKTAPGKKRPVEHSPAEPDSSSGTGKAGQQPARKRLNFGQTGDADSVPDPQPLGQPPAAPSGLGTNTMATGSGAPMADNNEGADGVGNSSGNWHCDSTWMGDRVITTSTRTWALPTYNNHLYKQISSQSGASNDNHYFGYSTPWGYFDFNRFHCHFSPRDWQRLINNNWGFRPKRLSFKLFNIQVKEVTQNDGTTTIANNLTSTVQVFTDSEYQLPYVLGSAHQGCLPPFPADVFMVPQYGYLTLNNGSQAVGRSSFYCLEYFPSQMLRTGNNFTFSYTFEDVPFHSSYAHSQSLDRLMNPLIDQYLYYLSKTNAPSGTTTMSRLQFSQAGASDIRDQSRNWLPGPCYRQQRVSKTAADNNNSDYSWTGATKYHLNGRDSLVNPGPAMASHKDDEEKIFPQSGVLIFGKQGSNKTNVDIEKVMITDEEEIRTTNPVATEQYGAVSTNLQSGNTQAATSDVNTQGVLPGMVWQDRDVYLQGPIWAKIPHTDGHFHPSPLMGGFGLKHPPPQILIKNTPVPANPSTTFSAAKFASFITQYSTGQVSVEIEWELQKENSKRWNPEIQYTSNYNKSVNVDFTVDTNGVYSEPRPIGTRYLTRNL

SEQ ID NO: 3135 - protein, 735 aa, synthetic construct
  REGION 1..735: note = source = /note="Description of Artificial Sequence: Synthetic polypeptide"
MAADGYLPDWLEDTLSEGIRQWWKLKPGPPPPKPAERHKDDSRGLVLPGYKYLGPFNGLDKGEPVNEADAAALEHDKAYDRQLDSGDNPYLKYNHADAEFQERLKEDTSFGGNLGRAVFQAKKRVLEPLGLVEEPVKTAPGKKRPVEHSPAEPDSSSGTGKAGQQPARKRLNFGQTGDADSVPDPQPLGQPPAAPSGLGTNTMATGSGAPMADNNEGADGVGNSSGNWHCDSTWMGDRVITTSTRTWALPTYNNHLYKQISSQSGASNDNHYFGYSTPWGYFDFNRFHCHFSPRDWQRLINNNWGFRPKRLSFKLFNIQVKEVTQNDGTTTIANNLTSTVQVFTDSEYQLPYALGSAHQGCLPPFPADVFMVPQYGYLTLNNGSQAVGRSSFYCLEYFPSQMLRTGNNFTFSYTFEDVPFHSSYAHSQSLDRLMNPLIDQYLYYLSKTNAPSGTTTMSRLQFSQAGASDIRDQSRNWLPGPCYRQQRVSKTAADNNNSDYSWTGATKYHPNGRDSLVNPGPAMASHKDDEEKYFPQSGVLIFGKQGSNKTNVDIEKVMITDEEEIRTTNPVATEQYGAVSTNLQSGNTQAATSDVNTQGVLPGMVWQDRDVYLQGPIWAKIPHTDGHSHPSPLMGGFGLKHPPPQILIKNTPVPANPSTTFSAAKFASFITQYSTGQVSVEIEWELQKENSKRWNPEIQYTSNYNKSVNVDFTVDTNGVYSEPRPIGTRYLTRNL

SEQ ID NO: 3136 - protein, 734 aa, synthetic construct
  REGION 1..734: note = source = /note="Description of Artificial Sequence: Synthetic polypeptide"
MAADGYLPDWLEDTLSEGIRQWWKLKPGPPPPKPAERHKDDSRGLVLPGYKYLGPFNGLDKGEPVNEADAAALEHDKAYDRQLDSGDNPYLKYNHADAEFQERLKEDTSFGGNLGRAVFQAKKRVLEPLGLVEEPVKTAPGKKRPVEHSPAEPDSSSGTGKAGQQPARKRLNFGQTGDADSVPDPQPLGQPPAAPSGLGTNTMATGSGAPMADNNEGADGVGNSSGNWHCDSTWMGDRVITTSTRTWALPTYNNHLYKQISSQSGASNDNHYFGYSTPWGYFDFNRFHCHFSPRDWQRLINNNWGFRPKRLSFKLFNIQVKEVTQNDGTTTIANNLTSTVQVFTDSEYQLPYVLGSAHQGCLPPFPADVFMVPQYGYLTLNNGSQAVGRSSFYCLEYFPSQMLRTGNNFTFSYTFEDVPFHSSYAHSQSLDRLMNPLIDQYLYYLSKTNAPSGTTTMSRLQFSQAGASDIRDQSRNWLPGPCYRQQRVSKTAADNNSDYSWTGATKYHLNGRDSLVNPGPAMASHKDDEEKYFPQSGVLIFGKQGSNKTNVDIEKVMITDEEEIRTTNPVATEQYGAVSTNLQSGNTQAATSDVNTQGVLPGMVWQDRDVYLQGPIWAKIPHTDGHFHPSPLMGGFGLKHPPPQILIKNTPVPANPSTTFSAAKFASFITQYSTGQVSVEIEWELQKENSKRWNPEIQYTSNYNKSVNVDFTVDTNGVYSEPRPIGTRYLTRNL

SEQ ID NO: 3137 - protein, 735 aa, synthetic construct
  REGION 1..735: note = source = /note="Description of Artificial Sequence: Synthetic polypeptide"
MAADGYLPDWLEDTLSEGIRQWWKLKPGPPPPKPAERHKDDSRGLVLPGYKYLGPFNGLDKGEPVNEADAAALEHDKAYDRQLDSGDNPYLKYNHADAEFQERLKEDTSFGGNLARAVFQAKKRVLEPLGLVEEPVKTAPGKKRPVEHSPAEPDSSSGTGKSGQQPARKRLNFGQTGDADSVPDPQPLGQPPAAPSGLGTNTMASGSGAPMADNNEGADGVGNSSGNWHCDSTWMGDRVITTSTRTWALPTYNNHLYKQISSQSGASNDNHYFGYSTPWGYFDFNRFHCHFSPRDWQRLINNNWGFRPKRLNFKLFNIQVKEVTQNDGTTTIANNLTSTVQVFTDSEYQLPYVLGSAHQGCLPPFPADVFMVPQYGYLTLNNGSQAVGRSSFYCLEYFPSQMLRTGNNFTFSYTFEDVPFHSSYAHSQSLDRLMNPLIDQYLYYLSRTNTPSGTTTQSRLQFSQAGASDIRDQSRNWLPGPCYRQQRVSKTAADNNNSDYSWTGATKYHLNGRDSLVNPGTAMASHKDDEEKYFPQSGVLIFRKQDSGKTNVDIEKVMITDEEEIRTTNPVATEQYGSVSTNLQSGNTQAATSDVNTQGVLPGMVWQDRDVYLQGPIWAKIPHTDGHFHPSPLMGGLGQKHPPPQSLIKNTPVPANPSTTFSAAKFASFITQYSTGQVSVEIEWELQKENSKRWNPEIQYTSNYNKSVNVDFTVDTNGVYSEPRPIGTRYLTRNL

SEQ ID NO: 3138 - protein, 735 aa, synthetic construct
  REGION 1..735: note = source = /note="Description of Artificial Sequence: Synthetic polypeptide"
MAADGYLPDWLEDTLSEGIRQWWKLKPGPPPPKPAERHKDDSRGLVLPGYKYLGPFNGLDKGEPVNEADAAALEHDKAYDRQLDSGDNPYLKYNHADAEFQERLKEDTSFGGNLARAVFQAKKRVLEPLGLVEEPVKTAPGKKRPVEHSPAEPDSSSGTGKSGQQPARKRLNFGQTGDADSVPDPQPLGQPPAAPSGLGTNTMASGSGAPMADNNEGADGVGNSSGNWHCDSTWMGDRVITTSTRTWALPTYNNHLYKQISSQSGASNDNHYFGYSTPWGYFDFNRFHCHFSPRDWQRLINNNWGFRPKRLNFKLFNIQVKEVTQNDGTTTIANNLTSTVQVFTDSEYQLPYVLGSAHQGCLPPFPADVFMVPQYGYLTLNNGSQAVGRSSFYCLEYFPSQMLRTGNNFTFSYTFEDVPFHSSYAHSQSLDRLMNPLIDQYLYYLSRTNTPSGTTTQSRLQFSQAGASDIRDQSRNWLPGPCYRQQRVSKTAADNNNSDYSWTGATKYHLNGRDSLVNPGTAMASHKDDEEKYFPQSGVLIFGKQDSGKTNVDIEKVMITDEEEIRTTNPVATEQYGSVSTNLQSGNTQAATSDVNTQGVLPGMVWQDRDVYLQGPIWAKIPHTDGHFHPSPLMGGLGQKHPPPQILIKNTPVPANPSTTFSAAKFASFITQYSTGQVSVEIEWELQKENSKRWNPEIQYTSNYNKSVNVDFTVDTNGVYSEPRPIGTRYLTRNL

SEQ ID NO: 3139 - protein, 735 aa, synthetic construct
  REGION 1..735: note = source = /note="Description of Artificial Sequence: Synthetic polypeptide"
MAADGYLPDWLEDTLSEGIRQWWKLKPGPPPPKPAERHKDDSRGLVLPGYKYLGPFNGLDKGEPVNEADAAALEHDKAYDRQLDSGDNPYLKYNHADAEFQERLKEDTSFGGNLARAVFQAKKRVLEPLGLVEEPVKTAPGKKRPVEHSPAEPDSSSGTGKSGQQPARKRLNFGQTGDADSVPDPQPLGQPPAAPSGLGTNTMASGSGAPMADNNEGADGVGNSSGNWHCDSTWMGDRVITTSTRTWALPTYNNHLYKQISSQSGASNDNHYFGYSTPWGYFDFNRFHCHFSPRDWQRLINNNWGFRPKRLNFKLFNIQVKEVTQNDGTTTIANNLTSTVQVFTDSEYQLPYVLGSAHQGCLPPFPADVFMVPRYGYLTLNNGSQAVGRSSFYCLEYFPSQMLRTGNNFTFSYTFEDVPFHSSYAHSQSLDRLMNPLIDQYLYYLSRTNTPSGTTTQSRLQFSQAGASDIRDQSRNWLPGPCYRQQRVSKTAADNNNSDYSWTGATKYHLNGRDSLVNPGTAMASHKDDEEKYFPQSGVLIFRKQDSGKTNVDIEKVMITDEEEIRTTNPVATEQYGSVSTNLQSGNTQAATSDVNTQGVLPGMVWQDRDVYLQGPIWAKIPHTDGHFHPSPLMGGFGLKHPPPQILIKNTPVPANPSTTFSAAKFASFITQYSTGQVSVEIEWELQKENSKRWNPEIQYTSNYNKSVNVDFTVDTNGVYSEPRPIGTRYLTRNL

SEQ ID NO: 3140 - protein, 735 aa, synthetic construct
  REGION 1..735: note = source = /note="Description of Artificial Sequence: Synthetic polypeptide"
MAADGYLPDWLEDTLSEGIRQWWKLKPGPPPPKPAERHKDDSRGLVLPGYKYLGPFNGLDKGEPVNEADAAALEHDKAYDRQLDSGDNPYLKYNHADAEFQERLKEDTSFGGNLARAVFQAKKRVLEPLGLVEEPVKTAPGKKRPVEHSPAEPDSSSGTGKSGQQPARKRLNFGQTGDADSVPDPQPLGQPPAAPSGLGTNTMASGSGAPMADNNEGADGVGNSSGNWHCDSTWMGDRVITTSTRTWALPTYNNHLYKQISSQSGASNDNHYFGYSTPWGYFDFNRFHCHFSPRDWQRLINNNWGFRPKRLNFKLFNIQVKEVTQNDGTTTIANNLTSTVQVFTDSEYQLPYVLGSAHQGCLPPFPADVFMVPQYGYLTLNNGSQAVGRSSFYCLEYFPSQMLRTGNNFTFSYTFEDVPFHSSYAHSQSLDRLMNPLIDQYLYYLSRTNTPSGTTTQSRLQFSQAGASDIRDQSRNWLPGPCYRQQRVSKTAADNNNSDYSWTGATKYHLNGRDSLVNPGTAMASHKDDEEKYFPQSGVLIFRKQDSGKTNVDIEKVMITDEEEIRTTNPVATEQYGSVSTNLQSGNTQAATSDVNTQGVLPGMVWQDRDVYLQGPIWAKIPHTDGHFHPSPLMGGFGLKHPPPQILIKNTPVPANPSTTFSAAKFASFITQYSTGQVSVEIEWELQKENSKRWNPEIQYTSNYNKSVNVDFTVDTNGVYSEPRPIGTRYLTRNL

SEQ ID NO: 3141 - protein, 735 aa, synthetic construct
  REGION 1..735: note = source = /note="Description of Artificial Sequence: Synthetic polypeptide"
MAADGYLPDWLEDTLSEGIRQWWKLKPGPPPPKPAERHKDDSRGLVLPGYKYLGPFNGLDKGEPVNEADAAALEHDKAYDRQLDSGDNPYLKYNHADAEFQERLKEDTSFGGNLARAVFQAKKRVLEPLGLVEEPVKTAPGKKRPVEHSPAEPDSSSGTGKSGQQPARKRLNFGQTGDADSVPDPQPLGQPPAAPSGLGTNTMASGSGAPMADNNEGADGVGNSSGNWHCDSTWMGDRVITTSTRTWALPTYNNHLYKQISSQSGASNDNHYFGYSTPWGYFDFNRFHCHFSPRDWQRLINNNWGFRPKRLNFKLFNIQVKEVTQNDGTTTIANNLTSTVQVFTDSEYQLPYVLGSAHQGCLPPFPADVFMVPRYGYLTLNNGSQAVGRSSFYCLEYFPSQMLRTGNNFTFSYTFEDVPFHSSYAHSQSLDRLMNPLIDQYLYYLSRTNTPSGTTTQSRLQFSQAGASDIRDQSRNWLPGPCYRQQRVSKTAADNNNSDYSWTGATKYHLNGRDSLVNPGTAMASHKDDEEKYFPQSGVLIFGKQDSGKTNVDIEKVMITDEEEIRTTNPVATEQYGSVSTNLQSGNTQAATSDVNTQGVLPGMVWQDRDVYLQGPIWAKIPHTDGHFHPSPLMGGFGLKHPPPQILIKNTPVPANPSTTFSAAKFASFITQYSTGQVSVEIEWELQKENSKRWNPEIQYTSNYNKSVNVDFTVDTNGVYSEPRPIGTRYLTRNL

SEQ ID NO: 3142 - protein, 735 aa, synthetic construct
  REGION 1..735: note = source = /note="Description of Artificial Sequence: Synthetic polypeptide"
MAADGYLPDWLEDTLSEGIRQWWKLKPGPPPPKPAERHKDDSRGLVLPGYKYLGPFNGLDKGEPVNEADAAALEHDKAYDRQLDSGDNPYLKYNHADAEFQERLKEDTSFGGNLARAVFQAKKRVLEPLGLVEEPVKTAPGKKRPVEHSPAEPDSSSGTGKSGQQPARKRLNFGQTGDADSVPDPQPLGQPPAAPSGLGTNTMASGSGAPMADNNEGADGVGNSSGNWHCDSTWMGDRVITTSTRTWALPTYNNHLYKQISSQSGASNDNHYFGYSTPWGYFDFNRFHCHFSPRDWQRLINNNWGFRPKRLNFKLFNIQVKEVTQNDGTTTIANNLTSTVQVFTDSEYQLPYVLGSAHQGCLPPFPADVFMVPQYGYLTLNNGSQAVGRSSFYCLEYFPSQMLRTGNNFTFSYTFEDVPFHSSYAHSQSLDRLMNPLIDQYLYYLSRTNTPSGTTTQSRLQFSQAGASDIRDQSRNWLPGPCYRQQRVSKTAADNNNSDYSWTGATKYHLNGRDSLVNPGTAMASHKDDEEKYFPQSGVLIFGKQDSGKTNVDIEKVMITDEEEIRTTNPVATEQYGSVSTNLQSGNTQAATSDVNTQGVLPGMVWQDRDVYLQGPIWAKIPHTDGHFHPSPLMGGLGQKHPPPQSLIKNTPVPANPSTTFSAAKFASFITQYSTGQVSVEIEWELQKENSKRWNPEIQYTSNYNKSVNVDFTVDTNGVYSEPRPIGTRYLTRNL

SEQ ID NO: 3143 - protein, 735 aa, synthetic construct
  REGION 1..735: note = source = /note="Description of Artificial Sequence: Synthetic polypeptide"
MAADGYLPDWLEDTLSEGIRQWWKLKPGPPPPKPAERHKDDSRGLVLPGYKYLGPFNGLDKGEPVNEADAAALEHDKAYDRQLDSGDNPYLKYNHADAEFQERLKEDTSFGGNLARAVFQAKKRVLEPLGLVEEPVKTAPGKKRPVEHSPAEPDSSSGTGKSGQQPARKRLNFGQTGDADSVPDPQPLGQPPAAPSGLGTNTMASGSGAPMADNNEGADGVGNSSGNWHCDSTWMGDRVITTSTRTWALPTYNNHLYKQISSQSGASNDNHYFGYSTPWGYFDFNRFHCHFSPRDWQRLINNNWGFRPKRLNFKLFNIQVKEVTQNDGTTTIANNLTSTVQVFTDSEYQLPYVLGSAHQGCLPPFPADVFMVPQYGYLTLNNGSQAVGRSSFYCLEYFPSQMLRTGNNFTFSYTFEDVPFHSSYAHSQSLDRLMNPLIDQYLYYLSRTNTPSGTTTQSRLQFSQAGASDIRDQSRNWLPGPCYRQQRVSKTAADNNNSDYSWTGATKYHLNGRDSLVNPGTAMASHKDDEEKYFPQSGVLIFGKQDSEKTNVDIEKVMITDEEEIRTTNPVATEQYGSVSTNLQSGNTQAATSDVNTQGVLPGMVWQDRDVYLQGPIWAKIPHTDGHFHPSPLMGGFGLKHPPPQILIKNTPVPANPSTTFSAAKFASFITQYSTGQVSVEIEWELQKENSKRWNPEIQYTSNYNKSVNVDFTVDTNGVYSEPRPIGTRYLTRNL

SEQ ID NO: 3144 - protein, 735 aa, synthetic construct
  REGION 1..735: note = source = /note="Description of Artificial Sequence: Synthetic polypeptide"
MAADGYLPDWLEDTLSEGIRQWWKLKPGPPPPKPAERHKDDSRGLVLPGYKYLGPFNGLDKGEPVNEADAAALEHDKAYDRQLDSGDNPYLKYNHADAEFQERLKEDTSFGGNLARAVFQAKKRVLEPLGLVEEPVKTAPGKKRPVEHSPAEPDSSSGTGKSGQQPARKRLNFGQTGDADSVPDPQPLGQPPAAPSGLGTNTMASGSGAPMADNNEGADGVGNSSGNWHCDSTWMGDRVITTSTRTWALPTYNNHLYKQISSQSGASNDNHYFGYSTPWGYFDFNRFHCHFSPRDWQRLINNNWGFRPKRLNFKLFNIQVKEVTQNDGTTTIANNLTSTVQVFTDSEYQLPYVLGSAHQGCLPPFPADVFMVPQYGYLTLNNGSQAVGRSSFYCLEYFPSQMLRTGNNFTFSYTFEDVPFHSSYAHSQSLDRLMNPLIDQYLYYLSRTNTPSGTTTQSRLQFSQAGASDIRDQSRNWLPGPCYRQQRVSKTAADNNNSDYSWTGATKYHLNGRDSLVNPGTAMASHKDDEEKYFPQSGVLIFGKQDSGKTNVDIEKVMITDEEEIRTTNPVATEQYGSVSTNLQSGNTQAATSDVNTQGVLPGMVWQDRDVYLQGPIWAKIPHTDGHFHPSPLMGGFGLKHPPPQILIKNTPVPANPSTTFSAAKFASFITQYSTGQVSVEIEWELQKENSKRWNPEIQYTSNYNKSVNVDFTVDTNGVYSEPRPIGTRYLTRNL

SEQ ID NO: 3145 - protein, 735 aa, synthetic construct
  REGION 1..735: note = source = /note="Description of Artificial Sequence: Synthetic polypeptide"
MAADGYLPDWLEDTLSEGIRQWWKLKPGPPPPKPAERHKDDSRGLVLPGYKYLGPFNGLDKGEPVNEADAAALEHDKAYDRQLDSGDNPYLKYNHADAEFQERLKEDTSFGGNLARAVFQAKKRVLEPLGLVEEPVKTAPGKKRPVEHSPAEPDSSSGTGKSGQQPARKRLNFGQTGDADSVPDPQPLGQPPAAPSGLGTNTMASGSGAPMADNNEGADGVGNSSGNWHCDSTWMGDRVITTSTRTWALPTYNNHLYKQISSQSGASNDNHYFGYSTPWGYFDFNRFHCHFSPRDWQRLINNNWGFRPKRLNFKLFNIQVKEVTQNDGTTTIANNLTSTVQVFTDSEYQLPYVLGSAHQGCLPPFPADVFMVPQYGYLTLNNGSQAVGRSSFYCLEYFPSQMLRTGNNFTFSYTFEDVPFHSSYAHSQSLDRLMNPLIDQYLYYLSRTNTPSGTTTQSRLQFSQAGASDIRDQSRNWLPGPCYRQQRVSKTAADNNNSDYSWTGATKYHLNGRDSLVNPGTAMASHKDDEEKYFPQSGVLIFGKQDSGKTNVDIEKVMITDEEEIRTTNPVATEQYGSVSTNLQSGNTQAATSDVNTQGVLPGMVWQDRDVYLQGPIWAKIPHTDGHFHPSPLMGGFGQKHPPPQSLIKNTPVPANPSTTFSAAKFASFITQYSTGQVSVEIEWELQKENSKRWNPEIQYTSNYNKSVNVDFTVDTNGVYSEPRPIGTRYLTRNL

SEQ ID NO: 3146 - protein, 735 aa, synthetic construct
  REGION 1..735: note = source = /note="Description of Artificial Sequence: Synthetic polypeptide"
MAADGYLPDWLEDTLSEGIRQWWKLKPGPPPPKPAERHKDDSRGLVLPGYKYLGPFNGLDKGEPVNEADAAALEHDKAYDRQLDSGDNPYLKYNHADAEFQERLKEDTSFGGNLARAVFQAKKRVLEPLGLVEEPVKTAPGKKRPVEHSPAEPDSSSGTGKSGQQPARKRLNFGQTGDADSVPDPQPLGQPPAAPSGLGTNTMASGSGAPMADNNEGADGVGNSSGNWHCDSTWMGDRVITTSTRTWALPTYNNHLYKQISSQSGASNDNHYFGYSTPWGYFDFNRFHCHFSPRDWQRLINNNWGFRPKRLNFKLFNIQVKEVTQNDGTTTIANNLTSTVQVFTDSEYQLPYVLGSAHQGCLPPFPADVFMVPQYGYLTLNNGSQAVGRSSFYCLEYFPSQMLRTGNNFTFSHTFEDVPFHSSYAHSQSLDRLMNPLIDQYLYYLSRTNTPSGTTTQSRLQFSQAGASDIRDQSRNWLPGPCYRQQRVSKTAADNNNSDYSWTGATKYHLNGRDSLVNPGTAMASHKDDEEKYFPQSGVLIFGKQDSGKTNVDIEKVMITDEEEIRTTNPVATEQYGSVSTNLQSGNTQAATSDVNTQGVLPGMVWQDRDVYLQGPIWAKIPHTDGHFHPSPLMGGFGLKHPPPQILIKNTPVPANPSTTFSAAKFASFITQYSTGQVSVEIEWELQKENSKRWNPEIQYTSNYNKSVNVDFTVDTNGVYSEPRPIGTRYLTRNL

SEQ ID NO: 3147 - protein, 735 aa, synthetic construct
  REGION 1..735: note = source = /note="Description of Artificial Sequence: Synthetic polypeptide"
MAADGYLPDWLEDTLSEGIRQWWKLKPGPPPPKPAERHKDDSRGLVLPGYKYLGPFNGLDKGEPVNEADAAALEHDKAYDRQLDSGDNPYLKYNHADAEFQERLKEDTSFGGNLARAVFQAKKRVLEPLGLVEEPVKTAPGKKRPVEHSPAEPDSSSGTGKSGQQPAGKRLNFGRTGDADSVPDPQPLGQPPAAPSGLGTNTMASGSGAPMADNNEGADGVGNSSGNWHCDSTWMGDRVITTSTRTWALPTYNNHLYKQISSQSGASNDNHYFGYSTPWGYFDFNRFHCHFSPRDWQRLINNNWGFRPKRLNFKLFNIQVKEVTQNDGTTTIANNLTSTVQVFTDSEYQLPYVLGSAHQGCLPPFPADVFMVPQYGYLTLNNGSQAVGRSSFYCLEYFPSQMLRTGNNFTFSYTFEDVPFHSSYAHSQSLDRLMNPLIDQYLYYLSRTNTPSGTTTQSRLQFSPAGASDIRDQSRNWLPGPCYRQQRVSKTAADNNNSDYSWTGATKYHLNGRDSLVNPGTAMASHKDDEEKYFPQSGVLIFGKQDSGKTNVDIEKVMITDEEEIRTTNPVATEQYGSVSTNLQSGNTQAATSDVNTQGVLPGMVWQDRDVYLQGPIWAKIPHTDGHFHPSPLMGGFGLKHPPPQILIKNTPVPANPSTTFSAAKFASFITQYSTGQVSVEIEWELQKENSKRWNPEIQYTSNYNKSVNVDFTVDTNGVYSEPRPIGTRYLTRNL

SEQ ID NO: 3148 - protein, 734 aa, synthetic construct
  REGION 1..734: note = source = /note="Description of Artificial Sequence: Synthetic polypeptide"
MAADGYLPDWLEDTLSEGIRQWWKLKPGPPPPKPAERHKDDSRGLVLPGYKYLGPFNGLDKGEPVNEADAAALEHDKAYDRQLDSGDNPYLKYNHADAEFQERLKEDTSFGGNLARAVFQAKKRVLEPLGLVEEPVKTAPGKKRPVEHSPAEPDSSSGTGKSGQQPARKRLNFGQTGDADSVPDPQPLGQPPAAPSGLGTNTMASGSGAPMADNNEGADGVGNSSGNWHCDSTWMGDRVITTSTRTWALPTYNNHLYKQISSQSGASNDNHYFGYSTPWGYFDFNRFHCHFSPRDWQRLINNNWGFRPKRLNFKLFNIQVKEVTQNDGTTTIANNLTSTVQVFTDSEYQLPYVLGSAHQGCLPPFPADVFMVPQYGYLTLNNGSQAVGRSSFYCLEYFPSQMLRTGNNFTFSYTFEDVPFHSSYAHSQSLDRLMNPLIDQYLYYLSRTNTPSGTTTQSRLQFSQAGASDIRDQSRNWLPGPCYRQQRVSKTAADNNSDYSWTGATKYHLNGRDSLVNPGTAMASHKDDEEKYFPQSGVLIFGKQDSGKTNVDIEKVMITDEEEIRTTNPVATEQYGSVSTNLQSGNTQAATSDVNTQGVLPGMVWQDRDVYLQGPIWAKIPHTDGHFHPSPLMGGFGLKHPPPQILIKNTPVPANPSTTFSAAKFASFITQYSTGQVSVEIEWELQKENSKRWNPEIQYTSNYNKSVNVDFTVDTNGVYSEPRPIGTRYLTRNL

SEQ ID NO: 3149 - protein, 738 aa, synthetic construct
  REGION 1..738: note = source = /note="Description of Artificial Sequence: Synthetic polypeptide"
MAADGYLPDWLEDNLSEGIREWWALKPGAPKPKANQQKQDDGRGLVLPGYKYLGPFNGLDKGEPVNAADAAALEHDKAYDQQLQAGDNPYLRYNHADAEFQERLQEDTSFGGNLGRAVFQAKKRVLEPLGLVEEGAKTAPGKKRPVEPSPQRSPDSSTGIGKKGQQPARKRLNFGQTGDSESVPDPQPLGEPPAAPSGVGPNTMAAGGGAPMADNNEGADGVGSSSGNWHCDSTWLGDRVITASTRTWALPTYNNHLYKQISNGTSGGATNDNTYFGYSTPWGYFDFNRFHCHFSPRDWQRLINNNWGFRPKRLSFKLFNIQVKEVTQNEGTKTIANNLTSTIQVFTDSEYQLPYVLGSAHQGCLPPFPADVFTIPQYGYLTLNNGSQAVGRSSFYCLEYFPSQMLRTGNNFQFTYTFEDVPFHSSYAHSQSLDRLMNPLIDQYLYYLSRTQTTGGTANTQTLGFSQGGPNTMANQAKNWLPGPCYRQQRVSTTTGQNNNSNFAWTAGTKYHLNGRNSLANPGIAMATHKDDEERFFPSNGILIFGKQNAARDNADYSDVMLTSEEEIKTTNPVATEEYGIVADNLQQQNTAPQIGTVNSQGALPGMVWQNRDVYLQGPIWAKIPHTDGNFHPSPLMGGFGLKHPPPQILIKNTPVPADPPTTFNQSKLNSFITQYSTGQVSVEIEWELQKENSKRWNPEIQYTSNYYKSTSVDFAVNTEGVYSEPRPIGTRYLTRNL

SEQ ID NO: 3150 - protein, 738 aa, synthetic construct
  REGION 1..738: note = source = /note="Description of Artificial Sequence: Synthetic polypeptide"
MAADGYLPDWLEDNLSEGIREWWALKPGAPKPKANQQKQDDGRGLVLPGYKYLGPFNGLDKGGPVNAADAAALEHDKAYDQQLQAGDNPYLRYNHADAEFQERLQEDTSFGGNLGRAVFQAKKRVLEPLGLVEEGAKTAPGKKRPVEPSPQRSPDSSTGIGKKGQQPARKRLNFGQTGDSESVPDPQPLGEPPAAPSGVGPNTMAAGGGAPMADNNEGADGVGSSSGNWHCDSTWLGDRVITTSTRTWALPTYNNHLYKQISNGTSGGATNDNTYFGYSTPWGYFDFNRFHCHFSPRDWQRLINNNWGFRPKRLSFKLFNIQVKEVTQNEGTKTIANNLTSTIQVFTDSEYQLPYVLGSAHQGCLPPFPADVFMIPQYGYLTLNNGSQAVGRSSFYCLEYFPSQMLRTGNNFQFTYTFEDVPFHSSYAHSQSLDRLMNPLIDQYLYYLSRTQTTGGTANTQTLGFSQGGPNTMANQAKNWLPGPCYRQQRVSTTTGQNNNSNFAWTAGTKYHLNGRNSLANPGIAMATHKDDEERFFPSNGILIFGKQNAARDNADYSDVMLTSEEEIKTTNPVATEEYGIVADNLQQQNTAPQIGTVNSQGALPGMVWQNRDVYLQGPIWAKIPHTDGNFHPSPLMGGFGLKHPPPQILIKNTPVPADPPTTFNQSKLNSFITQYSTGQVSVEIEWELQKENSKRWNPEIQYTSNYYKSTSVDFAVNTEGVYSEPRPIGTRYLTRNL

SEQ ID NO: 3151 - protein, 738 aa, synthetic construct
  REGION 1..738: note = source = /note="Description of Artificial Sequence: Synthetic polypeptide"
MAADGYLPDWLEDNLSEGIREWWALKPGAPKPKANQQKQDDGRGLVLPGYKYLGPFNGLDKGEPVNAADAAALEHDKAYDQQLQAGDNPYLRYNHADAEFQERLQEDTSFGGNLGRAVFQAKKRVLEPLGLVEEGAKTAPGKKRPVEPSPQRSPDSSTGIGKKGQQPARKRLNFGQTGDSESVPDPQPLGEPPAAPSGVGPNTMAAGGGAPMADNNEGADGVGSSSGNWHCDSTWLGDRVITTSTRTWALPTYNNHLYRQISNGTSGGATNDNTYFGYSTPWGYFDFNRFHCHFSPRDWQRLINNNWGFRPKRLSFKLFNIQVKEVTQNEGTKTIANNLTSTIQVFTDSEYQLPYVLGSAHQGCLPPFPADVFMIPQYGYLTLNNGSQAVGRSSFYCLEYFPSQMLRTGNNFQFTYTFEDVPFHSSYAHSQSLDRLMNPLIDQYLYYLSRTQTTGGTANTQTLGFSQGGPNTMANQAKNWLPGPCYRQQRVSTTTGQNNNSNFAWTAGTKYHLNGRNSLANPGIAMATHKDDEERFFPSNGILIFGKQNAARDNADYSDVMLTSEEEIKTTNPVATEEYGIVADNLQQQNTAPQIGTVNSQGALPGMVWQNRDVYLQGPIWAKIPHTDGNFHPSPLMGGFGLKHPPPQILIKNTPVPADPPTTFNQSKLNSFITQYSTGQVSVEIEWELQKENSKRWNPEIQYTSNYYKSTSVDFAVNTEGVYSEPRPIGTRYLTRNL

SEQ ID NO: 3152 - protein, 738 aa, synthetic construct
  REGION 1..738: note = source = /note="Description of Artificial Sequence: Synthetic polypeptide"
MAADGYLPDWLEDNLSEGIREWWALKPGAPKPKANQQKQDDGRGLVLPGYKYLGPFNGLDKGEPVNAADAAALEHDKAYDQQLQAGDNPYLRYNHADAEFQERLQEDTSFGGNLGRAVFQAKKRVLEPLGLVEEGAKTAPGKKRPVEPSPQRSPDSSTGIGKKGQQPARKRLNFGQTGDSESVPDPQPLGEPPAAPSGVGPNTMAAGGGAPMADSNEGADGVGSSSGNWHCDSTWLGDRVITTSTRTWALPTYNNHLYKQISNGTSGGATNDNTYFGYSTPWGYFDFNRFHCHFSPRDWQRLINNNWGFRPKRLSFKLFNIQVKEVTQNEGTKTIANNLTSTIQVFTDSEYQLPYVLGSAHQGCLPPFPADVFMIPQYGYLTLNNGSQAVGRSSFYCLEYFPSQMLRTGNNFQFTYTFEDVPFHSSYAHSQSLDRLMNPLIDQYLYYLSRTQTTGGTANTQTLGFSQGGPNTMANQAKNWLPGPCYRQQRVSTTTGQNNNSNFAWTAGTKYHLNGRNSLANPGIAMATHKDDEERFFPSNGILIFGKQNAARDNADYSDVMLTSEEEIKTTNPVATEEYGIVADNLQQQNTAPQIGTVNSQGALPGMVWQNRDVYLQGPIWAKIPHTDGNFHPSPLMGGFGLKHPPPQILIKNTPVPADPPTTFNQSKLNSFITQYSTGQVSVEIEWELQKENSKRWNPEIQYTSNYYKSTSVDFAVNTEGVYSEPRPIGTRYLTRNL

SEQ ID NO: 3153 - protein, 738 aa, synthetic construct
  REGION 1..738: note = source = /note="Description of Artificial Sequence: Synthetic polypeptide"
MAADGYLPDWLEDNLSEGIREWWALKPGAPKPKANQQKQDDGRGLVLPGYKYLGPFNGLDKGEPVNAADAAALEHDKAYDQQLQAGDNPYLRYNHADAEFQERLQEDTSFGGNLGRAVFQAKKRVLEPLGLVEEGAKTAPGKKRPVEPSPQRSPDSSTGIGKKGQQPARKRLNFGQTGDSESVPDPQPLGEPPAAPSGVGPNTMAAGGGAPMADNNEGADGVGSSSGNWHCDSTWLGDRVITTSTRTWALPTYNNHLYKQISNGTSGGATNDNTYFGYSTPWGYFDFNRFHCHFSPRDWQRLINNNWGFRPKRLSFKLFNIQVKEVTQNEGTKTIANNLTSTIQVFTDSEYQLPYVLGSAHQGCLPPFPADVFMIPQYGYLTLNNGSQAMGRSSFYCLEYFPSQMLRTGNNFQFTYTFEDVPFHSSYAHSQSLDRLMNPLIDQYLYYLSRTQATGGTANTQTLGFSQGGPNTMANQAKNWLPGPCYRQQRVSTTTGQNNNSNFAWTAGTKYHLNGRNSLANPGIAMATHKDDEERFFPSNGILIFGKQNAARDNADYSDVMLTSEEEIKTTNPVATEEYGIVADNLQQQNTAPQIGTVNSQGALPGMVWQNRDVYLQGPIWAKIPHTDGNFHPSPLMGGFGLKHPPPQILIKNTPVPADPPTTFNQSKLNSFITQYSTGQVSVEIEWELQKENSKRWNPEIQYTSNYYKSTSVDFAVNTEGVYSEPRPIGTRYLTRNL

SEQ ID NO: 3154 - protein, 738 aa, synthetic construct
  REGION 1..738: note = source = /note="Description of Artificial Sequence: Synthetic polypeptide"
MAADGYLPDWLEDNLSEGIREWWALKPGAPKPKANQQKQDDGRGLVLPGYKYLGPFNGLDKGEPVNAADAAALEHDKAYDQQLQAGNNPYLRYNHADAEFQERLQEDTSFGGNLGRAVFQAKKRVLGPLGLVEEGAKTAPGKKRPVEPSPQRSPDSSTGIGKKGQQPARKRLNFGQTGDSESVPDPQPLGEPPAAPSGVGPNTMAAGGGAPMADNNEGADGVGSSSGNWHCDSTWLGDRVITTSTRTWALPTYNNHLYKQISNGTSGGATNDNTYFGYSTPWGYFDFNRFHCHFSPRDWQRLINNNWGFRPKRLSFKLFNIQVKEVTQNEGTKTIANNLTSTIQVFTDSEYQLPYVLGSAHQGCLPPFPADVFMIPQYGYLTLNNGSRAVGRSSFYCLEYFPSQMLRTGNNFQFTYTFEDVPFHSSYAHSQSLDRLMNPLIDQYLYYLSRTQTTGGTANTQTLGFSQGGPNTMANQAKNWLPGPCYRQQRVSTTTGQNNNSNFAWTAGTKYHLNGRNSLANPGIAMATHKDDEERFFPSNGILIFGKQNAARDNADYSDVMLTSEEEIKTTNPVATEEYGIVADNLQQQNTAPQIGTVNSQGALPGMVWQNRDVYLQGPIWAKIPHTDGNFHPSPLMGGFGLKHPPPQILIKNTPVPADPPTTFNQSKLNSFITQYSTGQVSVEIEWELQKENSKRWNPEIQYTSNYYKSTSVDFAVNTEGVYSEPRPIGTRYLTRNL

SEQ ID NO: 3155 - protein, 738 aa, synthetic construct
  REGION 1..738: note = source = /note="Description of Artificial Sequence: Synthetic polypeptide"
MAADGYLPDWLEDNLSEGIREWWALKPGAPKPKANQQKQDDGRGLVLPGYKYLGPFNGLDKGEPVNAADAAALEHDKAYDQQLQAGDNPYLRYNHADAEFQERLQEDTSFGGNLGRAVFQAKKRVLEPLGLVEEGAKTAPGKKRPVEPSPQRSPDSSTGIGKKGQQPARKRLNFGQTGDSESVPDPQPLGEPPAAPSGVGPNTMAAGGGAPMADNNEGADGVGSSSGNWHCDSTWLGDRVITTSTRTWALPTYNNHLYKQISNGTSGGATNDNTYFGYSTPWGYFDFNRFHCHFSPRDWQRLINNNWGFRPKRLSFKLFNIQVKEVTQNEGTKTIANNLTSTIQVFTDSEYQLPYVLGSAHQGCLPPFPADVFMIPQYGYLTLNNGSQAVGRSSFYCLEYFPSQMLRTGNNFQFTYTFEDVPFHSSYAHSQSLDRLMNPLIDQYLYYLSRTQTTGGTANTQTLGFSQGGPNTMANQAKNWLPGPCYRQQRVSTTTGQNNNSDFAWTAGTKYHLNGRNSLANPGIAMATHKDDEERFFPSNGILIFGKQNAARDNADYSDVMLTSEEEIKTTNPVATEEYGIVADNLQQQNTAPQIGTVNSQGALPGMVWQNRDVYLQGPVWAKIPHTDGNFHPSPLMGGFGLKHPPPQILIKNTPVPADPPTTFNQSKLNSFITQYSTGQVSVEIEWELQKENSKRWNPEIQYTSNYYKSTSVDFAVNTEGVYSEPRPIGTRYLTRNL

SEQ ID NO: 3156 - protein, 738 aa, synthetic construct
  REGION 1..738: note = source = /note="Description of Artificial Sequence: Synthetic polypeptide"
MAADGYLPDWLEDNLSEGIREWWALKPGAPKPKANQQKQDDGRGLVLPGYKYLGPFNGLDKGEPVNAADAAALEHDKAYDQQLQAGDNPYLRYNHADAEFQERLQEDTSFGGSLGRAVFQAKKRVLEPLGLVEEGAKTAPGKKRPVEPSPQRSPDSSTGIGKKGQQPARKRLNFGQTGDSESVPDPQPLGEPPAAPSGVGPNTMAAGGGAPMADNNEGADGVGSSSGNWHCDSTWLGDRVITTSTRTWALPTYNNHLYKQISNGTSGGATNDNTYFGYSTPWGYFDFNRFHCHFSPRDWQRLINNNWGFRPKRLSFKLFNIQVKEVTQNEGTKTIANNLTSTIQVFTDSEYQLPYVLGSAHQGCLPPFPADVFMIPQYGYLTLNNGSQAVGRSSFYCLEYFPSQMLRTGNNFQFTYTFEDVPFHSSYAHSQSLDRLMNPLIDQYLYYLSRTQTTGGTANTQTLGFSQGGPNTMANQAKNWLPGPCYRQQRVSTTTGQNNNSNFAWTAGTKYHLNGRNSLANPGIAMATHKDDEERFFPSNGILIFGKQNAARDNADYSDVMLTSEEEIKTTNPVATEEYGIVADNLQQQNTAPQIGTVNSQGALPGMVWQNRDVYLQGPIWAKIPHTDGNFHPSPLMGGFGLKHPPPQILIKNTPVPADPPTTFNQSKLNSFITQYSTGQVSVEIEWELQKENSKRWNPEIQYTSNYYKSTSVDFAVNTEGVYSEPRPIGTRYLTRNL

SEQ ID NO: 3157 - protein, 738 aa, synthetic construct
  REGION 1..738: note = source = /note="Description of Artificial Sequence: Synthetic polypeptide"
MAADGYLPDWLEDNLSEGIREWWALKPGAPKPKANQQKQDDGRGLVLPGYKYLGPFNGLDKGEPVNAADAAALEHDKAYDQQLQAGDNPYQRYNHADAEFQERLQEDTSFGGNLGRAVFQAKKRVLEPLGLVEEGAKTAPGKKRPVEPSPQRSPDSSTGIGKKGQQPARKRLNFGQTGDSESVPDPQPLGEPPAAPSGVGPNTMAAGGGAPMADNNEGADGVGSSSGNWHCDSAWLGDRVITTSTRTWALPTYNNHLYKQISNGTSGGATNDNTYFGYSTPWGYFDFNRFHCHFSPRDWQRLINNNWGFRPKRLSFKLFNIQVKEVTQNEGTKTIANNLTSTIQVFTDSEYQLPYVLGSAHQGCLPPFPADVFTIPQYGYLTLNNGSQAVGRSSFYCLEYFPSQMLRTGNNFQFTYTFEDVPFHSSYAHSQSLDRLMNPLIDQYLYYLSRTQTTGGTANTQTLGFSQGGPNTMANQAKNWLPGPCYRQQRVSTTTGQNNNSNFAWTAGTKYHLNGRNSLANPGIAMATHKDDEERFFPSNGILIFGKQNAARDNADYSDVMLTSEEEIKTTNPVATEEYGIVADNLQQQNTAPQIGTVNSQGALPGMVWQNRDVYLQGPIWAKIPHTDGNFHPSPLMGGFGLKHPPPQILIKNTPVPADPPTTFNQSKLNSFITQYSTGQVSVEIEWELQKENSKRWNPEIQYTSNYYKSTSVDFAVNTEGVYSEPRPIGTRYLTRNL

SEQ ID NO: 3158 - protein, 738 aa, synthetic construct
  REGION 1..738: note = source = /note="Description of Artificial Sequence: Synthetic polypeptide"
MAADGYLPDWLEDNLSEGIREWWALKPGAPKPKANQQKQDDGRGLVLPGYKYLGPFNGLDKGEPVNAADTAALEHDKAYDQQLQAGDNPYLRYNHADAEFQERLQEDTSFGGNLGRAVFQAKKRVLEPLGLVEEGAKTAPGKKRPVEPSPQRSPDSSTGIGKKGQQPARKRLNFGQTGDSESVPDPQPLGEPPAAPSGVGPNTMAAGGGAPMADNNEGADGVGSSSGNWHCDSTWLGDRVITTSTRTWALPTYNNHLYKQISNGTSGGATNDNTYFGYSTPWGYFDFNRFHCHFSPRDWQRLINNNWGFRPKRLSFKLFNIQVKEVTQNEGTKTIANNLTSTIQVFTDSEYQLPYVLGSAHQGCLPPFPADVFMIPQYGYLTLNNGSQAVGRSSFYCLEYFPSQMLRTGNNFQFTYTFEDVPFHSSYAHSQSLDRLMNPLIDQYLYYLSRTQTTGGTANTQTLGFSQGGPNTMANQAKNWLPGPCYRQQRVSTTTGQNNNSNFAWTAGTKYHLNGRNSLANPGIAMATHKDDEERFFPSNGILIFGKQNAARDNADYSDVMLTSEEEIKTTNPVATEEYGIVADNLQQQNTAPQIGTVNSQGALPGMVWQNRDVYLQGPIWAKIPHTDGNFHPSPLMGGFGLKHPPPQILIKNTPVPADPPTTFNQSKLNSFITQYSTGQVSVEIEWELQKENSKRWNPEIQYTSNYYKSTSVDFAVNTEGVYSEPRPIGTRYLTRNL

SEQ ID NO: 3159 - protein, 738 aa, synthetic construct
  REGION 1..738: note = source = /note="Description of Artificial Sequence: Synthetic polypeptide"
MAADGYLPDWLEDNLSEGIREWWALKPGAPKPKANQQKQDDGRGLVLPGYKYLGPFNGLDKGEPVNAADAAALEHDKAYDQQLQAGDNPYLRYNHADAEFQERLQEDTSFGGNLGRAVFQAKKRVLEPLGLVEEGAKTAPGKKRPVEPSPQRSPDSSTGIGKKGQQPARKRLNFGQTGDSESVPDPQPLGEPPAAPSGVGPNTMAAGGGAPMADNNEGADGVGSSSGNWHCDSTWLGDRVITTSTRTWALPTYNNHLYKQISNGTSGGATNDNTYFGYSTPWGYFDFNRFHCHFSPRDWQRLINNNWGFRPKRLSFKLFNIQVKEVTQNEGTKTIANNLTSTIQVFTDSEYQLPYVLGSAHQGCLPPFPADVFMIPQYGYLTLNNGSQAVGRSSFYCLEYFPSQMLRTGNNFQFTYTFEDVPFHSSYAHSQSLDRLMNPLIDQYLYYLSRTQTTGGTANTQTLGFSQGGPNTMANQAKNWLPGPCYRQQRVSTTTGQNNNSNFAWTAGTKYHLNGRNSLANPGIAMATHKDDEERFFPSNGILIFGKQNAARDNADYSDVMLTSEEEIKTTNPVATEEYGIVADNLQQQNAAPQIGTVNSQGALPGMVWQNRDVYLQGPIWAKIPHTDGNFHPSPLMGGFGLKHPPPQILIKNTPVPADPPTTFNQSKLNSFITQYSTGQVSVEIEWELQKENSKRWNPEIQYTSNYYKSTSVDFAVNTEGVYSEPRPIGTRYLTRNL

SEQ ID NO: 3160 - protein, 738 aa, synthetic construct
  REGION 1..738: note = source = /note="Description of Artificial Sequence: Synthetic polypeptide"
MAADGYLPDWLEDNLSEGIREWWALKPGAPKPKANQQKQDDGRGLVLPGYKYLGPFNGLDKGEPVNAADAAALEHDKAYDQQLQAGDNPYLRYNHADAEFQERLQEDTSFGGNLGRAVFQAKKRVLEPLGLVEEGAKTAPGKKRPVEPSPQRSPDSSTGIGKKGQQPARKRLNFGQTGDSESVPDPQPLGEPPAAPSGVGPNTMAAGGGAPMADNNEGADGVGSSSGNWHCDSTWLGDRVITTSTRTWALPTYNNHLYKQISNGTSGGATNDNTYFGYSTPWGYFDFNRFHCHFSPRDWQRLINNNWGFRPKRLSFKLFNIQVKEVTQNEGTKTIANNLTSTIQVFTDSEYQLPYVLGSAHQGCLPPFPADVFTIPQYGYLTLNNGSQAVGRSSFYCLEYFPSQMLRTGNNFQFTYTFEDVPFHSSYAHSQSLDRLMNPLIDQYLYYLSRTQTTGGTANTQTLGFSQGGPNTMANQAKNWLPGPCYRQQRVSTTTGRNNNSNFAWTAGTKYHLNGRNSLANPGIAMATHKDDEERFFPSNGILIFGKQNAARDNADYSDVMLTSEEEIKTTNPVATEEYGIVADNLQQQNTAPQIGTVNSQGALPGMVWQNRDVYLQGPIWAKIPHTDGNFHPSPLMGGFGLKHPPPQILIKNTPVPADPPTTFNQSKLNSFITQYSTGQVSVEIEWELQKENSKRWNPEIQYTSNYYKSTSVDFAVNTEGVYSEPRPIGTRYLTRNL

SEQ ID NO: 3161 - protein, 738 aa, synthetic construct
  REGION 1..738: note = source = /note="Description of Artificial Sequence: Synthetic polypeptide"
MAADGYLPDWLEDNLSEGIREWWALKPGAPKPKANQQKQDDGRGLVLPGYKYLGPFNGLDKGEPVNAADAAALEHDKAYDQQLQAGDNPYLRYNHADAEFQERLQEDTSFGGNLGRAVFQAKKRVLEPLGLVEEGAKTAPGKKRPVEPSPQRSPDSSTGIGKKGQQPARKRLNFGQTGDSESVPDPQPLGEPPAAPSGVGPNTMAAGGGAPMADNNEGADGVGSSSGNWHCDSTWLGDRVITTSTRTWALPTYNNHLYKQISNGTSGGATNDNTYFGYSTPWGYFDFNRFHCHFSPRDWQRLINNNWGFRPKRLSFKLFNIQVKEVTQNEGTKTIANNLTSTIQVFTDSEYQLPYVLGSAHQGCLPPFPADVFTIPQYGYLTLNNGSQAVGRSSFYCLEYFPSQMLRTGNNFQFTYTFEDVPFHSSYAHSQSLDRLMNPLIDQYLYYLSRTQTTGGTANTQTLGFSQGGPNTMANQAKNWLPGPCYRQQRVSTTTGQNNNSNFAWTAGTKYHLNGRNSLANPGIAMATHKDDEERFFPSNGILIFGKQNAARDNADYSDVVLTSEEEIKTTNPVATEEYGIVADNLQQQNTAPQIGTVNSQGALPGMVWQNRDVYLQGPIWAKIPHTDGNFHPSPLMGGFGLKHPPPQILIKNTPVPADPPTTFNQSKLNSFITQYSTGQVSVEIEWELQKENSKRWNPEIQYTSNYYKSTSVDFAVNTEGVYSEPRPIGTRYLTRNL

SEQ ID NO: 3162 - protein, 738 aa, synthetic construct
  REGION 1..738: note = source = /note="Description of Artificial Sequence: Synthetic polypeptide"
MAADGYLPDWLEDNLSEGIREWWALKPGAPKPKANQQKQDDGRGLVLPGYKYLGPFNGLDKGEPVNAADAAALEHDKAYDQQLQAGDNPYLRYNHADAEFQERLQEDTSFGGNLGRAVFQAKKRVLEPLGLVEEGAKTAPGKKRPVEPSPQRSPDSSTGIGKKGQQPARKRLNFGQTGDSESVPDPQPLGEPPAAPSGVGPNTMAAGGGAPMADNNEGADGVGSSSGNWHCDSTWLGDRVITTSTRTWALPTYNNHLYKQISNGTSGGATNDNTYFGYSTPWGYFDFNRFHCHFSPRDWQRLINNNWGFRPKRLSFKLFNIQVKEVTQNEGTKTIANNLTSTIQVFTDSEYQLPYVLGSAHQGCLPPFPADVFMIPQYGYLTLNNGSQAVGRSSFYCLEYFPSQMLRAGNNFQFTYTFEDVPFHSSYAHSQSLDRLMNPLIDQYLYYLSRTQTTGGTANTQTLGFSQGGPNTMANQAKNWLPGPCYRQQRVSTTTGQNNNSNFAWTAGTKYHLNGRNSLANPGIAMATHKDDEERFFPSNGILIFGKQNAARDNADYSDVMLTSEEEIKTTNPVATEEYGIVADNLQQQNTAPQIGTVDSQGALPGMVWQNRDVYLQGPIWAKIPHTDGNFHPSPLMGGFGLKHPPPQILIKNTPVPADPPTTFNQSKLNSFITQYSTGQVSVEVEWELQKENSKRWNPEIQYTSNYYKSTSVDFAVNTEGVYSEPRPIGTRYLTRNL

SEQ ID NO: 3163 - protein, 738 aa, synthetic construct
  REGION 1..738: note = source = /note="Description of Artificial Sequence: Synthetic polypeptide"
MAADGYLPDWLEDNLSEGIREWWALKPGAPKPKANQQKQDDGRGLVLPGYKYLGPFNGLDKGEPVNAADAAALEHDKAYDQQLQAGDNPYLRYNHADAEFQERLQEDTSFGGSLGRAVFQAKKRVLEPLGLVEEGAKTAPGKKRPVEPSPQRSPDSSTGIGKKGQQPARKRLNFGQTGDSESVPDPQPLGEPPAAPSGVGPNTMAAGGGAPMADNNEGADGVGSSSGNWHCDSTWLGDRVITTSTRTWALPTYNNHLYKQISNGTSGGATNDNTYFGYSTPWGYFDFNRFHCHFSPRDWQRLINNNWGFRPKRLSFKLFNIQVKEVTQNEGTKTIANNLTSTIQVFTDSEYQLPYVLGSAHQGCLPPFPADVFMIPQYGYLTLNNGSQAVGRSSFYCLEYFPSQMLRTGNNFQFTYTFEDVPFHSSYAHSQSLDRLMNPLIDQYLYYLSRTQTTGGTANTQTLGFSQGGPNTMANQAKNWLPGPCYRQQRVSTTTGQNNNSNFAWTAGTKYHLNGRNSLANPGIAMATHKDDEERFFPSNGILIFGKQNAARDNADYSDVMLTSEEEIKTTNPVATEEYGIVADNLQQQNTAPQIGTVNSQGALPGMVWQNRDVYLQGPIWAKIPHTDGNFHPSPLMGGFGLKHPPPQILIKNTPVPADPPTTFNQSKLNSFITQYSTGQVSVEIEWELQKENSKRWNPEIQYTSNYYKSTSVDFAVNTEGVYSEPRPIGTRHLTRNL

SEQ ID NO: 3164 - protein, 738 aa, synthetic construct
  REGION 1..738: note = source = /note="Description of Artificial Sequence: Synthetic polypeptide"
MAADGYLPDWLEDNLSEGIREWWALKPGAPKPKANQQKQDDGRGLVLPGYKYLGPFNGLDKGEPVNAADAAALEHDKAYDQQLQAGDNPYLRYNHADAEFQERLQEDTSFGGNLGRAVFQAKKRVLEPLGLVEEGAKTAPGKKRPVEPSPQRSPDSSTGIGKKGQQPARKRLNFGQTGDSESVPDPQPLGEPPAAPSGVGPNTMAAGGGAPMADNNEGADGVGSSSGNWHCDSTWLGDRVITTSTRTWALPTYNNHLYKQISNGTSGGATNDNTYFGYSTPWGYFDFNRFHCHFSPRDWQRLINNNWGFRPKRLSFKLFNIQVKEVTQNEGTKTIANNLTSTIQVFTDSEYQLPYVLGSAHQGCLPPFPADVFTIPQYGYLTLNNGSQAVGRSSFYCLEYFPSQMLRTGNNFQFTYTFEDVPFHSSYAHSQSLDRLMNPLIDQYLYYLSRTQTTGGTANTQTLGFSQGGPNTMANQAKNWLPGPCYRQQRVSTTTGQNNNSNFAWTAGTKYHLNGRNSLANPGIAMVTHKDDEERFFPSNGILIFGKQNAARDNADYSDVMLTSEEEIKTTNPVATEEYGIVADNLQQQNTAPQIGTVNSQGALPGMVWQNRDVYLQGPIWAKIPHTDGNFHPSPLMGGFGLKHPPPQILIKNTPVPADPPTTFNQSKLNSFITQYSTGQVSVEIEWELQKENSKRWNPEIQYTSNYYKSTSVDFAVNTEGVYSEPRPIGTRYLTRNL

SEQ ID NO: 3165 - DNA, 2208 bp, synthetic construct
  misc_feature 1..2208: note = source = /note="Description of Artificial Sequence: Synthetic polynucleotide"
  source 1..2208: mol_type = other DNA
atggctgccgatggttatcttccagattggctcgaggacactctctctgaaggaataagacagtggtggaagctcaaacctggcccaccaccgccaaagcccgcagagcggcataaggacgacagcaggggtcttgtgcttcctgggtacaagtacctcggacccttcaacggactcgacaaaggagagccggtcaacgaggcagacgccgcggccctcgagcacgacaaggcctacgaccggcagctcgacagcggagacaacccgtacctcaagtacaaccacgccgacgcggagtttcaggagcgccttaaagaagatacgtcttttgggggcaacctcgcaagagcagtattccaggcgaaaaagagggttcttgaacctctgggcctggttgaggagcctgttaagacggctccgggaaaaaagaggccggtagagcactctcctgcggagccagattcctcctccggaactggaaagtcgggccaacagcctgcaagaaagagattgaattttggtcagactggagacgcagactccgtacctgacccccagcctctcggacagccaccagcagccccctctggtctgggaactaatacgatggcttcaggcagtggcgcaccaatggcagacaataacgagggcgccgacggagtgggtaattcctcgggaaattggcattgcgattccacatggatgggcgacagagtcatcaccaccagcacccgcacctgggctctgcccacctacaacaaccatctgtacaagcaaatttccagccagtctggagccagcaacgacaaccactactttggctacagcaccccttgggggtattttgacttcaacagattccactgccacttctccccacgtgactggcaaagactcatcaacaacaattggggattccggcccaaaagactcaacttcaagctctttaacattcaagtcaaggaggtcacgcagaatgacggtacgacgacgattgccaataaccttaccagcacggttcaggtgtttactgactcggagtaccagctcccgtacgtcctcggctcggcgcatcaaggatgcctcccgccgttcccagcagacgtcttcatggtgccacagtatggatacctcaccctgaacaacgggagtcaggcggtaggacgctcttcattttactgcctggagtactttccttctcagatgctgcgtaccggaaacaactttaccttcagctacacctttgaggacgttccttttcacagcagctacgctcacagccagagtttggaccgtcttatgaatcctctcatcgaccagtacctgtattacttgagcagaacaaacactccaagcggaaccactacgcagtccaggcttcagttttctcaagccggagcgagtgacattcgggaccagtctaggaactggcttcctagaccctgttaccgccagcagcgagtatcaaagacagctgcggacaacaacaacagtgattactcgtggactggagctaccaagtatcacctcaatggaagagactctctggtgaatccgggcacagccatggccagccacaaggacgatgaagaaaagtattttcctcagagcggggttctcatcttcggaaaacaagactcgggaaaaactaatgtggacattgaaaaggtcatgattacagacgaagaggaaatcaggaccaccaatcccgtggctacggagcagtatggttctgtatctaccaatctccagagcggcaacacacaagcagctacctcagatgtcaacacacaaggcgttcttccaggcatggtccggcaggacagagacgtgtacctgcagggacccatctgggcaaagattccacacacggacggacattttcacccttctcctcttatgggaggatttggactgaagcaccctcccccgcagattctcatcaagaataccccggtacctgcgaatccttctaccaccttcagcgcggcaaagtttgcttccttcatcacacagtactccacggggcaggtcagcgtggagatcgagtgggagccgcagaaagagaacagcaaacgctggaaccccgagatccagtatacctccaactacaacaagtctgttaatgtggactttactgtggacactaatggcgtgtattcagagcctcgccccattggcacaagatacctgactcgtaatctgtaa

SEQ ID NO: 3166 - DNA, 2208 bp, synthetic construct
  misc_feature 1..2208: note = source = /note="Description of Artificial Sequence: Synthetic polynucleotide"
  source 1..2208: mol_type = other DNA
atggctgccgatggttatcttccagattggctcgaggacactctctctgaaggaataagacagtggtggaagctcaaacctggcccaccaccgccaaagcccgcagagcggcataaggacgacagcaggggtcttgtgcttcctgggtacaagtacctcggacccttcaacggactcgacaaaggagagccggtcaacgaggcagacgccgcggccctcgagcacgacaaggcctacgaccggcagctcgacagcggagacaacccgtacctcaagtacaaccacgccgacgcggagtttcaggagcgccttaaagaagatacgtcttttgggggcaacctcgcaagagcagtattccaggcgaaaaagagggttcttgaacctctgggcctggttgaggagcctgttaagacggctccgggaaaaaagaggccggtagagcactctcctgcggagccagattcctcctccggaactggaaagtcgggccaacagcctgcaagaaagagattgaattttggtcagactggagacgcagactccgtacctgacccccagcctctcggacagccaccagcagccccctctggtctgggaactaatacgatggcttcaggcagtggcgcaccaatggcagacaataacgagggcgccgacggagtgggtaattcctcgggaaattggcattgcgattccacatggatgggcgacagagtcatcaccaccagcacccgcacctgggctctgcccacctacaacaaccatctgtacaagcaaatttccagccagtctggagccagcaacgacaaccactactttggctacagcaccccttgggggtattttgacttcaacggattccactgccacttctccccacgtgactggcaaagactcatcaacaacaattggggattccggcccaaaagactcaacttcaagctctttaacattcaagtcaaggaggtcacgcagaatgacggtacgacgacgattgccaataaccttaccagcacggttcaggtgtttactgactcggagtaccagctcccgtacgtcctcggctcggcgcatcaaggatgcctcccgccgttcccagcagacgtcttcatggtgccacagtatggatacctcaccctgaacaacgggagtcaggcggtaggacgctcttcattttactgcctggagtactttccttctcagatgctgcgtaccggaaacaactttaccttcagctacacctttgaggacgttccttttcacagcagctacgctcacagccagagtttggaccgtcttatgaatcctctcatcgaccagtacctgtattacttgagcagaacaaacactccaagcggaaccactacgcagtccaggcttcagttttctcaagccggagcgagtgacattcgggaccagtctaggaactggcttcctggaccctgttaccgccagcagcgagtatcaaagacagctgcggacaacaacaacagtgattactcgtggactggagctaccaagtatcacctcaatggaagagactctctggtgaatccgggcacagccatggccagccacaaggacgatgaagaaaagtattttcctcagagcggggttctcatcttcggaaaacaagactcgggaaaaactaatgtggacattgaaaaggtcatgattacagacgaagaggaaatcaggaccaccaatcccgtggctacggagcagtatggttctgtatctaccaatctccagagcggcgacacacaagcagctacctcagatgtcaacacacaaggcgttcttccaggcatggcccggcaggacagagacgtgtacctgcagggacccatctgggcaaagattccacacacggacggacattttcacccttctcctcttatgggaggatttggactgaagcaccctcccccgcagattctcatcaagaataccccggtacctgcgaatccttctaccaccttcagcgcggcaaagtttgcttccttcatcacacagtactccacggggcaggtcagcgtggagatcgagtgggagccgcagaaagagaacagcaaacgctggaaccccgagatccagtatacctccaactacaacaagtctgttaatgtggactttactgtggacactaatggcgtgtattcagagcctcgccccattggcacaagatacctgactcgtaatctgtaa

SEQ ID NO: 3167 - DNA, 2208 bp, synthetic construct
  misc_feature 1..2208: note = source = /note="Description of Artificial Sequence: Synthetic polynucleotide"
  source 1..2208: mol_type = other DNA
atggctgccgatggttatcttccagattggctcgaggacactctctctgaaggaataagacagtggtggaagctcaaacctggcccaccaccgccaaagcccgcagagcggcataaggacgacagcaggggtcttgtgcttcctgggtacaagtacctcggacccttcaacggactcgacaaaggagagccggtcaacgaggcagacgccgcggccctcgagcacgacaaggcctacgaccggcagctcgacagcggagacaacccgtacctcaagtacaaccgcgccgacgcggagtttcaggagcgccttaaagaagatacgtcttttgggggcaacctcgcaagagcagtattccaggcgaaaaagagggttcttgaacctctgggcctggttgaggagcctgttaagacggctccgggaaaaaagaggccggtagagcactctcctgcggagccagattcctcctccggaactggaaagtcgggccaacagcctgcaagaaagagattgaattttggtcagactggagacgcagactccgtacctgacccccagcctctcggacagccaccagcagccccctctggtctgggaactaatacgatggcttcaggcagtggcgcaccaatggcagacaataacgagggcgccgacggagtgggtaattcctcgggaaattggcattgcgattccacatggatgggcgacagagtcatcaccaccagcacccgcacctgggctctgcccacctacaacaaccatctgtacaagcaaatttccagccagtctggagccagcaacgacaaccactactttggctacagcaccccttgggggtattttgacttcaacagattccactgccacttctccccacgtgactggcaaagactcatcaacaacaattggggattccggcccaaaagactcaacttcaagctctttaacattcaagtcaaggaggtcacgcagaatgacggtacgacgacgattgccaataaccttaccagcacggttcaggtgtttactgactcggagtaccagctcccgtacgtcctcggctcggcgcatcaaggatgcctcccgccgttcccagcagacgtcttcatggtgccacagtatggatacctcaccctgaacaacgggagtcaggcggtaggacgctcttcattttactgcctggagtactttccttctcagatgctgcgtaccggaaacaactttaccttcagctacacctttgaggacgttccttttcacagcagctacgctcacagccagagtttggaccgtcttatgaatcctctcatcgaccagtacctgtattacttgagcagaacaaacactccaagcggaaccactacgcagtccaggcttcagttttctcaagccggagcgagtgacattcgggaccagtctaggaactggcttcctggaccctgttaccgccagcagcgagtatcaaagacagctgcggacaacaacaacagtgattactcgtggactggagctaccaagtatcacctcaatggaagagactctctggtgaatccgggcacagccatggccagccacaaggacgatgaagaaaagtattttcctcagagcggggttctcatcttcggaaaacaagactcgggaaaaactaatgtggacattgaaaaggtcatgattacagacgaagaggaaatcaggaccaccaatcccgtggctacggagcagtatggttctgtatctaccaatctccagagcggcaacacacaagcagctacctcagatgtcaacacacaaggcgttcttccaggcatggtccggcaggacagagacgtgtacctgcagggacccatctgggcaaagattccacacacggacggacattttcacccttctcctcttatgggaggatttggactgaagcaccctcccccgcagattctcatcaagaataccccggtacctgcgaatccttctaccaccttcagcgcggcaaagtttgcttccttcatcacacagtactccacggggcaggtcagcgtggagatcgagtgggagccgcagaaagagaacagcaaacgctggaaccccgagatccagtatacctccaactacaacaagtctgttaatgtggactttactgtggacactaatggcgtgtattcagagcctcgccccattggcacaagatacctgactcgtaatctgtaa

SEQ ID NO: 3168 - DNA, 2208 bp, synthetic construct
  misc_feature 1..2208: note = source = /note="Description of Artificial Sequence: Synthetic polynucleotide"
  source 1..2208: mol_type = other DNA
atggctgccgatggttatcttccagattggctcgaggacactctctctgaaggaataagacagtggtggaagctcaaacctggcccaccaccgccaaagcccgcagagcggcataaggacgacagcaggggtcttgtgcttcctgggtacaagtacctcggacccttcaacggactcgacaaaggagagccggtcaacgaggcagacgccgcggccctcgagcacgacaaggcctacgaccggcagctcgacagcggagacaacccgtacctcaagtacaaccacgccgacgcggagtttcaggagcgccttaaagaagatacgtcttttgggggcaacctcgcaagagcagtattccaggcgaaaaagagggttcttgaacctctgggcctggttgaggagcctgttaagacggctccgggaaaaaagaggccggtagagcactctcctgcggagccagattcctcctccggaactggaaagtcgggccaacagcctgcaagaaagagattgaattttggtcagactggagacgcagactccgtacctgacccccagcctctcggacagccaccagcagccccctctggtctgggaactaatacgatggcttcaggcagtggcgcaccaatggcagacaataacgagggcgccgacggagtgggtaattcctcgggaaattggcattgcgattccacatggatgggcgacagagtcatcaccaccagcacccgcacctgggctctgcccacctacaacaaccatctgtacaagcaaatttccagccagtctggagccagcaacgacaaccactacttcggctacagcaccccttgggggtattttgacttcaacagattccactgccacttctccccacgtgactggcaaagactcatcaacaacaattggggattccggcccaaaagactcaacttcaagctctttaacattcaagtcaaggaggtcacgcagaatgacggtacgacgacgattgccaataaccttaccagcacggttcaggtgtttactgactcggagtaccagctcccgtacgtcctcggctcggcgcatcaaggatgcctcccgccgttcccagcagacgtcttcatggtgccacagtatggatacctcaccctgaacaacgggagtcaggcggtaggacgctcttcattttactgcctggagtactttccttctcagatgctgcgtaccggaaacaactttaccttcagctacacctttgaggacgttccttttcacagcagctacgctcacagccagagtttggaccgtcttatgaatcctctcatcgaccagtacctgtattacttgagcagaacaaacactccaagcggaaccactacgcagtccaggcttcagttttctcaagccggagcgagtgacattcgggaccagtctaggaactggcttcctggaccctgttaccgccagcagcgagtatcaaagacagctgcggacaacaacaacagtgattactcgtggactggagctaccaagtatcacctcaatggaagagactctctggtgaatccgggcacagccatggccagccacaaggacgatgaagaaaagtattttcctcagagcggggttctcatcttcggaaaacaagactcgggaaaaactaatgtggacattgaaaaggtcatgattacagacgaagaggaagtcaggaccaccaatcccgtggctacggagcagtatggttctgtatctaccaatctccagagcggcaacacacaagcagctacctcagatgtcaacacacaaggcgttcttccaggcatggtccggcaggacagagacgtgtacctgcagggacccatctgggcaaagattccacacacggacggacattttcacccttctcctcttatgggaggatttggactgaagcaccctcccccgcagattctcatcaagaataccccggtacctgcgaatccttctaccaccttcagcgcggcaaagtttgcttccttcatcacacagtactccacggggcaggtcagcgtggagatcgagtgggagccgcagaaagagaacagcaaacgctggaaccccgagatccagtatacctccaactacaacaagtctgttaatgtggactttactgtggacactaatggcgtgtattcagagcctcgccccattggcacaagatacctgactcgtaatctgtaa

SEQ ID NO: 3169 - DNA, 2208 bp, synthetic construct
  misc_feature 1..2208: note = source = /note="Description of Artificial Sequence: Synthetic polynucleotide"
  source 1..2208: mol_type = other DNA
atggctgccgatggttatcttccagattggctcgaggacactctctctgaaggaataagacagtggtggaagctcaaacctggcccaccaccgccaaagcccgcagagcggcataaggacgacagcaggggtcttgtgcttcctgggtacaagtacctcggacccttcaacggactcgacaaaggagagccggtcaacgaggcagacgccgcggccctcgagcacgacaaggcctacgaccggcagctcgacagcggagacaacccgtacctcaagtacaaccacgccgacgcggagtttcaggagcgccttaaagaagatacgtcttttgggggcaacctcgcaagagcagtattccaggcgaaaaagagggttcttgaacctctgggcctggttgaggagcctgttaagacggctccgggaaaaaagaggccggtagagcactctcctgcggggccagattcctcctccggaactggaaagtcgggccaacagcctgcaagaaagagattgaattttggtcagactggagacgcagactccgtacctgacccccagcctctcggacagccaccagcagccccctctggtctgggaactaatacgatggcttcaggcagtggcgcaccaatggcagacaataacgagggcgccgacggagtgggtaattcctcgggaaattggcattgcgattccacatggatgggcgacagagtcatcaccaccagcacccgcacctgggctctgcccacctacaacaaccatctgtacaagcaaatttccagccagtctggagccagcaacgacaaccactactttggctacagcaccccttgggggtattttgacttcaacagattccactgccacttctccccacgtgactggcaaagactcatcaacaacaattggggattccggcccaaaagactcaacttcgagctctttaacattcaagtcaaggaggtcacgcagaatgacggtacgacgacgattgccaataaccttaccagcacggttcaggtgtttactgactcggagtaccagctcccgtacgtcctcggctcggcgcatcaaggatgcctcccgccgttcccagcagacgtcttcatggtgccacagtatggatacctcaccctgaacaacgggagtcaggcggtaggacgctcttcattttactgcctggagtactttccttctcagatgctgcgtaccggaaacaactttaccttcagctacacctttgaggacgttccttttcacagcagctacgctcacagccagagtttggaccgtctcatgaatcctctcatcgaccagtacctgtattacttgagcagaacaaacactccaagcggaaccactacgcagtccaggcttcagttttctcaagccggagcgagtgacattcgggaccagtctaggaactggcttcctggaccctgttaccgccagcagcgagtatcaaagacagctgcggacaacaacaacagtgattactcgtggactggagctaccaagtatcacctcaatggaagagactctctggtgaatccgggcacagccatggccagccacaaggacgatgaagaaaagtattttcctcagagcggggttctcatcttcggaaaacaagactcgggaaaaactaatgtggacattgaaaaggtcatgattacagacgaagaggaaatcaggaccaccaatcccgtggctacggagcagtatggttctgtatctaccaatctccagagcggcaacacacaagcagctacctcagatgtcaacacacaaggcgttcttccaggcatggtctggcaggacagagacgtgtacctgcagggacccatctgggcaaagattccacacacggacggacactttcacccttctcctcttatgggaggatttggactgaagcaccctcccccgcagattctcatcaagagtaccccggtacctgcgaatccttctaccaccttcagcgcggcaaagtttgcttccttcatcacacagtactccacggggcaggtcagcgtggagatcgagtgggagctgcagaaagagaacagcaaacgctggaaccccgagatccagtatacctccaactacaacaagtctgttaatgtggactttactgtggacactaatggcgtgtattcagagcctcgccccattggcacaagatacctgactcgtaatctgtaa

SEQ ID NO: 3170 - DNA, 2208 bp, synthetic construct
  misc_feature 1..2208: note = source = /note="Description of Artificial Sequence: Synthetic polynucleotide"
  source 1..2208: mol_type = other DNA
atggctgccgatggttatcttccagattggctcgaggacactctctctgaaggaataagacagtggtggaagctcaaacctggcccaccaccgccaaagcccgcagagcggcataaggacgacagcaggggtcttgtgcttcctgggtacaagtacctcggacccttcaacggactcgacaaaggagagccggtcaacgaggcagacgccgcggccctcgagcacgacaaggcctacgaccggcagctcgacagcggagacaacccgtacctcaagtacaaccacgccgacgcggagtttcaggagcgccttaaagaagatacgtcttttgggggcaacctcgcaagagcagtattccaggcgaaaaagagggttcttgaacctctgggcctggttgaggagcctgttaagacggctccgggaaaaaagaggccggtagagcactctcctgcggggccagattcctcctccggaactggaaagtcgggccaacagcctgcaagaaagagattgaattttggtcagactggagacgcagactccgtacctgacccccagcctctcggacagccaccagcagccccctctggtctgggaactaatacgatggcttcaggcagtggcgcaccaatggcagacaataacgagggcgccgacggagtgggtaattcctcgggaaattggcattgcgattccacgtggatgggcgacagagtcatcaccaccagcacccgcacctgggctctgcccacctacaacaaccatctgtacaagcaaatttccagccagtctggagccagcaacgacaaccactactttggctacagcaccccttgggggtattttgacttcaacagattccactgctacttctccccacgtgactggcaaagactcatcaacaacaattggggattccggcccaaaagactcaacttcgagctctttaacattcaagtcaaggaggtcacgcagaatgacggtacgacgacgattgccaataaccttaccagcacggttcaggtgtttactgactcggagtaccagctcccgtacgtcctcggctcggcgcatcaaggatgcctcccgccgttcccagcagacgtcttcatggtgccacagtatggatacctcaccctgaacaacgggagtcaggcggtaggacgctcttcattttactgcctggagtactttccttctcagatgctgcgtaccggaaacaactttaccttcagctacacctttgaggacgttccttttcacagcagctacgctcacagccagagtttggaccgtctcatgaatcctctcatcgaccagtacctgtattacttgagcagaacaaacactccaagcggaaccactacgcagtccaggcttcagttttctcaagccggagcgagtgacattcgggaccagtctaggaactggcttcctggaccctgttaccgccagcagcgagtatcaaagacagctgcggacaacaacaacagtgattactcgtggactggagctaccaagtatcacctcaatggaagagactctctggtgaatccgggcacagccatggccagccacaaggacgatgaagaaaagtattttcctcagagcggggttctcatcttcggaaaacaagactcgggaaaaactaatgtggacattgaaaaggtcatgattacagacgaagaggaaatcaggaccaccaatcccgtggctacggagcagtatggttctgtatctaccaatctccagagcggcaacacacaagcagctacctcagatgtcaacacacaaggcgttcttccaggcatggtctggcaggacagagacgtgtacctgcagggacccatctgggcaaagattccacacacggacggacactttcacccttctccacttatgggaggatttggactgaagcaccctcccccgcagattctcatcaagagtaccccggtacctgcgaatccttctaccaccttcagcgcggcaaagtttgcttccttcatcacacagtactccacggggcaggtcagcgtggagatcgagtgggagctgcagaaagagaacagcaaacgctggaaccccgagatccagtatacctccaactacaacaagtccgttaatgtggactttactgtggacactaatggcgtgtattcagagcctcgccccattggcacaagatacctgactcgtaatctgtaa

SEQ ID NO: 3171 - DNA, 2205 bp, synthetic construct
  misc_feature 1..2205: note = source = /note="Description of Artificial Sequence: Synthetic polynucleotide"
  source 1..2205: mol_type = other DNA
atggctgccgatggttatcttccagattggctcgaggacactctctctgaaggaataagacagtggtggaagctcaaacctggcccaccaccgccaaagcccgcagagcggcataaggacgacagcaggggtcttgtgcttcctgggtacaagtacctcggacccttcaacggactcgacaaaggagagccggtcaacgaggcagacgccgcggccctcgagcacgacaaggcctacgaccggcagctcgacagcggagacaacccgtacctcaagtacaaccacgccgacgcggagtttcaggagcgccttaaagaagatacgtcttttgggggcaacctcgcaagagcagtattccaggcgaaaaagagggttcttgaacctctgggcctggttgaggagcctgttaagacggctccgggaaaaaagaggccggtagagcactctcctgcggagccagattcctcctccggaactggaaagtcgggccaacagcctgcaagaaagagattgaattttggtcagactggagacgcagactccgtacctgacccccagcctctcggacagccaccagcagccccctctggtctgggaactaatacgatggcttcaggcagtggcgcaccaatggcagacaataacgagggcgccgacggagtgggtaattcctcgggaaattggcattgcgattccacatggatgggcgacagagtcatcaccaccagcacccgcacctgggctctgcccacctacaacaaccatctgtacaagcaaatttccagccagtctggagccagcaacgacaaccactactttggctacagcaccccttgggggtattttgacttcaacagattccactgccacttctccccacgtgactggcaaagactcatcaacaacaattggggattccggcccaaaagactcaacttcaagctctttaacattcaagtcaaggaggtcacgcagaatgacggtacgacgacgattgccaataaccttaccagcacggttcaggtgtttactgactcggagtaccagctcccgtacgtcctcggctcggcgcatcaaggatgcctcccgccgttcccagcagacgtcttcatggtgccacagtatggatacctcaccctgaacaacgggagtcaggcggtaggacgctcttcattttactgcctggagtactttccttctcagatgctgcgtaccggaaacaactttaccttcagctacacctttgaggacgttccttttcacagcagctacgctcacagccagagtttggaccgtcttatgaatcctctcatcgaccagtacctgtattacttgagcagaacaaacactccaagcggaaccactacgcagtccaggcttcagttttctcaagccggagcgagtgacattcgggaccagtctaggaactggcttcctggaccctgttaccgccagcagcgagtatcaaagacagctgcggacaacaacagtgattactcgtggactggagctaccaagtatcacctcaatggaagagactctctggtgaatccgggcacagccatggccagccacaaggacgatgaagaaaagtattttcctcagagcggggttctcatcttcggaaaacaagactcgggaaaaactaatgtggacattgaaaaggtcatgattacagacgaagaggaaatcaggaccaccaatcccgtggctacggagcagtatggttctgtatctaccaatctccagagcggcaacacacaagcagctacctcagatgtcaacacacaaggcgttcttccaggcatggtccggcaggacagagacgtgtacctgcagggacccatctgggcaaagattccacacacggacggacattttcacccttctcctcttatgggaggatttggactgaagcaccctcccccgcagattctcatcaagaataccccggtacctgcgaatccttctaccaccttcagcgcggcaaagtttgcttccttcatcacacagtactccacggggcaggtcagcgtggagatcgagtgggagccgcagaaagagaacagcaaacgctggaaccccgagatccagtatacctccaactacaacaagtctgttaatgtggactttactgtggacactaatggcgtgtattcagagcctcgccccattggcacaagatacctgactcgtaatctgtaa

SEQ ID NO: 3172 - DNA, 2208 bp, synthetic construct
  misc_feature 1..2208: note = source = /note="Description of Artificial Sequence: Synthetic polynucleotide"
  source 1..2208: mol_type = other DNA
atggctgccgatggttatcttccagattggctcgaggacactctctctgaaggaataagacagtggtggaagctcaaacctggcccaccaccgccaaagcccgcagagcggcataaggacgacagcaggggtcttgtgcttcctgggtacaagtgcctcggacccttcaacggactcgacaaaggagagccggtcaacgaggcagacgccgcggccctcgagcacgacaaggcctacgaccggcagctcgacagcggagacaacccgtacctcaagtacaaccacgccgacgcggagtttcaggagcgccttaaagaagatacgtcttttgggggcaacctcgcaagagcagtattccaggcgaaaaagagggttcttgaacctctgggcctggttgaggagcctgttaagacggctccgggaaaaaagaggccggtagagcactctcctgcggagtcagattcctcctccggaactggaaagtcgggccaacagcctgcaagaaagagattgaattttggtcagactggagacgcagactccgtacctgacccccagcctctcggacagccaccagcagccccctctggtctgggaactaatacgatggcttcaggcagtggcgcaccaatggcagacaataacgagggcgccgacggagtgggtaattcctcgggaaattggcattgcgattccacatggatgggcgacagagtcatcaccaccagcacccgcacctgggctctgcccacctacaacaaccatctgtacaagcaaatttccagccagtctggagccagcaacgacaaccactactttggctacagcaccccttgggggtattttgacttcaacagattccactgccacttctccccacgtgactggcaaagactcatcaacaacaattggggattccggcccaaaagactcaacttcaagctctttaacattcaagtcaaggaggtcacgcagaatgacggtacgacgacgattgccaataaccttaccagcacggttcaggtgtttactgactcggagtaccagctcccgtacgtcctcggctcggcgcatcaaggatgcctcccgccgttcccagcagacgtcttcatggtgccacagtatggatacctcaccctgaacaacgggagtcaggcggtaggacgctcttcattttactgcctggagtactttccttctcagatgctgcgtaccggaaacaactttaccttcagctacacctttgaggacgttccttttcacagcagctacgctcacagccagagtttggaccgtctcatgaatcctctcatcgaccagtacctgtattacttgagcagaacaaacactccaagcggaaccactacgcagtccaggcttcagttttctcaagccggagcgagtgacattcgggaccagtctaggaactggcttcctggaccctgttaccgccagcagcgagtatcaaagacagctgcggacaacaacaacagtgattactcgtggactggagctaccaagtatcacctcaatggaagagactctctggtgaatccgggcacagccatggccagccacaaggacgatgaagaaaagtattttcctcagagcggggttctcatcttcggaaaacaagactcgggaaaaactaatgtggacattgaaaaggtcatgattacagacgaagaggaaatcaggaccaccaatcccgtggctacggagcagtatggttctgtatctaccaatctccagagcggcaacacacaagcagctacctcagatgtcaacacacaaggcgttcttccaggcatggtctggcaggacagagacgtgtacctgcagggacccatctgggcaaagattccacacacggacggacattttcacccttctcctcttatgggaggatttggactgaagcaccctcccccgcagattctcatcaagaataccccggtacctgcgaatccttctaccaccttcagcgcggcaaagtttgcttccttcatcacacagtactccacggggcaggtcagcgtggagatcgagtgggagctgcagaaagagaacagcaaacgctggaaccccgagatccagtatacctccaactacaacaagtctgttaatgtggactttactgtggacactaatggcgtgtattcagagcctcgccccattggcacaagatacctgactcgtaatctgtaa

SEQ ID NO: 3173 - DNA, 2208 bp, synthetic construct
  misc_feature 1..2208: note = source = /note="Description of Artificial Sequence: Synthetic polynucleotide"
  source 1..2208: mol_type = other DNA
atggctgccgatggttatcttccagattggctcgaggacattctctctgaaggaataagacagtggtggaagctcaaacctggcccaccaccaccaaagcccgcagagcggcataaggacgacagcaggggtcttgtgcttcctgggtacaagtacctcggacccttcaacggactcgacaaaggagagccggtcaacgaggcagacgccgcggccctcgagcacgacaaggcctacgaccggcagctcgacagcggagacaacccgtacctcaagtacaaccacgccgacgcggagtttcaggagcgtcttaaagaagatacgtcttttgggggcaacctcggacgagcagtcttccaggcaaaaaagagggttcttgaacctctgggcctggttgaggaacctgttaagacggctccgggaaaaaagaggccggtagagcaatctcctgcggagccagactcctcctcgggaaccggaaaggcgggcaaccagcctgcaagaaagagattgaattttggtcagactggagacgcagactccgtacctgacccccagcctctcggacagccaccagcagccccctctggtctgggaactaatacgatggcttcaggcagtggcgcaccaatggcagacaataacgagggcgccgacggagtgggtaattcctcgggaaattggcattgcgattccacatggatgggcgacagagtcatcaccaccagcacccgcacctgggctctgcccacctacaacaaccatctgtacaagcaaatttccagccagtctggagccagcaacgacaaccactactttggctacagcaccccttgggggtattttgacttcaacagattccactgccacttctccccacgtgactggcaaagactcatcaacaacaattggggattccggcccaaaagactcaacttcaagctctttaacattcaagtcaaggaggtcacgcagaatgacggtacgacgacgattgccaataaccttaccagcacggttcaggtgtttactgactcggagtaccagctcccgtacgtcctcggctcggcgcatcaaggatgcctcccgccgttcccagcagacgtcttcatggtgccacagtatggatacctcaccctgaacaacgggagtcaggcggtaggacgctcttcattttactgcctggagtactttccttctcagatgctgcgtaccggaaacaactttaccttcagctacacctttgaggacgttccttttcacagcagctacgctcacagccagagtttggaccgtcttatgaatcctctcatcgaccagtacctgtattacttgagcagaacaaacactccaagcggaaccactacgcagtccaggcttcagttttctcaagccggagcgagtgacattcgggaccagtctaggaactggcttcctggaccctgttaccgccagcagcgagtatcaaagacagctgcggacaacaacaacagtgattactcgtggactggagctaccaagtatcacctcaatggaagagactctctggtgaatccgggcacagccatggccagccacaaggacgatgaagaaaagtattttcctcagagcggggttctcatcttcggaaaacaagactcgggaaaaactaatgtggacattgaaaaggtcatgattacagacgaagaggaaatcaggaccaccaatcccgtggctacggagcagtatggttctgtatctaccaatctccagagcggcaacacacaagcagctacctcagatgtcaacacacaaggcgttcttccaggcatggtccggcaggacagagacgtgtacctgcagggacccatctgggcaaagattccacacacggacggacattttcacccttctcctcttatgggaggatttggactgaagcaccctcccccgcagattctcatcaagaataccccggtacctgcgaatccttctaccaccttcagcgcggcaaagtttgcttccttcatcacacagtactccacggggcaggtcagcgtggagatcgagtgggagccgcagaaagagaacagcaaacgctggaaccccgagatccagtatacctccaactacaacaagtctgttaatgtggactttactgtggacactaatggcgtgtattcagagcctcgccccattggcacaagatacctgactcgtaatctgtaa

SEQ ID NO: 3174 - DNA, 2208 bp, synthetic construct
  misc_feature 1..2208: note = source = /note="Description of Artificial Sequence: Synthetic polynucleotide"
  source 1..2208: mol_type = other DNA
atggctgccgatggttatcttccagattggctcgaggacactctctctgaaggaataagacagtggtggaagctcaaacctggcccaccaccgccaaagcccgcagagcggcataaggacgacagcaggggtcttgtgcttcctgggtacaagtacctcggacccttcaacggactcgacaaaggagagccggtcaacgaggcagacgccgcggccctcgagcacgacaaggcctacgaccggcagctcgacagcggagacaacccgtacctcaagtacaaccacgccgacgcggagtttcaggagcgccttaaagaagatacgtcttttgggggcaacctcgcaagagcagtattccaggcgaaaaagagggttcttgaacctctgggcctggttgaggagcctgttaagacggctccgggaaaaaagaggccggtagagcactctcctgcggagccagattcctcctccggaactggaaagtcgggccaacagcctgcaagaaagagattgaattttggtcagactggagacgcagactccgtacctgacccccagcctctcggacagccaccagcagccccctctggtctgggaactaatacgatggcttcaggcagtggcgcaccaatggcagacaataacgagggcgccgacggagtgggtaattcctcgggaaattggcattgcgattccacatggatgggcgacagagtcatcaccaccagcacccgcacctgggctctgcccacctacaacaaccatctgtacaagcaaatttccagccagtctggagccagcaacgacaaccactacttcggctacagcaccccttgggggtattttgacttcaacagattccactgccacttctccccacgtgactggcaaagactcatcaacaacaattggggattccggcccaaaagactcaacttcaagctctttaacattcaagtcaaggaggtcacgcagaatgacggtacgacgacgattgccaataaccttaccagcacggttcaggtgtttactgactcggagtaccagctcccgtacgtcctcggctcggcgcatcaaggatgcctcccgccgttcccagcagacgtcttcatggtgccacagtatggatacctcaccctgaacaacgggagtcaggcggtaggacgctcttcattttactgcctggagtactttccttctcagatgctgcgtaccggaaacaactttaccttcagctacacctttgaggacgttccttttcacagcagctacgctcacagccagagtttggaccgtcttatgaatcctctcatcgaccagtacctgtattacttgagcagaacaaacactccaagcggaaccactacgcagtccaggcttcagttttctcaagccggagcgagtgacattcgggaccagtctaggaactggcttcctggaccctgttaccgccagcagcgagtatcaaagacagctgcggacaacaacaacagtgattactcgtggactggagctaccaagtatcacctcaatggaagagactctctggtgaatccgggcacagccatggccagccacaaggacgatgaagaaaagtattttcctcagagcggggttctcatcttcggaaaacaagactcgggaaaaactaatgtggacattgaaaaggtcatgattacagacgaagaggaaatcaggaccaccaatcccgtggctacggagcagtatggttctgtatctaccaatctccagagcggcaacacacaagcagctacctcagatgtcaacacacaaggcgttcttccaggcatggtccggcaggacagagacgtgtacctgcagggacccatctgggcaaagattccacacacggacggacattttcacccttctcctcttatgggaggatttggactgaagcaccctcccccgcagattctcatcaagaataccccggtacctgcgaatccttctaccaccttcagcgcggcaaagtttgcttccttcatcacacagtactccacggggcaggtcagcgtggagatcgagtgggagccgcagaaagagaacagcaaacgctggaaccccgagatccagtatacctccaactacaacaagtctgttaatgtggactttactgtggacactaatggcgtgtattcagagcctcgccccattggcacaagatgcctgactcgtaatctgtaa

SEQ ID NO: 3175 - DNA, 2208 bp, synthetic construct
  misc_feature 1..2208: note = source = /note="Description of Artificial Sequence: Synthetic polynucleotide"
  source 1..2208: mol_type = other DNA
atggctgccgatggttatcttccagattggctcgaggacactctctctgaaggaataagacagtggtggaagctcaaacctggcccaccaccgccaaagcccgcagagcggcataaggacgacagcaggggtcttgtgcttcctgggtacaagtacctcggacccttcaacggactcgacaaaggagagccggtcaacgaggcagacgccgcggccctcgagcacgacaaggcctacgaccggcagctcgacagcggagacaacccgtacctcaagtacaaccacgccgacgcggagtttcaggagcgccttaaagaagatacgtcttttgggggcaacctcgcaagagcagtattccaggcgaaaaagagggttcttgaacctctgggcctggttgaggagcctgttaagacggctccgggaaaaaagaggccggtagagcactctcctgcggagccagattcctcctccggaactggaaagtcgggccaacagcctgcaagaaagagattgaattttggtcagactggagacgcagactccgtacctgacccccagcctctcggacagccaccagcagccccctctggtctgggaactaatacgatggcttcaggcagtggcgcaccaatggcagacaataacgagggcgccgacggagtgggtaattcctcgggaaattggcattgcgattccacatggatgggcgacagagtcatcaccaccagcacccgcacctgggctctgcccacctacaacaaccatctgtacaagcaaatttccagccagtctggagccagcaacgacaaccactacttcggctacagcaccccttgggggtattttgacttcaacagattccactgccacttctccccacgtgactggcaaagactcatcaacaacaattggggattccggcccaaaagactcaacttcaagctctttaacattcaagtcaaggaggtcacgcagaatgacggtacgacgacgattgccaataaccttaccagcacggttcaggtgtttactgactcggagtaccagctcccgtacgtcctcggctcggcgcatcaaggatgcctcccgccgttcccagcagacgtcttcatggtgccacagtatggatacctcaccctgaacaacgggagtcaggcggtaggacgctcttcattttactgcctggagtactttccttctcagatgctgcgtaccggaaacaactttaccttcagctacacctttgaggacgttccttttcacagcagctacgctcacagccagagtttggaccgtcttatgaatcctctcatcgaccagtacctgtattacttgagcagaacaaacactccaagcggaaccactacgcagtccaggcttcagttttctcaagccggagcgagtgacattcgggaccagtctaggaactggcttcctggaccctgttaccgccagcagcgagtatcaaagacagctgcggacaacaacaacagtgattactcgtggactggagctaccaagtatcacctcaatggaagagactctctggtgaatccgggcacagccatggccagccacaaggacgatgaagaaaagtattttcctcagagcggggttctcatcttcggaaaacaagactcgggaaaaactaatgtggacattgaaaaggtcatgattacagacgaagaggaaatcaggaccaccaatcccgtggctacggagcagtatggttctgtatctaccaatctccagagcggcaacacacaagcagctacctcagatgtcaacacacaaggcgttcttccaggcatggtccggcagggcagagacgtgtacctgcagggacccatctgggcaaagattccacacacggacggacattttcacccttctcctcttatgggaggatttggactgaagcaccctcccccgcagattctcatcaagaataccccggtacctgcgaatccttctaccaccttcagcgcggcaaagtttgcttccttcatcacacagtactccacggggcaggtcagcgtggagatcgagtgggagccgcagaaagagaacagcaaacgctggaaccccgagatccagtatacctccaactacaacaagtctgttaatgtggactttactgtggacactaatggcgtgtattcagagcctcgccccattggcacaagatacctgactcgtaatctgtaa

SEQ ID NO: 3176 - DNA, 2208 bp, synthetic construct
  misc_feature 1..2208: note = source = /note="Description of Artificial Sequence: Synthetic polynucleotide"
  source 1..2208: mol_type = other DNA
atggctgccgatggttatcttccagattggctcgaggacactctctctgaaggaataagacagtggtggaagctcaaacctggcccaccaccgccaaagcccgcagagcggcataaggacgacagcaggggtcttgtgcttcctgggtacaagtacctcggacccttcaacggactcgacaaaggagagccggtcaacgaggcagacgccgcggccctcgagcacgacaaggcctacgaccggcagctcgacagcggagacaacccgtacctcaagtacaaccacgccgacgcggagtttcaggagcgccttaaagaagatacgtcttttgggggcaacctcgcaagagcagtattccaggcgaaaaagagggttcttgaacctctgggcctggttgaggagcctgttaagacggctccgggaaaaaagaggccggtagagcactctcctgcggagccagattcctcctccggaactggaaagtcgggccaacagcctgcaagaaagagattgaattttggtcagactggagacgcagactccgtacctgacccccagcctctcggacagccaccagcagccccctctggtctgggaactaatacgatggcttcaggcagtggcgcaccaatggcagacaataacgagggcgccgacggagtgggtaattcctcgggaaattggcattgcgattccacatggatgggcgacagagtcatcaccaccagcacccgcacctgggctctgcccacctacaacaaccatctgtacaagcaaatttccagccagtctggagccagcaacgacaaccactacttcggctacagcaccccttgggggtattttgacttcaacagattccactgccacttctccccacgtgactggcaaagactcatcaacaacaattggggattccggcccaaaagactcaacttcaagctctttaacattcaagtcaaggaggtcacgcagaatgacggtacgacgacgattgccaataaccttaccagcacggttcaggtgtttactgactcggagtaccagctcccgtacgtcctcggctcggcgcatcaaggatgcctcccgccgttcccagcagacgtcttcatggtgccacagtatggatacctcaccctgaacaacgggagtcaggcggtaggacgctcttcattttactgcctggagtactttccttctcagatgctgcgtaccggaaacaactttaccttcagctacacctttgaggacgttccttttcacagcagctacgctcacagccagagtttggaccgtcttatgaatcctctcatcgaccagtacctgtattacttgagcagaacaaacactccaagcggaaccactacgcagtccaggcttcagttttctcaagccggagcgagtgacattcgggaccagtctaggaactggcttcctggaccctgttaccgccagcagcgagtatcaaagacagctgcggacaacaacaacagtgattactcgtggactggagctaccaagtatcacctcaatggaagagactctctggtgaatccgggcacagccatggccagccacaaggacgatgaagaaaagtattttcctcagagcggggttctcatcttcggaaaacaagactcgggaaaaactaatgtggacattgaaaaggtcatgattacagacgaaggggaaatcaggaccaccaatcccgtggctacggagcagtatggttctgtatctaccaatctccagagcggcaacacacaagcagctacctcagatgtcaacacacaaggcgttcttccaggcatggtccggcaggacagagacgtgtacctgcagggacccatctgggcaaagattccacacacggacggacattttcacccttctcctcttatgggaggatttggactgaagcaccctcccccgcagattctcatcaagaataccccggtacctgcgaatccttctaccaccttcagcgcggcaaagtttgcctccttcatcacacagtactccacggggcaggtcagcgtggagatcgagtgggagccgcagaaagagaacagcaaacgctggaaccccgagatccagtatacctccaactacaacaagtctgttaatgtggactttactgtggacactaatggcgtgtattcagagcctcgccccattggcacaagatacctgactcgtaatctgtaa

SEQ ID NO: 3177 - DNA, 2208 bp, synthetic construct
  misc_feature 1..2208: note = source = /note="Description of Artificial Sequence: Synthetic polynucleotide"
  source 1..2208: mol_type = other DNA
atggctgccgatggttatcttccagattggctcgaggacactctctctgaaggaataagacagtggtggaagctcaaacctggcccaccaccgccaaagcccgcagagcggcataaggacgacagcaggggtcttgtgcttcctgggtacaagtacctcggacccttcaacggactcgacaaaggagagccggtcaacgaggcagacgccgcggccctcgagcacgacaaggcctacgaccggcagctcgacagcggagacaacccgtacctcaagtacaaccacgccgacgcggagtttcaggagcgccttaaagaagatacgtcttttgggggcaacctcgcaagagcagtattccaggcgaaaaagagggttcttgaacctctgggcctggttgaggagcctgttaagacggctccgggaaaaaagaggccggtagagcactctcctgcggagccagattcctcctccggaactggaaagtcgggccaacagcctgcaagaaagagattgaattttggtcagactggagacgcagactccgtacctgacccccagcctctcggacagccaccagcagccccctctggtctgggaactaatacgatggcttcaggcagtggcgcaccaatggcagacaataacgagggcgccgacggagtgggtaattcctcgggaaattggcattgcgattccacgtggatgggcgacagagtcatcaccaccagcacccgcacctgggctctgcccacctacaacaaccatctgtacaagcaaatttccagccagtctggagccagcaacgacaaccactactttggctacagcaccccttgggggtattttgacttcaacagattccactgccacttctccccacgtgactggcaaagactcatcaacaacaattggggattccggcccaaaagactcaacttcgagctctttaacattcaagtcaaggaggtcacgcagaatgacggtacgacgacgattgccaataaccttaccagcacggttcaggtgtttactgactcggagtaccagctcccgtacgtcctcggctcggcgcatcaaggatgcctcccgccgttcccagcagacgtcttcatggtgccacagtatggatacctcaccctgaacaacgggagtcaggcggtaggacgctcttcattttactgcctggagtactttccttctcagatgctgcgtaccggaaacaactttaccttcagctacacctttgaggacgttccttttcacagcagctacgctcacagccagagtttggaccgtctcatgaatcctctcatcgaccagtacctgtattacttgagcagaacaaacactccaagcggaaccactacgcagtccaggcttcagttttctcaagccggagcgagtgacattcgggaccagtctaggaactggcttcctggaccctgttaccgccagcagcgagtatcaaagacagctgcggacaacaacaacagtgattactcgtggactggagctaccaagtatcacctcaatggaagagactctctggtgaatccgggcacagccatggccagccacaaggacgatgaagaaaagtattttcctcagagcggggttctcatcttcggaaaacaagactcgggaaaaactaatgtggacattgaaaaggtcatgattacagacgaagaggaaatcaggaccaccaatcccgtggctacggagcagtatggttctgtatctaccaatctccagagcggcaacacacaagcagctacctcagatgtcaacacacaaggcgttcttccaggcatggtctggcaggacagagacgtgtacctgcagggacccatctgggcaaagattccacacacggacggacactttcacccttctccacttatgggaggatttggactgaagcaccctcccccgcagattctcatcaagagtaccccggtacctgcgaatccttctaccaccttcagcgcggcaaagtttgcttccttcatcacacagtactccacggggcaggtcagcgtggagatcgagtgggagctgcagaaagagaacagcaaacgctggaaccccgagatccagtatacctccaactacaacaagtctgttaatgtggactttactgtggacactaatggcgtgtattcagagcctcgccccattggcacaagatacctgactcgtaatctgtaa

SEQ ID NO: 3178 - DNA, 2208 bp, synthetic construct
  misc_feature 1..2208: note = source = /note="Description of Artificial Sequence: Synthetic polynucleotide"
  source 1..2208: mol_type = other DNA
atggctgccgatggttatcttccagattggctcgaggacattctctctgaaggaataagacagtggtggaagctcaaacctggcccaccaccaccaaagcccgcagagcggcataaggacgacagcaggggtcttgtgcttcctgggtacaagtacctcggacccttcaacggactcgacaaaggagagccggtcaacgaggcagacgccgcggccctcgagcacgacaaggcctacgaccggcagctcgacagcggagacaacccgtacctcaagtacaaccacgccgacgcggagtttcaggagcgtcttaaagaagatacgtcttttgggggcaacctcggacgagcagtcttccaggcaaaaaagagggttcttgaacctctgggcctggttgaggaacctgttaagacggctccgggaaaaaagaggccggtagagcaatctcctgcggagccagactcctcctcgggaaccggaaaggcgggcaaccagcctgcaagaaagagattgaattttggtcagactggagacgcagactccgtacctgacccccagcctctcggacagccaccagcagccccctctggtctgggatctactacaatggctacaggcagtggcgcaccaatggcagacaataacgagggtgccgatggagtgggtaattcctcaggaaattggcattgcgattccacatggatgggcgacagagtcatcaccaccagcacccgcacctgggctctgcccacctacaacaaccatctgtacaagcaaatttccagccagtctggagccagcaacgacaaccactactttggctacagcaccccttgggggtattttgacttcaacagattccactgccacttctccccacgtgactggcaaagactcatcaacaacaattggggattccggcccaaaagactcaacttcaagctctttaacattcaagtcaaggaggtcacgcagaatgacggtacgacgacgattgccaataaccttaccagcacggttcaggtgtttactgactcggagtaccagctcccgtacgtcctcggctcggcgcatcaaggatgcctcccgccgttcccagcagacgtcttcatggtgccacagtatggatacctcaccctgaacaacgggagtcaggcggtaggacgctcttcattttactgcctggagtactttccttctcagatgctgcgtaccggaaacaactttaccttcagctacacctttgaggacgttccttttcacagcagctacgctcacagccagagtttggaccgtcttatgaatcctctcatcgaccagtacctgtattacttgagcagaacaaacactccaagcggaaccactacgcagtccaggcttcagttttctcaagccggagcgagtgacattcgggaccagtctaggaactggcttcctggaccctgttaccgccagcagcgagtatcaaagacagctgcggacaacaacaacagtgattactcgtggactggagctaccaagtatcacctcaatggaagagactctctggtgaatccgggcacagccatggccagccacaaggacgatgaagaaaagtattttcctcagagcggggttctcatcttcggaaaacaagactcgggaaaaactaatgtggacattgaaaaggtcatgattacagacgaagaggaaatcaggaccaccaatcccgtggctacggagcagtatggttctgtatctaccaatctccagagcggcaacacacaagcagctacctcagatgtcaacacacaaggcgttcttccaggcatggtccggcaggacagagacgtgtacctgcagggacccatctgggcaaagattccacacacggacggacattttcacccttctcctcttatgggaggatttggactgaagcaccctcccccgcagattctcatcaagaataccccggtacctgcgaatccttctaccaccttcagcgcggcaaagtttgcttccttcatcacacagtactccacggggcaggtcagcgtggagatcgagtgggagccgcagaaagagaacagcaaacgctggaaccccgagatccagtatacctccaactacaacaagtctgttaatgtggactttactgtggacactaatggcgtgtattcagagcctcgccccattggcacaagatacctgactcgtaatctgtaa

SEQ ID NO: 3179 - DNA, 2208 bp, synthetic construct
  misc_feature 1..2208: note = source = /note="Description of Artificial Sequence: Synthetic polynucleotide"
  source 1..2208: mol_type = other DNA
atggctgccgatggttatcttccagattggctcgaggacactctctctgaaggaataagacagtggtggaagctcaaacctggcccaccaccgccaaagcccgcagagcggcataaggacgacagcaggggtcttgtgcttcctgggtacaagtacctcggacccttcaacggactcgacaaaggagagccggtcaacgaggcagacgccgcggccctcgagcacgacaaggcctacgaccggcagctcgacagcggagacaacccgtacctcaagtacaaccacgccgacgcggagtttcaggagcgccttaaagaagatacgtcttttgggggcaacctcgcaagagcagtattccaggcgaaaaagagggttcttgaacctctgggcctggttgaggagcctgttaagacggctccgggaaaaaagaggccggtagagcactctcctgcggagccagattcctcctccggaactggaaagtcgggccaacagcctgcaagaaagagattgaattttggtcagactggagacgcagactccgtacctgacccccagcctctcggacagccaccagcagccccctctggtctgggaactaatacgatggcttcaggcagtggcgcaccaatggcagacaataacgagggcgccgacggagtgggtaattcctcgggaaattggcattgcgattccacatggatgggcgacagagtcatcaccaccagcacccgcacctgggctctgcccacctacaacaaccatctgtacaagcaaatttccagccagtctggagccagcaacgacaaccactactttggctacagcaccccttgggggtattttgacttcaacagattccactgccacttctccccacgtgactggcaaagactcatcaacaacaattggggattccggcccaaaagactcaacttcaagctctttaacattcaagtcaaggaggtcacgcagaatgacggtacgacgacgattgccaataaccttaccagcacggttcaggtgtttactgactcggagtaccagctcccgtacgtcctcggctcggcgcatcaaggatgcctcccgccgttcccagcagacgtcttcatggtgccacagtatggatacctcaccctgaacaacgggagtcaggcggtaggacgctcttcattttactgcctggagtactttccttctcagatgctgcgtaccggaaacaactttaccttcagctacacctttgaggacgttccttttcacagcagctacgctcacagccagagtttggaccgtcttatgaatcctctcatcgaccagtacctgtattacttgagcagaacaaacactccaagcggaaccactacgcagtccaggcttcagttttctcaagccggagcgagtgacattcgggaccagtctaggaactggcttcctggaccctgttaccgccagcagcgagtatcaaagacagctgcggacaacaacaacagtgattactcgtggactggagctaccaagtatcacctcaatggaagagactctctggtgaatccgggcacagccatggccagccacaaggacgatgaagaaaagtattttcctcagagcggggttctcatcttcggaaaacaagactcgggaaaaactaatgtggacattgaaaaggtcatgattacagacgaagaggaaatcaggaccaccaatcccgtggctacggagcagtatggttctgtatctaccaatctccagagcggcaacacacaagcagctacctcagatgtcaacacacaaggcgttcttccaggcatggtccggcaggacagagacgtgtacctgcagggacccatctgggcaaagattccacacacggacggacattttcacccttctcctcttatgggaggatttggactgaagcaccctcccccgcagattctcatcaagaataccccggtacctgcgaatccttctaccaccttcagcgcggcaaagtttgcttccttcatcacacagtactccacggggcaggtcagcgtggagatcgagtgggagccgcagaaagagaacagcaaacgctggaaccccgagatccagtatacctccaactacaacaagtctgttaatgtggactttactgtggacactaatggcgtgtattcagagcctcgccccattggcacaagatacctgactcgtaatctgtaa

SEQ ID NO: 3180 - DNA, 2208 bp, synthetic construct
  misc_feature 1..2208: note = source = /note="Description of Artificial Sequence: Synthetic polynucleotide"
  source 1..2208: mol_type = other DNA
atggctgccgatggttatcttccagattggctcgaggacactctctctgaaggaataagacagtggtggaagctcaaacctggcccaccaccgccaaagcccgcagagcggcataaggacgacagcaggggtcttgtgcttcctgggtacaagtacctcggacccttcaacggactcgacaaaggagagccggtcaacgaggcagacgccgcggccctcgagcacgacaaggcctacgaccggcagctcgacagcggagacaacccgtacctcaagtacaaccacgccgacgcggagtttcaggagcgccttaaagaagatacgtcttttgggggcaacctcgcaagagcagtattccaggcgaaaaagagggttcttgaacctctgggcctggttgaggagcctgttaagacggctccgggaaaaaagaggccggtagagcactctcctgcggagccagattcctcctccggaactggaaagtcgggccaacagcctgcaagaaagagattgaattttggtcagactggagacgcagactccgtacctgacccccagcctctcggacagccaccagcagccccctctggtctgggaactaatacgatggcttcaggcagtggcgcaccaatggcagacaataacgagggcgccgacggagtgggtaattcctcgggaaattggcattgcgattccacatggatgggcgacagagtcatcaccaccagcacccgcacctgggctctgcccacctacaacaaccatctgtacaagcaaatttccagccagtctggagccagcaacgacaaccactacttcggctacagcaccccttgggggtattttgacttcaacagattccactgccacttctccccacgtgactggcaaagactcatcaacaacaattggggattccggcccaaaagactcaacttcaagctctttaacattcaagtcaaggaggtcacgcagaatgacggtacgacgacgattgccaataaccttaccagcacggttcaggtgtttactgactcggagtaccagctcccgtacgtcctcggctcggcgcatcaaggatgcctcccgccgttcccagcagacgtcttcatggtgccacagtatggatacctcacccagaacaacgggagtcaggcggtaggacgctcttcattttactgcctggagtactttccttctcagatgctgcgtaccggaaacaactttaccttcagctacacctttgaggacgttccttttcacagcagctacgctcacagccagagtttggaccgtcttatgaatcctctcatcgaccagtacctgtattacttgagcagaacaaacactccaagcggaaccactacgcagtccaggcttcagttttctcaagccggagcgagtgacattcgggaccagtctaggaactggcttcctggaccctgttaccgccagcagcgagtatcaaagacagctgcggacaacaacaacagtgattactcgtggactggagctaccaagtatcacctcaatggaagagactctctggtgaatccgggcacagccatggccagccacaaggacgatgaagaaaagtattttcctcagagcggggttctcatcttcggaaaacaagactcgggaaaaactaatgtggacattgaaaaggtcatgattacagacgaagaggaaatcaggaccaccaatcccgtggctacggagcagtatggttctgtatctaccaatctccagagcggcaacacacaagcagctacctcagatgtcaacacacaaggcgttcttccaggcatggtccggcaggacagagacgtgtacctgcagggacccatctgggcaaagattccacacacggacggacattttcacccttctcctcttatgggaggatttggactgaagcaccctcccccgcagattctcatcaagaataccccggtacctgcgaatccttctaccaccttcagcgcggcaaagtttgcttccttcatcacacagtactccacggggcaggtcagcgtggagatcgagtgggagccgcagaaagagaacagcaaacgctggaaccccgagatccagtatacctccaactacaacaagtctgttaatgtggactttactgtggacactaatggcgtgtattcagagcctcgccccattggcacaagatacctgactcgtaatctgtaa

SEQ ID NO: 3181 - DNA, 2208 bp, synthetic construct
  misc_feature 1..2208: note = source = /note="Description of Artificial Sequence: Synthetic polynucleotide"
  source 1..2208: mol_type = other DNA
atggctgccgatggttatcttccagattggctcgaggacactctctctgaaggaataagacagtggtggaagctcaaacctggcccaccaccgccaaagcccgcagagcggcataaggacgacagcaggggtcttgtgcttcctgggtacaagtacctcggacccttcaacggactcgacaaaggagagccggtcaacgaggcagacgccgcggccctcgagcacgacaaggcctacgaccggcagctcgacagcggagacaacccgtacctcaagtacaaccgcgccgacgcggagtttcaggagcgccttaaagaagatacgtcttttgggggcaacctcgcaagagcagtattccaggcgaaaaagagggttcttgaacctctgggcctggttgaggagcctgttaagacggctccgggaaaaaagaggccggtagagcactctcctgcggggccagattcctcctccggaactggaaagtcgggccaacagcctgcaagaaagagattgaattttggtcagactggagacgcagactccgtacctgacccccagcctctcggacagccaccagcagccccctctggtctgggaactaatacgatggcttcaggcagtggcgcaccaatggcagacaataacgagggcgccgacggagtgggtaattcctcgggaaattggcattgcgattccacatggatgggcgacagagtcatcaccaccagcacccgcacctgggctctgcccacctacaacaaccatctgtacaagcaaatttccagccagtctggagccagcaacgacaaccactactttggctacagcaccccttgggggtattttgacttcaacagattccactgccacttctccccacgtgactggcaaagactcatcaacaacaattggggattccggcccaaaagactcaacttcgagctctttaacattcaagtcaaggaggtcacgcagaatgacggtacgacgacgattgccaataaccttaccagcacggttcaggtgtttactgactcggagtaccagctcccgtacgtcctcggctcggcgcatcaaggatgcctcccgccgttcccagcagacgtcttcatggtgccacagtatggataccccaccctgaacaacgggagtcaggcggtaggacgctcttcattttactgcctggagtactttccttctcagatgctgcgtaccggaaacaactttaccttcagctacacctttgaggacgttccttttcacagcagctacgctcacagccagagtttggaccgtctcatgaatcctctcatcgaccagtacctgtattacttgagcagaacaaacactccaagcggaaccactacgcagtccaggcttcagttttctcaagccggagcgagtgacattcgggaccagtctaggaactggcttcctggaccctgttaccgccagcagcgagtatcaaagacagctgcggacaacaacaacagtgattactcgtggactggagctaccaagtatcacctcaatggaagagactctctggtgaatccgggcacagccatggccagccacaaggacgatgaagaaaagtattttcctcagagcggggttctcatcttcggaaaacaagactcgggaaaaactaatgtggacattgaaaaggtcatgattacagacgaagaggaaatcaggaccaccaatcccgtggctacggagcagtatggttctgtatctaccaatctccagagcggcaacacacaagcagctacctcagatgtcaacacacaaggcgttcttccaggcatggtctggcaggacagagacgtgtacctgcagggacccatctgggcaaagattccacacacggacggacactttcacccttctcctcttatgggaggatttggactgaagcaccctcccccgcagattctcatcaagagtaccccggtacctgcgaatccttctaccaccttcagcgcggcaaagtttgcttccttcatcacacagtactccacggggcaggtcagcgtggagatcgagtgggagctgcagaaagagaacagcaaacgctggaaccccgagatccagtatacctccaactacaacaagtctgttaatgtggactttactgtggacactaatggcgtgtattcagagcctcgccccattggcacaagatacctgactcgtaatctgtaa

SEQ ID NO: 3182 - DNA, 2208 bp, synthetic construct
  misc_feature 1..2208: note = source = /note="Description of Artificial Sequence: Synthetic polynucleotide"
  source 1..2208: mol_type = other DNA
atggctgccgatggttatcttccagattggctcgaggacactctctctgaaggaataagacagtggtggaagctcaaacctggcccaccaccgccaaagcccgcagagcggcataaggacgacagcaggggtcttgtgcttcctgggtacaagtacctcggacccttcaacggactcgacaaaggagagccggtcaacgaggcagacgccgcggccctcgagcacgacaaggcctacgaccggcagctcgacagcggagacaacccgtacctcaagtacaaccacgccgacgcggagtttcaggagcgccttaaagaagatacgtcttttgggggcaacctcgcaagagcagtattccaggcgaaaaagagggttcttgaacctctgggcctggttgaggagcctgttaagacggctccgggaaaaaagaggccggtagagcactctcctgcggagccagattcctcctccggaactggaaagtcgggccaacagcctgcaagaaagagattgaattttggtcagactggagacgcagactccgtacctgacccccagcctctcggacagccaccagcagccccctctggtctgggaactaatacgatggcttcaggcagtggcgcaccaatggcagacaataacgagggcgccgacggagtgggtaattcctcgggaaattggcattgcgattccacatggatgggcgacagagtcatcaccaccagcacccgcacctgggctctgcccacctacaacaaccatctgtacaagcaaatttccagccagtctggagccagcaacgacaaccactactttggctacagcaccccttgggggtattttgacttcaacggattccactgccacttctccccacgtgactggcaaagactcatcaacaacaattggggattccggcccaaaagactcaacttcaagctctttaacattcaagtcaaggaggtcacgcagaatgacggtacgacgacgattgccaataaccttaccagcacggttcaggtgtttactgactcggagtaccagctcccgtacgtcctcggctcggcgcatcaaggatgcctcccgccgttcccagcagacgtcttcatggtgccacagtatggatacctcaccctgaacaacgggagtcaggcggtaggacgctcttcattttactgcctggagtactttccttctcagatgctgcgtaccggaaacaactttaccttcagctacacctttgaggacgttccttttcacagcagctacgctcacagccagagtttggaccgtcttatgaatcctctcatcgaccagtacctgtattacttgagcagaacaaacactccaagcggaaccactacgcagtccaggcttcagttttctcaagccggagcgagtgacattcgggaccagtctaggaactggcttcctggaccctgttaccgccagcagcgagtatcaaagacagctgcggacaacaacaacagtgattactcgtggactggagctaccaagtatcacctcaatggaagagactctctggtgaatccgggcacagccatggccagccacaaggacgatgaagaaaagtattttcctcagagcggggttctcatcttcggaaaacaagactcgggaaaaactaatgtggacattgaaaaggtcatgattacagacgaagaggaaatcaggaccaccaatcccgtggctacggagcagtatggttctgtatctaccaatctccagagcggcaacacacaagcagctacctcagatgtcaacacacaaggcgttcttccaggcatggtccggcaggacagagacgtgtacctgcagggacccatctgggcaaagattccacacacggacggacattttcacccttctcctcttatgggaggatttggactgaagcaccctcccccgcagattctcatcaagaataccccggtacctgcgaatccttctaccaccttcagcgcggcaaagtttgcttccttcatcacacagtactccacggggcaggtcagcgtggagatcgagtgggagccgcagaaagagaacagcaaacgctggaaccccgagatccagtatacctccaactacaacaagtctgttaatgtggactttactgtggacactaatggcgtgtattcagagcctcgccccattggcacaagatacctgactcgtaatctgtaa

SEQ ID NO: 3183 - DNA, 2208 bp, synthetic construct
  misc_feature 1..2208: note = source = /note="Description of Artificial Sequence: Synthetic polynucleotide"
  source 1..2208: mol_type = other DNA
atggctgccgatggttatcttccagattggctcgaggacactctctctgaaggaataagacagtggtggaagctcaaacctggcccaccaccgccaaagcccgcagagcggcataaggacgacagcaggggtcttgtgcttcctgggtacaagtacctcggacccttcaacggactcgacaaaggagagccggtcaacgaggcagacgccgcggccctcgagcacgacaaggcctacgaccggcagctcgacagcggagacaacccgtacctcaagtacaaccacgccgacgcggagtttcaggagcgccttaaagaagatacgtcttttgggggcaacctcgcaagagcagtattccaggcgaaaaagagggttcttgaacctccgggcctggttgaggagcctgttaagacggctccgggaaaaaagaggccggtagagcactctcctgcggagccagattcctcctccggaactggaaagtcgggccaacagcctgcaagaaagagattgaattttggtcagaccggagacgcagactccgtacctgacccccagcctctcggacagccaccagcagccccctctggtctgggaactaatacgatggcttcaggcagtggcgcaccaatggcagacaataacgagggcgccgacggagtgggtaattcctcgggaaattggcattgcgattccacatggatgggcgacagagtcatcaccaccagcacccgcacctgggctctgcccacctacaacaaccatctgtacaagcaaatttccagccagtctggagccagcaacgacaaccactacttcggctacagcaccccttgggggtattttgacttcaacagattccactgccacttctccccacgtgactggcaaagactcatcaacaacaattggggattccggcccaaaagactcaacttcaagctctttaacattcaagtcaaggaggtcacgcagaatgacggtacgacgacgattgccaataaccttaccagcacggttcaggtgtttactgactcggagtaccagctcccgtacgtcctcggctcggcgcatcaaggatgcctcccgccgttcccagcagacgtcttcatggtgccacagtatggatacctcaccctgaacaacgggagtcaggcggtaggacgctcttcattttactgcctggagtactttccttctcagatgctgcgtaccggaaacaactttaccttcagctacacctttgaggacgttccttttcacagcagctacgctcacagccagagtttggaccgtcttatgaatcctctcatcgaccagtacctgtattacttgagcagaacaaacactccaagcggaaccactacgcagtccaggcttcagttttctcaagccggagcgagtgacattcgggaccagtctaggaactggcttcctggaccctgttaccgccagcagcgagtatcaaagacagctgcggacaacaacaacagtgattactcgtggactggagctaccaagtatcacctcaatggaagagactctctggtgaatccgggcacagccatggccagccacaaggacgatgaagaaaagtattttcctcagagcggggttctcatcttcggaaaacaagactcgggaaaaactaatgtggacattgaaaaggtcatgattacagacgaaggggaaatcaggaccaccaatcccgtggctacggagcagtatggctctgtatctaccaatctccagagcggcaacacacaagcagctacctcagatgtcaacacacaaggcgttcttccaggcatggtccggcaggacagagacgtgtacctgcagggacccatctgggcaaagattccacacacggacggacattttcacccttctcctcttatgggaggatttggactgaagcaccctcccccgcagattctcatcaagaataccccggtacctgcgaatccttctaccaccttcagcgcggcaaagtttgcttccttcatcacacagtactccacggggcaggtcagcgtggagatcgagtgggagccgcagaaagagaacagcaaacgctggaaccccgagatccagtatacctccaactacagcaagtctgttaatgtggactttactgtggacactaatggcgtgtattcagagcctcgccccattggcacaagatacctgactcgtaatctgtaa

SEQ ID NO: 3184 - DNA, 2208 bp, synthetic construct
  misc_feature 1..2208: note = source = /note="Description of Artificial Sequence: Synthetic polynucleotide"
  source 1..2208: mol_type = other DNA
atggctgccgatggttatcttccagattggctcgaggacattctctctgaaggaataagacagtggtggaagctcaaacctggcccaccaccaccaaagcccgcagagcggcataaggacgacagcaggggtcttgtgcttcctgggtacaagtacctcggacccttcaacggactcgacaaaggagagccggtcaacgaggcagacgccgcggccctcgagcacgacaaggcctacgaccggcagctcgacagcggagacaacccgtacctcaagtacaaccacgccgacgcggagtttcaggagcgtcttaaagaagatacgtcttttgggggcaacctcggacgagcagtcttccaggcaaaaaagagggttcttgaacctctgggcctggttgaggaacctgttaagacggctccgggaaaaaagaggccggtagagcaatctcctgcggagccagactcctcctcgggaaccggaaaggcgggcaaccagcctgcaagaaagagattgaattttggtcagactggagacgcagactccgtacctgacccccagcctctcggacagccaccagcagccccctctggtctgggatctactacaatggctacaggcagtggcgcaccaatggcagacaataacgagggtgccgatggagtgggtaattcctcaggaaattggcattgcgattcccaatggttgggcgacagagtcatcaccaccagcacccgaacctgggccctgcccacctacaacaatcacctctacaagcaaatctccagccaatcaggagccagcaacgacaaccactactttggctacagcaccccctgggggtattttgacttcaacagattccactgccacttctccccacgtgactggcaaagactcatcaacaacaattggggattccggcccaaaagactcaacttcaagctctttaacattcaagtcaaggaggtcacgcagaatgacggtacgacgacgattgccaataaccttaccagcacggttcaggtgtttactgactcggagtaccagctcccgtacgtcctcggctcggcgcatcaaggatgcctcccgccgttcccagcagacgtcttcatggtgccacagtatggatacctcaccctgaacaacgggagtcaggcggtaggacgctcttcattttactgcctggagtactttccttctcagatgctgcgtaccggaaacaactttaccttcagctacacctttgaggacgttccttttcacagcagctacgctcacagccagagtttggaccgtcttatgaatcctctcatcgaccagtacctgtattacttgagcagaacaaacactccaagcggaaccactacgcagtccaggcttcagttttctcaagccggagcgagtgacattcgggaccagtctaggaactggcttcctggaccctgttaccgccagcagcgagtatcaaagacagctgcggacaacaacaacagtgattactcgtggactggagctaccaagtatcacctcaatggaagagactctctggtgaatccgggcacagccatggccagccacaaggacgatgaagaaaagtattttcctcagagcggggttctcatcttcggaaaacaagactcgggaaaaactaatgtggacattgaaaaggtcatgattacagacgaagaggaaatcaggaccaccaatcccgtggctacggagcagtatggttctgtatctaccaatctccagagcggcaacacacaagcagctacctcagatgtcaacacacaaggcgttcttccaggcatggtccggcaggacagagacgtgtacctgcagggacccatctgggcaaagattccacacacggacggacattttcacccttctcctcttatgggaggatttggactgaagcaccctcccccgcagattctcatcaagaataccccggtacctgcgaatccttctaccaccttcagcgcggcaaagtttgcttccttcatcacacagtactccacggggcaggtcagcgtggagatcgagtgggagccgcagaaagagaacagcaaacgctggaaccccgagatccagtatacctccaactacaacaagtctgttaatgtggactttactgtggacactaatggcgtgtattcagagcctcgccccattggcacaagatacctgactcgtaatctgtaa

SEQ ID NO: 3185 - DNA, 2208 bp, synthetic construct
  misc_feature 1..2208: note = source = /note="Description of Artificial Sequence: Synthetic polynucleotide"
  source 1..2208: mol_type = other DNA
atggctgccgatggttatcttccagattggctcgaggacactctctctgaaggaataagacagtggtggaagctcaaacctggcccaccaccgccaaagcccgcagagcggcataaggacgacagcaggggtcttgtgcttcctgggtacaagtacctcggacccttcaacggactcgacaaaggagagccggtcaacgaggcagacgccgcggccctcgagcacgacaaggcctacgaccggcagctcgacagcggagacaacccgtacctcaagtacaaccacgccgacgcggagtttcaggagcgccttaaagaagatacgtcttttgggggcaacctcgcaagagcagtattccaggcgaaaaagagggttcttgaacctctgggcctggttgaggagcctgttaagacggctccgggaaaaaagaggccggtagagcactctcctgcggagccagattcctcctccggaactggaaagtcgggccaacagcctgcaagaaagagattgaattttggtcagactggagacgcagactccgtacctgacccccagcctctcggacagccaccagcagccccctctggtctgggaactaatacgatggcttcaggcagtggcgcaccaatggcagacaataacgagggcgccgacggagtgggtaattcctcgggaaattggcattgcgattccacatggatgggcgacagagtcatcaccaccagcacccgcacctgggctctgcccacctacaacaaccatctgtacaagcaaatttccagccagtctggagccagcaacgacaaccactacttcggctacagcaccccttgggggtattttgacttcaacagattccactgccacttctccccacgtgactggcaaagactcatcaacaacaattggggattccggcccaaaagactcaacttcaagctctttaacattcaagtcaaggaggtcacgcagaatgacggtacgacgacgattgccaataaccttaccagcacggttcaggtgtttactgactcggagtaccagctcccgtacgtcctcggctcggcgcatcaaggatgcctcccgccgttcccagcagacgtcttcatggtgccacagtatggatacctcaccctgaacaacgggagtcaggcggtaggacgctcttcattttactgcctggagtactttccttctcagatgctgcgtaccggaaacaactttaccttcagctacacctttgaggacgttccttttcacagcagctacgctcacagccagagtttggaccgtcttatgaatcctctcatcgaccagtacctgtattacttgagcagaacaaacactccaagcggaaccactacgcagtccaggcttcagttttctcaagccggagcgagtgacattcgggaccagtctaggaactggcttcctggaccctgttaccgccagcagcgagtatcaaagacagctgcggacaacaacaacagtgattactcgtggactggagctaccaagtatcacctcaatggaagagactctctggtgaatccgggcacagccatggccagccacaaggacgatgaagaaaagtattttcctcagagcggggttctcatcttcggaaaacaagactcgggaaaaactaatgtggacattgaaaaggtcatgattacagacgaagaggaaatcaggaccaccaatcccgtggctacggagcagtatggttctgtatctaccaatctccagagcggcaacacacaagcagctacctcagatgtcaacacacaaggcgttcttccaggcacggtccggcaggacagagacgtgtacctgcagggacccatctgggcaaagattccacacacggacggacattttcacccttctcctcttatgggaggatttggactgaagcaccctcccccgcagattctcatcaagaataccccggtacctgcgaatccttctaccaccttcagcgcggcaaagtttgcttccttcatcacacagtactccacggggcaggtcagcgtggagatcgagtgggagccgcagaaagagaacagcaaacgctggaaccccgagatccagtatacctccaactacaacaagtctgttaatgtggactttactgtggacactaatggcgtgtattcagagcctcgccccattggcacaagatacctgactcgtaatctgtaa

SEQ ID NO: 3186 - DNA, 2208 bp, synthetic construct
  misc_feature 1..2208: note = source = /note="Description of Artificial Sequence: Synthetic polynucleotide"
  source 1..2208: mol_type = other DNA
atggctgccgatggttatcttccagattggctcgaggacattctctctgaaggaataagacagtggtggaagctcaaacctggcccaccaccaccaaagcccgcagagcggcataaggacgacagcaggggtcttgtgcttcctgggtacaagtacctcggacccttcaacggactcgacaaaggagagccggtcaacgaggcagacgccgcggccctcgagcacgacaaggcctacgaccggcagctcgacagcggagacaacccgtacctcaagtacaaccacgccgacgcggagtttcaggagcgtcttaaagaagatacgtcttttgggggcaacctcggacgagcagtcttccaggcaaaaaagagggttcttgaacctctgggcctggttgaggarcctgttaagacggctccgggaaaaaagaggccggtagagcactctcctgcggagccagattcctcctccggaactggaaagtcgggccaacagcctgcaagaaagagattgaattttggtcagactggagacgcagactccgtacctgacccccagcctctcggacagccaccagcagccccctctggtctgggaactaatacgatggcttcaggcagtggcgcaccaatggcagacaataacgagggcgccgacggagtgggtaattcctcgggaaattggcattgcgattccacatggatgggcgacagagtcatcaccaccagcacccgcacctgggctctgcccacctacaacaaccatctgtacaagcaaatttccagccagtctggagccagcaacgacaaccactacttcggctacagcaccccttgggggtattttgacttcaacagattccactgccacttctccccacgtgactggcaaagactcatcaacaacaattggggattccggcccaaaagactcaacttcaagctctttaacattcaagtcaaggaggtcacgcagaatgacggtacgacgacgattgccaataaccttaccagcacggttcaggtgtttactgactcggagtaccagctcccgtacgtcctcggctcggcgcatcaaggatgcctcccgccgttcccagcagacgtcttcatggtgccacagtatggatacctcaccctgaacaacgggagtcaggcggtaggacgctcttcattttactgcctggagtactttccttctcagatgctgcgtaccggaaacaactttaccttcagctacacctttgaggacgttccttttcacagcagctacgctcacagccagagtttggaccgtcttatgaatcctctcatcgaccagtacctgtattacttgagcagaacaaacactccaagcggaaccactacgcagtccaggcttcagttttctcaagccggagcgagtgacattcgggaccagtctaggaactggcttcctggaccctgttaccgccagcagcgagtatcaaagacagctgcggacaacaacaacagtgattactcgtggactggagctaccaagtatcacctcaatggaagagactctctggtgaatccgggcacagccatggccagccacaaggacgatgaagaaaagtattttcctcagagcggggttctcatcttcggaaaacaagactcgggaaaaactaatgtggacattgaaaaggtcatgattacagacgaagaggaaatcaggaccaccaatcccgtggctacggagcagtatggttctgtatctaccaatctccagagcggcaacacacaagcagctacctcagatgtcaacacacaaggcgttcttccaggcatggtccggcaggacagagacgtgtacctgcagggacccatctgggcaaagattccacacacggacggacattttcacccttctcctcttatgggaggatttggactgaagcaccctcccccgcagattctcatcaagaataccccggtacctgcgaatccttctaccaccttcagcgcggcaaagtttgcttccttcatcacacagtactccacggggcaggtcagcgtggagatcgagtgggagccgcagaaagagaacagcaaacgctggaaccccgagatccagtatacctccaactacaacaagtctgttaatgtggactttactgtggacactaatggcgtgtattcagagcctcgccccattggcacaagatacctgactcgtaatctgtaa

SEQ ID NO: 3187 - DNA, 2208 bp, synthetic construct
  misc_feature 1..2208: note = source = /note="Description of Artificial Sequence: Synthetic polynucleotide"
  source 1..2208: mol_type = other DNA
atggctgccgatggttatcttccagattggctcgaggacactctctctgaaggaataagacagtggtggaagctcaaacctggcccaccaccgccaaagcccgcagagcggcataaggacgacagcaggggtcttgtgcttcctgggtacaagtacctcggacccttcaacggactcgacaaaggagagccggtcaacgaggcagacgccgcggccctcgagcacgacaaggcctacgaccggcagctcgacagcggagacaacccgtacctcaagtacaaccacgccgacgcggagtttcaggagcgccttaaagaagatacgtcttttgggggcaacctcgcaagagcagtattccaggcgaaaaagagggttcttgaacctctgggcctggttgaggagcctgttaagacggctccgggaaaaaagaggccggtagagcactctcctgcggagtcagattcctcctccggaactggaaagtcgggccaacagcctgcaagaaagagattgaattttggtcagactggagacgcagactccgtacctgacccccagcctctcggacagccaccagcagccccctctggtctgggaactaatacgatggcttcaggcagtggcgcaccaatggcagacaataacgagggcgccgacggagtgggtaattcctcgggaaattggcattgcgattccacatggatgggcgacagagtcatcaccaccagcacccgcacctgggctctgcccacctacaacaaccatctgtacaagcaaatttccagccagtctggagccagcaacgacaaccactactttggctacagcaccccttgggggtattttgacttcaacagattccactgccacttctccccacgtgactggcaaagactcatcaacaacaattggggattccggcccaaaagactcaacttcaagctctttaacattcaagtcaaggaggtcacgcagaatgacggtacgacgacgattgccaataaccttaccagcacggttcaggtgtttactgactcggagtaccagctcccgtacgtcctcggctcggcgcatcaaggatgcctcccgccgttcccagcagacgtcttcatggtgccacagtatggatacctcaccctgaacaacgggagtcaggcggtaggacgctcttcattttactgcctggagtactttccttctcagatgctgcgtaccggaaacaactttaccttcagctacacctttgaggacgttccttttcacagcagctacgctcacagccagagtttggaccgtctcatgaatcctctcatcgaccagtacctgtattacttgagcagaacaaacactccaagcggaaccactacgcagtccaggcttcagttttctcaagccggagcgagtgacattcgggaccagtctaggaactggcttcctggaccctgttaccgccagcagcgagtatcaaagacagctgcggacaacaacaacagtgattactcgtggactggagctaccaagtatcacctcaatggaagagactctctggtgaatccgggcacagccatggccagccacaaggacgatgaagaaaagtattttcctcagagcggggttctcatcttcggaaaacaagactcgggaaaaactaatgtggacattgaaaaggtcatgattacagacgaagaggaaatcaggaccaccaatcccgtggctacggagcagtatggttctgtatctaccaatctccagagcggcaacacacaagcagctacctcagatgtcaacacacaaggcgttcttccaggcatggtctggcaggacagagacgtgtacctgcagggacccatctgggcaaagattccacacacggacggacattttcacccttctcctcttatgggaggatttggactgaagcaccctcccccgcagattctcatcaagaataccccggtacctgcgaatccttctaccaccttcagcgcggcaaagtttgcttccttcatcacacagtactccacggggcaggtcagcgtggagatcgagtgggagctgcagaaagagaacagcaaacgctggaaccccgagatccagtatacctccaactacaacaagtctgttaatgtggactttactgtggacactaatggcgtgtattcagagcctcgccccattggcacaagatacctgactcgtaatctgtaa

SEQ ID NO: 3188 - DNA, 2208 bp, synthetic construct
  misc_feature 1..2208: note = source = /note="Description of Artificial Sequence: Synthetic polynucleotide"
  source 1..2208: mol_type = other DNA
atggctgccgatggttatcttccagattggctcgaggacactctctctgaaggaataagacagtggtggaagctcaaacctggcccaccaccgccaaagcccgcagagcggcataaggacgacagcaggggtcttgtgcttcctgggtacaagtacctcggacccttcaacggactcgacaaaggagagccggtcaacgaggcagacgccgcggccctcgagcacgacaaggcctacgaccggcagctcgacagcggagacaacccgtacctcaagtacaaccacgccgacgcggagtttcaggagcgccttaaagaagatacgtcttttgggggcaacctcgcaagagcagtattccaggcgaaaaagagggttcttgaacctctgggcctggttgaggagcctgttaagacggctccgggaaaaaagaggccggtagagcactctcctgcggagccagattcctcctccggaactggaaagtcgggccaacagcctgcaagaaagagattgaattttggtcagactggagacgcagactccgtacctgacccccagcctctcggacagccaccagcagccccctctggtctgggaactaatacgatggcttcaggcagtggcgcaccaatggcagacaataacgagggcgccgacggagtgggtaattcctcgggaaattggcattgcgattccacatggatgggcgacagagtcatcaccaccagcacccgcacctgggctctgcccacctacaacaaccatctgtacaagcaaatttccagccagtctggagccagcaacgacaaccactactttggctacagcaccccttgggggtattttgacttcaacagattccactgccacttctccccacgtgactggcaaagactcatcaacaacaattggggattccggcccaaaagactcaacttcaagctctttaacattcaagtcaaggaggtcacgcagaatgacggtacgacgacgattgccaataaccttaccagcacggttcaggtgtttactgactcggagtaccagctcccgtacgtcctcggctcggcgcatcaaggatgcctcccgccgttcccagcagacgtcttcatggtgccacagtatggatacctcaccctgaacaacgggagtcaggcggtaggacgctcttcattttactgcctggagtactttccttctcagatgctgcgtaccggaaacaactttaccttcagctacacctttgaggacgttccttttcacagcagctacgctcacagccagagtttggaccgtcttatgaatcctctcatcgaccagtacctgtattacttgagcagaacaaacactccaagcggaaccactacgcagtccaggcttcagttttctcaagccggagcgagtgacattcgggaccagtctaggaactggcttcctggaccctgttaccgccagcagcgagtatcaaagacagctgcggacaacaacaacagtgattactcgtggactggagctaccaagtatcacctcaatggaagagactctctggtgaatccgggcacagccatggccagccacaaggacgatgaagaaaagtattttcctcagagcggggttctcatcttccggaaacaagactcgggaaaaactaatgtggacattgaaaaggtcatgattacagacgaagaggaaatcaggaccaccaatcccgtggctacggagcagtatggttctgtatctaccaatctccagagcggcaacacacaagcagctacctcagatgtcaacacacaaggcgttcttccaggcatggtccggcaggacagagacgtgtacctgcagggacccatctgggcaaagattccacacacggacggacattttcacccttctcctcttatgggaggatttggactgaagcaccctcccccgcagattctcatcaagaataccccggtacctgcgaatccttctaccaccttcagcgcggcaaagtttgcttccttcatcacacagtactccacggggcaggtcagcgtggagatcgagtgggagccgcagaaagagaacagcaaacgctggaaccccgagatccagtatacctccaactacaacaagtctgttaatgtggactttactgtggacactaatggcgtgtattcagagcctcgccccattggcacaagatacctgactcgtaatctgtaa

SEQ ID NO: 3189 - DNA, 2208 bp, synthetic construct
  misc_feature 1..2208: note = source = /note="Description of Artificial Sequence: Synthetic polynucleotide"
  source 1..2208: mol_type = other DNA
atggctgccgatggttatcttccagattggctcgaggacactctctctgaaggaataagacagtggtggaagctcaaacctggcccaccaccaccaaagcccgcagagcggcatcaggacgacagcaggggtcttgtgcttcctgggtacaagtacctcggacccttcaacggactcgacaagggagagccggtcaacgaggcagacgccgcggccctcgagcacgacaaggcctacgaccggcagctcgacagcggagacaacccgtacctcaagtacaaccacgccgacgcggagtttcaggagcgtcttaaagaagatacgtcttttgggggcaacctcggacgagcagtcttccaggcgaaaaagagggttcttgaacctctgggcctggttgaggaacctgttaagacggctccgggaaaaaagaggccggtagagcattctcctgcggagccagactcctcctcgggaaccggaaaggcgggccagcagcctgcgagaaagagattgaatttcggtcagactggagacgcagactccgtacctgacccccagcctctcggacagccaccagcagccccctccggtctgggaactaatacgacggctacaggcagtggcgcaccaatggcagacaataacgagggcgccgacggagtgggtaattcctcgggaaattggcattgcgattccacatggatgggcgacagagtcatcaccaccagcacccgaacctgggccctgcccacctacaacaaccacctctacaagcaaatctccagccaatctggagcctcaaacgacaaccactactttggctacagcaccccttgggggtattttgacttcaacagattccactgtcacttctccccacgtgactggcaaagactcatcaacaacaactggggattccgacccaagagactcaacttcaagctctttaacattcaagtcaaagaggtcacgcagaatgacggtacgacgacgattgccaataaccttaccagcacggttcaagtctttgctgactcggagtaccagctcccgtacgtcctcggctcggcgcatcaaggatgcctcccgccgtttccagcagacgtcttcatggtgccacagtatggatacctcaccctgaacaacgggagtcaggcggtaggacgctcttccttttactgcctggagtactttccttctcagatgctgcgtaccggaaacaactttaccttcagctacacctttgaggacgttcctttccacagcagctacgctcacagccagagtttggaccggctgatgaatcctctgatcgaccagtatctgtattacttgagcaaaacaaacgctccaagcggaaccaccacgatgtccaggcttcagttttctcaggccggagcgagtgacattcgggaccagtctaggaactggcttcctggaccctgttaccgccagcagcgagtatcaaaaacagctgcggataacaacaacagtgattattcgtggactggagctaccaagtaccacctcaatggaagagactctctggtgaatccgggcccagctatggccagccacaaggacgatgaagaaaaatattttcctcagagcggggttctcatctttggaaaacaagactcgggaaaaactaatgtggacattgaaaaggtcatgattacagacgaagaggaaatcaggaccaccaatcccgtggctacggagcagtatggttctgtatctaccaacctccagagcggcaacacacaggcagccaccacagatgtcaacacacaaggcgttcttccaggcatggtctggcaggacagagacgtgtacctgcaaggacccatctgggcaaagattcctcacacggacggacactttcacccttctcccctcatgggaggatttggactcaaacaccctcctccgcaaatcctcatcaagaatacccccgtacctgcgaatccttcgaccacattcagcgcggcaaagtttgcttctttcatcacacagtactctacggggcaggtcagcgtggagattgagtgggagctgcagaaggagaacagcaaacgctggaaccccgaaatccagtacacttccaactacaacaagtctgttaatgtggactttactgtggacactaatggtgtgtattcagagcctcgccccattggcacaagatacctgactcgtaatctgtaa

SEQ ID NO: 3190 - DNA, 2208 bp, synthetic construct
  misc_feature 1..2208: note = source = /note="Description of Artificial Sequence: Synthetic polynucleotide"
  source 1..2208: mol_type = other DNA
atggctgccgatggttatcttccagattggctcgaggacactctctctgaaggaataagacagtggtggaagctcaaacctggcccaccaccaccaaagcccgcagagcggcatcaggacgacagcaggggtcttgtgcttcctgggtacaagtacctcggacccttcaacggactcgacaagggagagccggtcaacgaggcagacgccgcggccctcgagcacgacaaggcctacgaccggcagctcgacagcggagacaacccgtacctcaagtacaaccacgccgacgcggagtttcaggagcgtcttaaagaagatacgtcttttgggggcaacctcggacgagcagtcttccaggcgaaaaagagggttcttgaacctctgggcctggttgaggaacctgttaagacggctccgggaaaaaagaggccggtagagcattctcctgcggagccagactcctcctcgggaaccggaaaggcgggccagcagcctgcgagaaagagattgaatttcggtcagactggagacgcagactccgtacctgacccccagcctctcggacagccaccagcagccccctctggtctgggaactaatacgatggctacaggcagtggcgcaccaatggcagacaataacgagggcgccgacggagtgggtaattcctcgggaaattggcattgcgattccacatggatgggcgacagagtcatcaccaccagcacccgaacctgggccctgcccacctacaacaaccacctctacaagcaaatctccagccaatctggagcctcaaacgacaaccactactttggctacagcaccccttgggggtattttgacttcaacagattccactgtcacttctccccacgtgactggcaaagactcatcaacaacaactggggattccgacccaagagactcaacttcaagctctttaacattcaagtcaaagaggtcacgcagaatgacggtacgacgacgattgccaataaccttaccagcacggttcaagtctttactgactcggagtaccagctcccgtacgtcctcggctcggcgcatcaaggatgcctcccgccgtttccagcagacgtcttcatggtgccacagtatggatacctcaccctgaacaacgggagtcaggcggtaggacgctcttccttttactgcctggagtactttccttctcagatgctgcgtaccggaaacaactttaccttcagctacacctttgaggacgttcctttccacagcagctacgctcacagccagagtttggaccggctgatgaatcctctgatcgaccagtatctgtattacttgagcaaaacaaacgctccaagcggaaccaccacgatgtccaggcttcagttttctcaggccggagcgagtgacattcgggaccagtctaggaactggcttcctggaccctgttaccgccagcagcgagtatcaaaaacagctgcggataacaacaacagtgattattcgtggactggagctaccaagtaccaccccaatggaagagactctctggtgaatccgggcccagctatggccagccacaaggacgatgaagaaaaatattttcctcagagcggggttctcatctttggaaaacaagactcgggaaaaactaatgtggacattgaaaaggtcatgattacagacgaagaggaaatcaggaccaccaatcccgtggctacggagcagtatggttctgtatctaccaacctccagagcggcaacacacaggcagccaccacagatgtcaacacacaaggcgttcttccaggcatggtctggcaggacagagacgtgtacctgcacggacccatctgggcaaagattcctcacacggacggacactttcacccttctcccctcatgggaggatttggactcaaacaccctcctccgcaaatcctcatcaagaatacccccgtacctgcgaatccttcgaccacattcagcgcggcaaagtttgcttctttcatcacacagtactctacggggcaggtcagcgtggagattgagtgggagctgcagaaggagaacagcaaacgctggaaccccgaaatccagtacacttccaactacaacaagtctgttaatgtggactttactgtggacactaatggtgtgtattcagagcctcgccccattggcacaagatacctgactcgtaatctgtaa

SEQ ID NO: 3191 - DNA, 2208 bp, synthetic construct
  misc_feature 1..2208: note = source = /note="Description of Artificial Sequence: Synthetic polynucleotide"
  source 1..2208: mol_type = other DNA
atggctgccgatggttatcttccagattggctcgaggacactctctctgaaggaataagacagtggtggaagctcaaacctggcccaccaccaccaaagcccgcagagcggcatcaggacgacagcaggggtcttgtgcttcctgggtacaagtacctcggacccttcaacggactcgacaagggagagccggtcaacgaggcagacgccgcggccctcgagcacgacaaggcctacgaccggcagctcgacagcggagacaacccgtacctcaagtacaaccacgccgacgcggagtttcaggagcgtcttaaagaagatacgtcttttgggggcaacctcggacgagcagtcttccaggcgaaaaagagggttcttgaacctctgggcctggttgaggaacctgttaagacggctccgggaaaaaagaggccggtagagcattctcctgcggagccagactcctcctcgggaaccggaaaggcgggccagcagcctgcgagaaagagattgaatttcggtcagactggagacgcagactccgtacctgacccccagcctctcggacagccaccagcagccccctctggtctgggaactaatacgatggctacaggcagtggcgcaccaatggcagacaataacgagggcgccgacggagtgggtaattcctcgggaaattggcattgcgattccacatggatgggcgacagagccatcaccaccagcacccgaacctgggccctgcccacctacaacaaccacctctacaagcaaatctccagccaatctggagcctcaaacgacaaccactactttggctacagcaccccttgggggtattttgacttcaacagattccactgtcacttctccccacgtgactggcaaagactcatcaacaacaactggggattccgacccaagagactcaacttcaagctctttaacattcaagtcaaagaggtcacgcagaatgacggtacgacgacgattgccaataaccttaccagcacggttcaagtctttactgactcggagtaccagctcccgtacgtcctcggctcggcgcatcaaggatgcctcccgccgtttccagcagacgtcttcatggtgccacagtatggatacctcaccctgaacaacgggagtcaggcggtaggacgctcttccttttactgcctggagtactttccttctcagatgctgcgtaccggaaacaactttaccttcagctacacctttgaggacgttcctttccacagcagctacgctcacagccagagtttggaccggctgatgaatcctctgatcgaccagtatctgtattacttgagcaaaacaaacgctccaagcggaaccaccacgatgtccaggcttcagttttctcaggccggagcgagtgacattcgggaccagtctaggaactggcttcctggaccctgttaccgccagcagcgagtatcaaaaacagctgcggataacaacaacagtgattattcgtggactggagctaccaagtaccacctcaatggaagagactctctggtgaatccgggcccagctatggccagccacaaggacgatgaagaaaaatattttcctcagagcggggttctcatctttggaaaacaagactcgggaaaaactaatgtggacattgaaaaggtcatgattacggacgaagaggaaatcaggaccaccaatcccgtggctacggagcagtatggttctgtatctaccaacctccagagcggcaacacacaggcagccaccacagatgtcaacacacaaggcgttcttccaggcatggtctggcaggacagagacgtgtacctgcaaggacccatctgggcaaagattcctcacacggacggacactttcacccttctcccctcatgggaggatttggactcaaacaccctcctccgcaaatcctcatcaagaatacccccgtacctgcgaatccttcgaccacattcagcgcggcaaagcttgcttctttcatcacacagtactctacggggcaggtcagcgtggagattgagtgggagctgcagaaggagaacagcaaacgctggaaccccgaaatccagtacacttccaactacaacaagtctgttaatgtggactttactgtggacactaatggtgtgtattcagagcctcgccccattggcacaagatacctgactcgtaatctgtaa

SEQ ID NO: 3192 - DNA, 2208 bp, synthetic construct
  misc_feature 1..2208: note = source = /note="Description of Artificial Sequence: Synthetic polynucleotide"
  source 1..2208: mol_type = other DNA
atggctgccgatggttatcttccagattggctcgaggacactctctctgaaggaataagacagtggtggaagctcaaacctggcccaccaccaccaaagcccgcagagcggcatcaggacgacagcaggggtcttgtgcttcctgggtacaagtacctcggacccttcaacggactcgacaagggagagccggtcaacgaggcagacgccgcggccctcgagcacgacaaggcctacgaccggcagctcgacagcggagacaacccgtacctcaagtacaaccacgccgacgcggagtttcaggagcgtcttaaagaagatacgtcttttgggggcaacctcggacgagcagtcttccaggcgaaaaagagggttcttgaacctctaggcctggttgaggaacctgttaagacggctccgggaaaaaagaggccggtagagcattctcctgcggagccagactcctcctcgggaaccggaaaggcgggccagcagcctgcgagaaagagattgaatttcggtcagactggagacgcagactccgtacctgacccccagcctcccggacagccaccagcagccccctctggtctgggaactaatacgatggctacaggcagtggcgcaccaatggcagacaataacgagggcgccgacggagtgggtaattcctcgggaaattggcattgcgattccacatggatgggcgacagagtcatcaccaccagcacccgaacctgggccctgcccacctacaacaaccacctctacaagcaaatctccagccaatctggagcctcaaacgacaaccactactttggctacagcaccccttgggggtattttgacttcaacagattccactgtcacttctccccacgtgactggcaaagactcatcaacaacaactggggattccgacccaagagactcaacttcaagctctttaacattcaagtcaaagaggtcacgcagaatgacggtacgacgacgattgccaataaccttaccagcacggttcaagtctttactgactcggagtaccagctcccgtacgtcctcggctcggcgcatcaaggatgcctcccgccgtttccagcagacgtcttcatggtgccacagtatggatacctcaccctgaacaacgggagtcaggcggtaggacgctcttccttttactgcctggagtactttccttctcagatgctgcgtaccggaaacaactttaccttcagctacacctttgaggacgttcctttccacagcagctacgctcacagccagagtttggaccggctgatgaatcctctgatcgaccagtatctgtattacttgagcaaaacaaacgctccaagcggaaccaccacgatgtccaggcttcagttttctcaggccggagcgagtgacattcgggaccagtctaggaactggcttcctggaccctgttaccgccagcagcgagtatcaaaaacagctgcggataacaacaacagtgattattcgtggactggagctaccaagtaccacctcaatggaagagactctctggtgaatccgggcccagctatggccagccacaaggacgatgaagaaaaatattttcctcagagcggggttctcatctttggaaaacaagactcgggaaaaactaatgtggacattgaaaaggtcatgattacagacgaagaggaagtcaggaccaccaatcccgtggctacggagcagtatggttctgtatctaccaacctccagagcggcaacacacaggcagccaccacagatgtcaacacacaaggcgttcttccaggcatggtctggcaggacagagacgtgtacctgcaaggacccatctgggcaaagattcctcacacggacggacactttcacccttctcccctcatgggaggatttggactcaaacaccctcctccgcaaatcctcatcaagaatacccccgtacctgcgaatccttcgaccacattcagcgcggcaaagtttgcttctttcatcacacagtactctacggggcaggtcagcgtggagattgagtgggagctgcagaaggagaacagcaaacgctggaaccccgaaatccagtacacttccaactacaacaagtctgttaatgtggactttactgtggacactaatggtgtgtattcagagcctcgccccattggcacaggatacctgactcgtaatctgtaa

SEQ ID NO: 3193 - DNA, 2208 bp, synthetic construct
  misc_feature 1..2208: note = source = /note="Description of Artificial Sequence: Synthetic polynucleotide"
  source 1..2208: mol_type = other DNA
atggctgccgatggttatcttccagattggctcgaggacactctctctgaaggaataagacagtggtggaagctcaaacctggcccaccaccaccaaagcccgcagagcggcatcaggacgacagcaggggtcttgtgcttcctgggtacaagtacctcggacccttcaacggactcgacaagggagagccggtcaacgaggcagacgccgcggccctcgagcacgacaaggcctacgaccggcagctcgacagcggagacaacccgtacctcaagtacaaccacgccgacgcggagtttcaggagcgtcttaaagaagatacgtcttttgggggcaacctcggacgagcagtcttccaggcgaaaaagagggttcttgaacctctgggcctggttgaggaacctgttaagacggctccgggaaaaaagaggccggtagagcattctcctgcggagccagactcctcctcgggaaccggaaaggcgggccagcagcctgcgagaaagagattgaatttcggtcagactggagacgcagactccgtacctgacccccagcctctcggacagccaccagcagccccctctggtctgggaactaatacggtggctacaggcagtggcgcaccaatggcagacaataacgagggcgccgacggagtgggtaattcctcgggaaattggcattgcgattccacatggatgggcgacagagtcatcaccaccagcacccgaacctgggccctgcccacctacaacaaccacctctacaagcaaatctccagccaatctggagcctcaaacgacaaccactactttggctacagcaccccttgggggtattttgacttcaacagattccactgtcacttctccccacgtgactggcaaagactcatcaacaacaactggagattccgacccaagagactcaacttcaagctctttaacattcaagtcaaagaggtcacgcagaatgacggtacgacgacgattgccgataaccttaccagcacggttcaagtctttactgactcggagtaccagctcccgtacgtcctcggctcggcgcatcaaggatgcctcccgccgtttccagcagacgtcttcatggtgccacagtatggatacctcaccctgaacaacgggagtcaggcggtaggacgctcttccttttactgcctggagtactttccttctcagatgctgcgtaccggaaacaactttaccttcagctacacctttgaggacgttcctctccacagcagctacgctcacagccagagtttggaccggctgatgaatcctctgatcgaccagtatctgtattacttgagcaaaacaaacgctccaagcggaaccaccacgatgtccaggcttcagttttctcaggccggagcgagtgacattcgggaccagtctaggaactggcttcctggaccctgttaccgccagcagcgagtatcaaaaacagctgcggataacaacaacagtgattattcgtggactggagctaccaagtaccacctcaatggaagagactctctggtgaatccgggcccagctatggccagccacaaggacgatgaagaaaaatattttcctcagagcggggttctcatctttggaaaacaagactcgggaaaaactaatgtggacattgaaaaggtcatgattacagacgaagaggaaatcaggaccaccaatcccgtggctacggagcagtatggttctgtatctaccaacctccagagcggcaacacacaggcagccaccacagatgtcaacacacaaggcgttcttccaggcatggtctggcaggacagagacgtgtacctgcaaggacccatctgggcaaagattcctcacacggacggacactttcacccttctcccctcatgggaggatttggactcaaacaccctcctccgcaaatcctcatcaagaatacccccgtacctgcgaatccttcgaccacattcagcgcggcaaagcttgcttctttcatcacacagtactctacggggcaggtcagcgtggagattgagtgggagctgcagaaggagaacagcaaacgctggaaccccgaaatccagtacacttccaactacaacaagtctgttaatgtggactttactgcggacactaatggtgtgtattcagagcctcgccccattggcacaagatacctgactcgtaatctgtaa

SEQ ID NO: 3194 - DNA, 2208 bp, synthetic construct
  misc_feature 1..2208: note = source = /note="Description of Artificial Sequence: Synthetic polynucleotide"
  source 1..2208: mol_type = other DNA
atggctgccgatggttatcttccagattggctcgaggacactctctctgaaggaataagacagtggtggaagctcaaacctggcccaccaccaccaaagcccgcagagcggcatcaggacgacagcaggggtcttgtgcttcctgggtacaagtacctcggacccttcaacggactcgacaagggagagccggtcaacgaggcagacgccgcggccctcgagcacgacaaggcctacgaccggcagctcgacagcggagacaacccgtacctcaagtacaaccacgccgacgcggagtttcaggagcgtcttaaagaggatacgtcttttgggggcaacctcggacgagcagtcttccaggcgaaaaagagggttcttgaacctctgggcctggttgaggaacctgttaagacggctccgggaaaaaagaggccggtagagcattctcctgcggagccagactcctcctcgggaaccggaaaggcgggccagcagcctgcgagaaagagatcgaatttcggtcagactggagacgcagactccgtacctgacccccagcctctcggacagccaccagcagccccctctggtctgggaactaatacgatggctacaggcagtggcgcaccaatggcagacaataacgagggcgccgacggagtgggtaattcctcgggaaattggcattgcgattccacatggatgggcgacagagtcatcaccaccagcacccgaacctgggccctgcccacctacaacaaccacctctacaagcaaatctccagccaatctggagcctcaaacgacaaccactactttggctacagcaccccttgggggtattttgacttcaacagattccactgtcacttctccccacgtgactggcaaagactcatcaacaacaactggggattccgacccaagagactcaacttcaagctctttaacattcaagtcaaagaggtcgcgcagaatgacggtacgacgacgattgccaataaccttaccagcacggttcaagtctttactgactcggagtaccagctcccgtacgtcctcggctcggcgcatcaaggatgcctcccgccgtttccagcagacgtcttcatggtgccacagtatggatacctcaccctgaacaacgggagtcaggcggtaggacgctcttccttttactgcctggagtactttccttctcagatgctgcgtaccggaaacaactttaccttcagctacacctttgaggacgttcctttccacagcagctacgctcacagccagagtttggaccggctgatgaatcctctgatcgaccagtatctgtattacttgagcaaaacaaacgctccaagcggaaccaccacgatgtccaggcttcagttttctcaggccggagcgagtgacattcgggaccagtctaggaactggcttcctggaccctgttaccgccagcagcgagtatcaaaaacagctgcggataacaacaacagtgattattcgtggactggagctaccaagtaccacctcaatggaagagactctctggtgaatccgggcccagctatggccagccacaaggacgatgaagaaaaatattttcctcagagcggggttctcatctttggaaaacaagactcgggaaaaactaatgtggacattaaaaaggtcatgattacagacgaagaggaaatcaggaccaccaatcccgtggctacggagcagtatggttctgtatctaccaacctccagagcggcaacacacaggcagccaccacagatgtcaacacacaaggcgttcttccaggcatggtctggcaggacagagacgtgtacctgcaaggacccatctgggcaaagatccctcacacggacggacactttcacccttctcccctcatgggaggatttggactcaaacaccctcctccgcaaatcctcatcaagaatacccccgtacctgcgaatccttcgaccacattcagcgcggcaaagtttgcttctttcatcacacagtactctacggggcaggtcagcgtggagattgagtgggagctgcagaaggagaacagcaaacgctggaaccccgaaatccagtacacttccaactacaacaagtctgttaatgtggactttactgtggacactaatggtgtgtattcagagcctcgccccattggcacaagatacctgactcgtaatctgtaa

SEQ ID NO: 3195 - DNA, 2205 bp, synthetic construct
  misc_feature 1..2205: note = source = /note="Description of Artificial Sequence: Synthetic polynucleotide"
  source 1..2205: mol_type = other DNA
atggctgccgatggttatcttccagattggctcgaggacactctctctgaaggaataagacagtggtggaagctcaaacctggcccaccaccaccaaagcccgcagagcggcatcaggacgacagcaggggtcttgtgcttcctgggtacaagtacctcggacccttcaacggactcgacaagggagagccggtcaacgaggcagacgccgcggccctcgagcacgacaaggcctacgaccggcagctcgacagcggagacaacccgtacctcaagtacaaccacgccgacgcggagtttcaggagcgtcttaaagaagatacgtcttttgggggcaacctcggacgagcagtcttccaggcgaaaaagagggttcttgaacctctgggcctggttgaggaacctgttaagacggctccgggaaaaaagaggccggtagagcattctcctgcggagccagactcctcctcgggaaccggaaaggcgggccagcagcctgcgagaaagagattgaatttcggtcagactggagacgcagactccgtacctgacccccagcctctcggacagccaccagcagccccctctggtctgggaactaatacgatggctacaggcagtggcgcaccaatggcagacaataacgagggcgccgacggagtgggtaattcctcgggaaattggcattgcgattccacatggatgggcgacagagtcatcaccaccagcacccgaacctgggccctgcccacctacaacaaccacctctacaagcaaatctccagccaatctggagcctcaaacgacaaccactactttggctacagcaccccttgggggtattttgacttcaacagattccactgtcacttctccccacgtgactggcaaagactcatcaacaactggggattccgacccaagagactcaacttcaagctctttaacattcaagtcaaagaggtcacgcagaatgacggtacgacgacgattgccaataaccttaccagcacggttcaagtctttactgactcggagtaccagctcccgtacgtcctcggctcggcgcatcaaggatgcctcccgccgtttccagcagacgtcttcatggtgccacagtatggatacctcaccctgaacaacgggagtcaggcggtaggacgctcttccttttactgcctggagtactttccttctcagatgctgcgtaccggaaacaactttaccttcagctacacctttgaggacgttcctttccacagcagctacgctcacagccagagtttggaccggctgatgaatcctctgatcgaccagtatctgtattacttgagcaaaacaaacgctccaagcggaaccaccacgatgtccaggcttcagttttctcaggccggagcgagtgacattcgggaccagtctaggaactggcttcctggaccctgttaccgccagcagcgagtatcaaaaacagctgcggataacaacaacagtgattattcgtggactggagctaccaagtaccacctcaatggaagagactctctggtgaatccgggcccagctatggccagccacaaggacgatgaagaaaaatattttcctcagagcggggttctcatctttggaaaacaagactcgggaaaaactaatgtggacattgaaaaggtcatgattacagacgaagaggaaatcaggaccaccaatcccgtggctacggagcagtatggttctgtatctaccaacctccagagcggcaacacacaggcagccaccacagatgtcaacacacaaggcgttcttccaggcatggtctggcaggacagagacgtgtacctgcaaggacccatctgggcaaagattcctcacacggacggacactttcacccttctcccctcatgggaggatttggactcaaacaccctcctccgcaaatcctcatcaagaatacccccgtacctgcgaatccttcgaccacattcagcgcggcaaagtttgcttctttcatcacacagtactctacggggcaggtcagcgtggagattgagtgggagctgcagaaggagaacagcaaacgctggaaccccgaaatccagtacacttccaactacaacaagtctgttaatgtggactttactgtggacactaatggtgtgtattcagagcctcgccccattggcacaagatacctgactcgtaatctgtaa

SEQ ID NO: 3196 - DNA, 2208 bp, synthetic construct
  misc_feature 1..2208: note = source = /note="Description of Artificial Sequence: Synthetic polynucleotide"
  source 1..2208: mol_type = other DNA
atggctgccgatggttatcttccagattggctcgaggacactctctctgaaggaataagacagtggtggaagctcaaacctggcccaccaccaccaaagcccgcagagcggcatcaggacgacagcaggggtcttgtgcttcctgggtacaagtacctcggacccttcaacggactcgacaagggagagccggtcaacgaggcagacgccgcggccctcgagcacgacaaggcctacgaccggcagctcgacagcggagacaacccgtacctcaagtacaaccacgccgacgcggagtttcaggagcgtcttaaagaagatacgtcttttgggggcaacctcggacgagcagtcttccaggcgaaaaagagggttcttgaacctctgggcctggttgaggaacctgttaagacggctccgggaaaaaagaggccggtagagcattctcctgcggagccagactcctcctcgggaaccggaaaggcgggccagcagcctgcgagaaagagattgaatttcggtcagactggagacgcagactccgtacctgacccccagcctctcggacagccaccagcagccccctctggtctgggaactaatacgatggctacaggcagtggcgcaccaatggcagacaataacgagggcgccgacggagtgggtaattcctcgggaaattggcattgcgattccacatggatgggcgacagagtcatcaccaccagcacccgaacctgggccctgcccacctacaacaaccacctctacaagcaaatctccagccaatctggagcctcaaacgacaaccactactttggctacagcaccccttgggggtattttgacttcaacagattccactgtcacttctccccacgtgactggcaaagactcatcaacaacaactggggattccgacccaagagactcaacttcaagctctttaacattcaagtcaaagaggtcacgcagaatgacggtacgacgacgattgccaataaccttaccagcacggttcaagtctttactgactcggagtaccagctcccgtacgtcctcggctcggcgcatcaaggatgcctcccgccgtttccagcagacgtcttcatggtgccacagtatggatacctcaccctgaacaacgggagtcaggcggtaggacgctcttccttttactgcctggagtactttccttctcagatgctgcgtaccggaaacaactttaccttcagctacacctttgaggacgttcctttccacagcagctacgctcacagccagagtttggaccggctgatgaatcctctgatcgaccagtatctgtattacttgagcaaaacaaacgctccaagcggaaccaccacgatgtccaggcttcagttttctcaggccggagcgagtgacattcgggaccagtctaggaactggcttcctggaccctgttaccgccagcagcgagtatcaaaaacagctgcggataacaacaacagtgattattcgtggactggagctaccaagtaccacctcaatggaagagactctctggtgaatccgggcccagctatggccagccacaaggacgatgaagaaaaatattttcctcagagcggggttctcatctttggaaaacaagactcgggaaaaactaatgtggacattgaaaaggtcatgattacagacgaagaggaaatcaggaccaccaatcccgtggctacggagcagtatggttctgtatctaccaacctccagagcggcaacacacaggcagccaccacagatgtcaacacacaaggcgttcttccaggcatggtctggcaggacagagacgtgtacctgcaaggacccatctgggcaaagattcctcacacggacggacactttcacccttctcccctcatgggaggatttggactcaaacaccctcctccgcaaatcctcatcaagaatacccccgtacctgcgaatccttcgaccacattcagcgcggcaaagtttgcttctttcatcacacagtactctacggggcaggtcagcgtggagattgagtgggagctgcagaaggagaacagcaaacgctggaaccccgaaatccagtacacttccaactacaacaagtctgttaatgtggactttactgtggacactaatggtgtgtattcagagcctcgccccattgacacaagatacctgactcgtaatctgtaa

SEQ ID NO: 3197 - DNA, 2208 bp, synthetic construct
  misc_feature 1..2208: note = source = /note="Description of Artificial Sequence: Synthetic polynucleotide"
  source 1..2208: mol_type = other DNA
atggctgccgatggttatcttccagattggctcgaggacactctctctgaaggaataagacagtggtggaagctcaaacctggcccaccaccaccaaagcccgcagagcggcatcaggacgacagcaggggtcttgtgcttcctgggtacaagtacctcggacccttcaacggactcgacaagggagagccggtcaacgaggcagacgccgcggccctcgagcacgacaaggcctacgaccggcagctcgacagcggagacaacccgtacctcaagtacaaccacgccgacgcggagtttcaggagcgtcttaaagaagatacgtcttttgggggcaacctcggacgagcagtcttccaggcgaaaaagagggttcttgaacctctgggcctggttgaggaacctgttaagacggctccgggaaaaaagaggccggtagagcattctcctgcggagccagactcctcctcgggaaccggaaaggcgggccagcagcctgcgagaaagagattgaatttcggtcagactggagacgcagactccgtacctgacccccagcctctcggacagccaccagcagccccctctggtctgggaactaatacgatggctacaggcagtggcgcaccaatggcagacaataacgagggcgccgacggagtgggtaattcctcgggaaattggcattgcgattccacatggatgggcgacagagtcatcaccaccagcacccgaacctgggccctgcccacctacaacaaccacctctacaagcaaatctccagccaatctggagcctcaaacgacaaccactactttggctacagcaccccttgggggtattttgacttcaacagattccactgtcacttctccccacgtgactggcaaagactcatcaacaacaactggggattccgacccaagagactcaacttcaagctctttaacattcaagtcaaagaggtcacgcagaatgacggtacgacgacgattgccaataaccttaccagcacggttcaagtctttactgactcggagtaccagctcccgtacgtcctcggctcggcgcatcaaggatgcctcccgccgtttccagcagacgtcttcatggtgccacagtatggatacctcaccctgaacaacgggagtcaggcggtaggacgctcttccttttactgcctggagtactttccttctcagatgctgcgtaccggaaacaactttaccttcagctacacctttgaggacgttcctttccacagcagctacgctcacagccagagtttggaccggctgatgaatcctctgatcaaccagtatctgtattacttgagcaaaacaaacgctccaagcggaaccaccacgatgtccaggcttcagttttctcaggccggagcgagtgacattcgggaccagtctaggaactggcttcctggaccctgttaccgccagcagcgagtatcaaaaacagctgcggataacaacaacagtgattattcgtggactggagctaccaagtaccacctcaatggaagagactctctggtgaatccgggcccagctatggccagccacaaggacgatgaagaaaaatattttcctcagagcggggttctcatctttggaaaacaagactcgggaaaaactaatgtggacattgaaaaggtcatgattacagacgaagaggaaatcaggaccaccaatcccgtggctacggagcagtatggttctgtatctaccaacctccagagcggcaacacacaggcagccaccacagatgtcaacacacaaggcgttcttccaggcatggtctggcaggacagagacgtgtacctgcaaggacccatctgggcaaagattcctcacacggacggacactttcacccttctcccctcatgggaggatttggactcaaacaccctcctccgcaaatcctcatcaagaatacccccgtacctgcgaatccttcgaccacattcagcgcggcaaagtttgcttctttcatcacacagtactctacggggcaggtcagcgtggagattgagtgggagctgcagaaggagaacagcaaacgctggaaccccgaaatccagtacacttccaactacaacaagtctgttaatgtggactttactgtggacactaatggtgtgtattcagagcctcgccccattggcacaagatacctgactcgtaatctgtaa

SEQ ID NO: 3198 - DNA, 2208 bp, synthetic construct
  misc_feature 1..2208: note = source = /note="Description of Artificial Sequence: Synthetic polynucleotide"
  source 1..2208: mol_type = other DNA
atggctgccgatggttatcttccagattggctcgaggacactctctctgaaggaataagacagtggtggaagctcaaacctggcccaccaccaccaaagcccgcagagcggcatcaggacgacagcaggggtcttgtgcttcctgggtacaagtacctcggacccttcaacggactcgacaagggagagccggtcaacgaggcagacgccgcggccctcgagcacgacaaggcctacgaccggcagctcgacagcggagacaacccgtacctcaagtacaaccacgccgacgcggagtttcaggagcgtcttaaagaagatacgtcttttgggggcaacctcggacgagcagtcttccaggcgaaaaagagggttcttgaacctctgggcctggttgaggaacctgttaagatggctccgggaaaaaagaggccggtagagcattctcctgcggagccagactcctcctcgggaaccggaaaggcgggccagcagcctgcgagaaagagattgaatttcggtcagactggagacgcagactccgtacctgacccccagcctctcggacagccaccagcagccccctctggtctgggaactaatacgacggctacaggcagtggcgcaccaatggcagacaataacgagggcgccgacggagtgggtaattcctcgggaaattggcattgcgattccacatggatgggcgacagagtcatcaccaccagcacccgaacctgggccctgcccacctacaacaaccacctctacaagcaaatctccagccaatctggagcctcaaacgacaaccactactttggctacagcaccccttgggggtattttgacttcaacagattccactgtcacttctccccacgtgactggcaaagactcatcaacaacaactggggattccgacccaagagactcaacttcaagctctttaacattcaagtcaaagaggtcacgcagaatgacggtacgacgacgattgccaataaccttaccagcacggttcaagtctttactgactcggagtaccagctcccgtacgtcctcggctcggcgcatcaaggatgcctcccgccgtttccagcagacgtcttcatggtgccacagtatggatacctcaccctgaacaacgggagtcaggcggtaggacgctcttccttttactgcctggagtactttccttctcagatgctgcgtaccggaaacaactttaccttcagctacacctttgaggacgttcctttccacagcagctacgctcacagccagagtttggaccggctgatgaatcctctgatcgaccagtatctgtattacttgagcaaaacaaacgctccaagcggaaccaccacgatgtccaggcttcagttttctcaggccggagcgagtgacattcgggaccagtctaggaactggcttcctggaccctgttaccgccagcagcgagtatcaaaaacagctgcggataacaacaacagtgattattcgtggactggagctaccaagtaccacctcaatggaagagactctctggtgaatccgggcccagctatggccagccacaaggacgatgaagaaaaatattttcctcagagcggggttctcatctttggaaaacaagactcgggaaaaactaatgtggacattgaaaaggtcatgattacagacgaagaggaaatcaggaccaccaatcccgtggctacggagcagtatggttctgtatctaccaacctccagagcggcaacacacaggcagccaccacagatgtcaacacacaaggcgttcttccaggcatggtctggcaggacagagacgtgtacctgcaaggacccatctgggcaaagattcctcacacggacggacactttcacccttctcccctcatgggaggatttggactcaaacaccctcctccgcaaatcctcatcaagaatacccccgtacctgcgaatccttcgaccacattcagcgcggcaaagtttgcttctttcatcacacagtactctacggggcaggtcagcgtggagattgagtgggagctgcagaaggagaacagcaaacgctggaaccccgaaatccagtacacttccaactacaacaagtctgttaatgtggactttactgtggacactaatggtgtgtattcagagcctcgccccattggcacaagatacctgactcgtaatctgtaa

SEQ ID NO: 3199 - DNA, 2208 bp, synthetic construct
  misc_feature 1..2208: note = source = /note="Description of Artificial Sequence: Synthetic polynucleotide"
  source 1..2208: mol_type = other DNA
atggctgccgatggttatcttccagattggctcgaggacactctctctgaaggaataagacagtggtggaagctcaaacctggcccaccaccaccaaagcccgcagagcggcatcaggacgacagcaggggtcttgtgcttcctgggtacaagtacctcggacccttcaacggactcgacaagggagagccggtcaacgaggcagacgccgcggccctcgagcacgacaaggcctacgaccggcagctcgacagcggagacaacccgtacctcaagtacaaccacgccgacgcggagtttcaggagcgtcttaaagaagatacgtcttttgggggcaacctcggacgagcagtcttccaggcgaaaaagagggttcttgaacctctgggcctggttgaggaacctgttaagacggctccgggaaaaaagaggccggtagagcattctcctgcggagccagactcctcctcgggaaccggaaaggcgggccagcagcctgcgagaaagagattgaatttcggtcagactggagacgcagactccgtacctgacccccagcctctcggacagccaccagcagccccctctggtctgggaactaatacgatggctacaggcagtggcgcaccaatggcagacaataacgagggcgccgacggagtgggtaattcctcgggaaattggcattgcgattccacatggatgggcgacagagtcatcaccaccagcacccgaacctgggccctgcccacctacaacaaccacctctacaagcaaatctccagccaatctggagcctcaaacgacaaccactactttggctacagcaccccttgggggtattttgacttcaacagattccactgtcacttctccccacgtgactggcaaagactcatcaacaacaactggggattccgacccaagagactcaacttcaagctctttaacattcaagtcaaagaggtcacgcagaatgacggtacgacgacgattgccaataaccttaccagcacggttcaagtctttactgactcggagtaccagctcccgtacgtcctcggctcggcgcatcaaggatgcctcccgccgtttccagcagacgtcttcatggtgccacagtatggatacctcaccctgaacaacgggagtcaggcggtaggacgctcttccttttactgcctggagtactttccttctcagatgctgcgtaccggaaacaactttaccttcagctacacctttgaggacgttcctttccacagcagctacgctcacagccagagtttggaccggctgatgaatcctctgatcgaccagtatctgtattacttgagcaaaacaaacgctccaagcggaaccaccacgatgtccaggcttcagttttctcaggccggagcgagtgacattcgggaccagtctaggaactggcttcctggaccctgttaccgccagcagcgagtatcaaaaacagctgcggataacaacaacagtgattattcgtggactggagctaccaagtaccacctcaatggaagagactctctggtgaatccgggcccagctatggccagccacaaggacgatgaagaaaaatattttcctcagagcggggttctcatctttggaaaacaagactcgggaaaaactaatgtggacattgaaaaggtcatgattacagacgaagaggaaatcaggaccaccaatcccatggctacggagcagtatggttctgtatctaccaacctccagagcggcaacacacaggcagccaccacagatgtcaacacacaaggcgttcttccaggcatggtctggcaggacagagacgtgtacctgcaaggacccatctgggcaaagattcctcacacggacggacactttcacccttctcccctcatgggaggatttggactcaaacaccctcctccgcaaatcctcatcaagaatacccccgtacctgcgaatccttcgaccacattcagcgcggcaaagtttgcttctttcatcacacagtactctacggggcaggtcagcgtggagattgagtgggagctgcagaaggagaacagcaaacgctggaaccccgaaatccagtacacttccaactacaacaagtctgttaatgtggactttactgtggacactaatggtgtgtattcagagcctcgccccattggcacaagatacctgactcgtaatctgtaa

SEQ ID NO: 3200 - DNA, 2208 bp, synthetic construct
  misc_feature 1..2208: note = source = /note="Description of Artificial Sequence: Synthetic polynucleotide"
  source 1..2208: mol_type = other DNA
atggctgccgatggttatcttccagattggctcgaggacactctctctgaaggaataagacagtggtggaagctcaaacctggcccaccaccaccaaagcccgcagagcggcatcaggacgacagcaggggtcttgtgcttcctgggtacaagtacctcggacccttcaacggactcgacaagggagagccggtcaacgaggcagacgccgcggccctcgagcacgacaaggcctacgaccggcagctcgacagcggagacaacccgtacctcaagtacaaccacgccgacgcggagtttcaggagcgtcttaaagaagatacgtcttttgggggcaacctcggacgagcagtcttccaggcgaaaaagagggttcttgaacctctgggcctggttgaggaacctgttaagacggctccgggaaaaaagaggccggtagagcattctcctgcggagccagactcctcctcgggaaccggaaaggcgggccagcagcctgcgagaaagagattgaatttcggtcagactggagacgcagactccgtacctgacccccagcctctcggacagccaccagcagccccctctggtctgggaactaatacgatggctacaggcagtggcgcaccaatggcagacaataacgagggcgccgacggagtgggtaattcctcgggaaattggcattgcgattccacatggatgggcgacagagtcatcaccaccagcacccgaacctgggccctgcccacctacaacaaccacctctacaagcaaatctccagccaatctggagcctcaaacgacaaccactactttggctacagcaccccttgggggtattttgacttcaacagattccactgtcacttctccccacgtgactggcaaagactcatcaacaacaactggggattccgacccaagagactcaacttcaagctctttaacattcaagtcaaagaggtcacgcagaatgacggtacgacgacgattgccaataaccttaccagcacggttcaagtctttactgactcggagtaccagctcccgtacgtcctcggctcggcgcatcaaggatgcctcccgccgtttccagcagacgtctccatggtgccacagtatggatacctcaccctgaacaacgggagtcaggcggtaggacgctcttccttttactgcctggagtactttccttctcagatgctgcgtaccggaaacaactttaccttcagctacacctttgaggacgttcctttccacagcagctacgctcacagccagagtttggaccggctgatgaatcctctgatcgaccagtatctgtattacttgagcaaaacaaacgctccaagcggaaccaccacgatgtccaggcttcagttttctcaggccggagcgagtgacattcgggaccagtctaggaactggcttcctggaccctgttaccgccagcagcgagtatcaaaaacagctgcggataacaacaacagtgattattcgtggactggagctaccaagtaccacctcaatggaagagactctctggtgaatccgggcccagctatggccagccacaaggacgatgaagaaaaatattttcctcagagcggggttctcatctttggaaaacaagactcgggaaaaactaatgtggacattgaaaaggtcatgattacagacgaagaggaaatcaggaccaccaatcccgtggctacggagcagtatggttctgtatctaccaacctccagagcggcaacacacaggcagccaccacagatgtcaacacacaaggcgttcttccaggcatggtctggcaggacagagacgtgtacctgcaaggacccatctgggcaaagattcctcacacggacggacactttcacccttctcccctcatgggaggatttggactcaaacaccctcctccgcaaatcctcatcaagaatacccccgtacctgcgaatccttcgaccacattcagcgcggcaaagcttgcttctttcatcacacagtactctacggggcaggtcagcgtggagattgagtgggagctgcagaaggagaacagcaaacgctggaaccccgaaatccagtacacttccaactacaacaagtctgttaatgtggactttactgtggacactaatggtgtgtattcagagcctcgccccattggcacaagatacctgactcgtaatctgtaa

SEQ ID NO: 3201 - DNA, 2208 bp, synthetic construct
  misc_feature 1..2208: note = source = /note="Description of Artificial Sequence: Synthetic polynucleotide"
  source 1..2208: mol_type = other DNA
atggctgccgatggttatcttccagattggcccgaggacactctctctgaaggaataagacagtggtggaagctcaaacctggcccaccaccaccaaagcccgcagagcggcatcaggacgacagcaggggtcttgtgcttcctgggtacaagtacctcggacccttcaacggactcgacaagggagagccggtcaacgaggcagacgccgcggccctcgagcacgacaaggcctacgaccggcagctcgacagcggagacaacccgtacctcaagtacaaccacgccgacgcggagtttcaggagcgtcttaaagaagatacgtcttttgggggcaacctcggacgagcagtcttccaggcgaaaaagagggttcttgaacctctgggcctggttgaggaacctgttaagacggctccgggaaaaaagaggccggtagagcattctcctgcggagccagactcctcctcgggaaccggaaaggcgggccagcagcctgcgagaaagagattgaatttcggtcagactggagacgcagactccgtacctgacccccagcctctcggacagccaccagcagccccctctggtctgggaactaatacgatggctacaggcagtggcgcaccaatggcagacaataacgagggcgccgacggagtgggtaattcctcgggaaattggcattgcgattccacatggatgggcgacagagtcatcaccaccagcacccgaacctgggccctgcccacctacaacaaccacctctacaagcaaatctccagccaatctggagcctcaaacgacaaccactactttggctacagcaccccttgggggtattttgacttcaacagattccactgtcacttctccccacgtgactggcaaagactcatcaacaacaactggggattccgacccaagagactcaacttcaagctctttaacattcaagtcaaagaggtcacgcagaatgacggtacgacgacgattgccaataaccttaccagcacggttcaagtctttactgactcggagtaccagctcccgtacgtcctcggctcggcgcatcaaggatgcctcccgccgtttccagcagacgtcttcatggtgccacagtatggatacctcaccctgaacaacgggagtcaggcggtaggacgctcttccttttactgcctggagtactttccttctcagatgctgcgtaccggaaacaactttaccttcagctacacctttgaggacgttcctttccacagcagctacgctcacagccagagtttggaccggctgatgaatcctctgatcgaccagtatctgtattacttgagcaaaacaaacgctccaagcggaaccaccacgatgtccaggcttcagttttctcaggccggagcgagtgacattcgggaccagtctaggaactggcttcctggaccctgttaccgccagcagcgagtatcaaaaacagctgcggataacaacaacagtgattattcgtggactggagctaccaagtaccacctcaatggaagagactctctggtgaatccgggcccagctatggccagccacaaggacgatgaagaaaaatattttcctcagagcggggttctcatctttggaaaacaagactcgggaaaaactaatgtggacattgaaaaggtcatgattacagacgaagaggaaatcaggaccaccaatcccgtggctacggagcagtatggttctgtatctaccaacctccagagcggcaacacacaggcagccaccacagatgtcaacacacaaggcgttcttccaggcatggtctggcaggacagagacgtgtacctgcaaggacccatctgggcaaagattcctcacacggacggacactttcacccttctcccctcatgggaggatttggactcaaacaccctcctccgcaaatcctcatcaagaatacccccgtacctgcgaatccttcgaccacattcagcgcggcaaagtttgcttctttcatcacacagtactctacggggcaggtcagcgtggagattgagtgggagctgcagaaggagaacagcaaacgctggaaccccgaaatccagtacacttccaactacaacaagtctgttaatgtggactttactgtggacactaatggtgtgtattcagagcctcgccccattggcacaagatacctgactcgtaatctgtaa

SEQ ID NO: 3202 - DNA, 2208 bp, synthetic construct
  misc_feature 1..2208: note = source = /note="Description of Artificial Sequence: Synthetic polynucleotide"
  source 1..2208: mol_type = other DNA
atggctgccgatggttatcttccagattggctcgaggacactctctctgaaggaataagacagtggtggaagctcaaacctggcccaccaccaccaaagcccgcagagcggcatcaggacgacagcaggggtcttgtgcttcctgggtacaagtacctcggacccttcaacggactcgacaagggagagccggtcaacgaggcagacgccgcggccctcgagcacgacaaggcctacgaccggcagctcgacagcggagacaacccgtacctcaagtacaaccacgccgacgcggagtttcaggagcgtcttaaagaagatacgtcttttgggggcaacctcggacgagcagtcttccaggcgaaaaagagggttcttgaacctctgggcctggttgaggaacctgttaagacggctccgggaaaaaagaggccggtagagcattctcctgcggagccagactcctcctcgggaaccggaaaggcgggccagcagcctgcgagaaagagattgaatttcggtcagactggagacgcagactccgtacctgacccccagcctctcggacagccaccagcagccccctctggtctgggaactaatacgatggctacaggcagtggcgcaccaatggcagacaataacgagggcgccgacggagtgggtaattcctcgggaaattggcattgcgattccacatggatgggcgacagagtcatcaccaccagcacccgaacctgggccctgcccacctacaacaaccacctctacaagcaaatctccagccaatctggagcctcaaacgacaaccactactttggctacagcaccccttgggggtattttgacttcaacagattccactgtcacttctccccacgtgactggcaaagactcatcaacaacaactggggattccgacccaagagactcaacttcaagctctttaacattcaagtcaaagaggtcacgcagaatgacggtacgacgacgattgccaataaccttaccagcacggttcaagtctttactgactcggagtaccagctcccgtacgtcctcggctcggcgcatcaaggatgcctcccgccgtttccagcagacgtcttcatggtgccacagtatggatacctcaccctgaacaacgggagtcaggcggtaggacgctcttccttttactgcctggagtactttccttctcagatgctgcgtaccggaaacaactttaccttcagctacacctttgaggacgttcctttccacagcagctacgctcacagccagagtttggaccggctgatgaatcctctgatcgaccagtatctgtattacttgagcaaaacaaacgctccaagcggaaccaccacgatgtccaggcttcagttttctcaggccggagcgagtgacattcgggaccagtctaggaactggcttcctggaccctgttaccgccagcagcgagtatcaaaaacagctgcggataacaacaacagtgattattcgtggactggagctaccaagtaccacctcaatggaagagactctctggtgaatccgggcccagctatggccagccacaaggacgatgaagaaaaattttttcctcagagcggggttctcatctttggaaaacaagactcgggaaaaactaatgtggacattgaaaaggtcatgattacagacgaagaggaaatcaggaccaccaatcccgtggctacggagcagtatggttctgtatctaccaacctccagagcggcaacacacaggcagccaccacagatgtcaacacacaaggcgttcttccaggcatggtctggcaggacagagacgtgtacctgcaaggacccatctgggcaaagattcctcacacggacggacactttcacccttctcccctcatgggaggatttggactcaaacaccctcctccgcaaatcctcatcaagaatacccccgtacctgcgaatccttcgaccacattcagcgcggcaaagtttgcttctttcatcacacagtactctacggggcaggtcagcgtggagattgagtgggagctgcagaaggagaacagcaaacgctggaaccccgaaatccagtacacttccaactacaacaagtctgttaatgtggactttactgtggacactaatggtgtgtattcagagcctcgccccattggcacaagatacctgactcgtaatctgtaa

SEQ ID NO: 3203 - DNA, 2208 bp, synthetic construct
  misc_feature 1..2208: note = source = /note="Description of Artificial Sequence: Synthetic polynucleotide"
  source 1..2208: mol_type = other DNA
atggctgccgatggttatcttccagattggctcgaggacactctctctgaaggaataagacagtggtggaagctcaaacctggcccaccaccaccaaagcccgcagagcggcatcaggacgacagcaggggtcttgtgcttcctgggtacaagtacctcggacccttcaacggactcgacaagggagagccggtcaacgaggcagacgccgcggccctcgagcacgacaaggcctacgaccggcagctcgacagcggagacaacccgtacctcaagtacaaccacgccgacgcggagtttcaggagcgtcttaaagaagatacgtcttttgggggcaacctcggacgagcagtcttccaggcgaaaaagagggttcttgaacctctgggcctggttgaggaacctgttaagacggctccgggaaaaaagaggccggtagagcattctcctgcggagccagactcctcctcgggaatcggaaaggcgggccagcagcctgcgagaaagagattgaatttcggtcagactggagacgcagactccgtacctgacccccagcctctcggacagccaccagcagccccctctggtctgggaactaatacgatggctacaggcagtggcgcaccaatggcagacaataacgagggcgccgacggagtgggtaattcctcgggaaattggcattgcgattccacatggatgggcgacagagtcatcaccaccagcacccgaacctgggccctgcccacctacaacaaccacctctacaagcaaatctccagccaatctggagcctcaaacgacaaccactactttggctacagcaccccttgggggtattttgacttcaacagattccactgtcacttctccccacgtgactggcaaagactcatcaacaacaactggggattccgacccaagagactcaacttcaagctctttaacattcaagtcaaagaggtcacgcagaatgacggtacgacgacgattgccaataaccttaccagcacggttcaagtctttactgactcggagtaccagctcccgtacgtcctcggctcggcgcatcaaggatgcctcccgccgtttccagcagacgtcttcatggtgccacagtatggatacctcaccctgaacaacgggagtcaggcggtaggacgctcttccttttactgcctggagtactttccttctcagatgctgcgtaccggaaacaactttaccttcagctacacctttgaggacgttcctttccacagcagctacgctcacagccagagtttggaccggctgatgaatcctctgatcgaccagtatctgtattacttgagcaaaacaaacgctccaagcggaaccaccacgatgtccaggcttcagttttctcaggccggagcgagtgacattcgggaccagtctaggaactggcttcctggaccctgttaccgccagcagcgagtatcaaaaacagctgcggataacaacaacagtgattattcgtggactggagctaccaagtaccacctcaatggaagagactctctggtgaatccgggcccagctatggccagccacaaggacgatgaagaaaaatattttcctcagagcggggttctcatctttggaaaacaagactcgggaaaaactaatgtggacattgaaaaggtcatgattacagacgaagaggaaatcaggaccaccaatcccgtggctacggagcagtatggttctgtatctaccaacctccagagcggcaacacacaggcagccaccacagatgtcaacacacaaggcgttcttccaggcatggtctggcaggacagagacgtgtacctgcaaggacccatctgggcaaagattcctcacacggacggacactttcacccttctcccctcatgggaggatttggactcaaacaccctcctccgcaaatcctcatcaagaatacccccgtacctgcgaatccttcgaccacattcagcgcggcaaagtttgcttctttcatcacacagtactctacggggcaggtcagcgtggagattgagtgggagctgcagaaggagaacagcaaacgctggaaccccgaaatccagtacacttccaactacaacaagtctgttaatgtggactttactgtggacactaatggtgtgtattcagagcctcgccccattggcacaagatacctgactcgtaatctgtaa

SEQ ID NO: 3204 - DNA, 2208 bp, synthetic construct
  misc_feature 1..2208: note = source = /note="Description of Artificial Sequence: Synthetic polynucleotide"
  source 1..2208: mol_type = other DNA
atggctgccgatggttatcttccagattggctcgaggacactctctctgaaggaataagacagtggtggaagctcaaacctggcccaccaccaccaaagcccgcagagcggcatcaggacgacagcaggggtcttgtgcttcctgggtacaagtacctcggacccttcaacggactcgacaagggagagccggtcaacgaggcagacgccgcggccctcgagcacgacaaggcctacgaccggcagctcgacagcggagacaacccgtacctcaagtacaaccacgccgacgcggagtttcaggagcgtcttaaagaagatacgtcttttgggggcaacctcggacgagcagtcttccaggcgaaaaagagggttcttgaacctctgggcctggttgaggaacctgttaagacggctccgggaaaaaagaggccggtagagcattctcctgcggagccagactcctcctcgggaaccggaaaggcgggccagcagcctgcgagaaagagattgaatttcggtcagactggagacgcagactccgtacctgacccccagcctctcggacagccaccagcagccccctctggtctgggaactaatacgatggctacaggcagtggcgcaccaatggcagacaataacgagggcgccgacggagtgggtaattcctcgggaaattggcattgcgattccacatggatgggcgacagagtcatcaccaccagcacccgaacctgggccctgcccacctacaacaaccacctctacaagcaaatctccagccaatctggagcctcaaacgacaaccactactttggctacagcaccccttgggggtattttgacttcaacagattccactgtcacttctccccacgtgactggcaaagactcatcaacaacaactggagattccgacccaagagactcaacttcaagctctttaacattcaagtcaaagaggtcacgcagaatgacggtacgacgacgattgccaataaccttaccagcacggttcaagtctttactgactcggagtaccagctcccgtacgtcctcggctcggcgcatcaaggatgcctcccgccgtttccagcagacgtcttcatggtgccacagtatggatacctcaccctgaacaacgggagtcaggcggtaggacgctcttccttttactgcctggagtactttccttctcagatgctgcgtaccggaaacaactttaccttcagctacacctttgaggacgttcctttccacagcagctacgctcacagccagagtttggaccggctgatgaatcctctgatcgaccagtatctgtattacttgagcaaaacaaacgctccaagcggaaccaccacgatgtccaggcttcagttttctcaggccggagcgagtgacattcgggaccagtctaggaactggcttcctggaccctgttaccgccagcagcgagtatcaaaaacagctgcggataacaacaacagtgattattcgtggactggagctaccaagtaccacctcaatggaagagactctctggtgaatccgggcccagctatggccagccacaaggacgatgaagaaaaatattttcctcagagcggggttctcatctttggaaaacaagactcgggaaaaactaatgtggacattgaaaaggtcatgattacagacgaagaggaaatcaggaccaccaatcccgtggctacggagcagtatggttctgtatctaccaacctccagagcggcaacacacaggcagccaccacagatgtcaacacacaaggcgttcttccaggcatggtctggcaggacagagacgtgtacctgcaaggacccatctgggcaaagattcctcacacggacggacactttcacccttctcccctcatgggaggatttggactcaaacaccctcctccgcaaatcctcatcaagaatacccccgtacctgcgaatccttcgaccacattcagcgcggcaaagcttgcttctttcatcacacagtactctacggggcaggtcagcgtggagattgagtgggagctgcagaaggagaacagcaaacgctggaaccccgaaatccagtacacttccaactacaacaagtctgttaatgtggactttactgtggacactaatggtgtgtattcagagcctcgccccattggcacaagatacctgactcgtaatctgtaa

SEQ ID NO: 3205 - DNA, 2208 bp, synthetic construct
  misc_feature 1..2208: note = source = /note="Description of Artificial Sequence: Synthetic polynucleotide"
  source 1..2208: mol_type = other DNA
atggctgccgatggttatcttccagattggctcgaggacactctctctgaaggaataagacagtggtggaagctcaaacctggcccaccaccaccaaagcccgcagagcggcatcaggacgacagcaggggtcttgtgcttcctgggtacaagtacctcggacccttcaacggactcgacaagggagagccggtcaacgaggcagacgccgcggccctcgagcacgacaaggcctacgaccggcagctcgacagcggagacaacccgtacctcaagtacaaccacgccgacgcggagtttcaggagcgtcttaaagaagatacgtcttttgggggcaacctcggacgagcagtcttccaggcgaaaaagagggttcttgaacctctgggcctggttgaggaacctgttaagacggctccgggaaaaaagaggccggtagagcattctcctgcggagccagactcctcctcgggaaccggaaaggcgggccagcagcctgcgagaaagagattgaatttcggtcagactggagacgcagactccgtacctgacccccagcctctcggacagccaccagcagccccctctggtctgggaactaatacgatggctacaggcagtggcgcaccaatggcagacaataacgagggcgccgacggagtgggtaattcctcgggaaattggcattgcgattccacatggatgggcgacagagtcatcaccaccagcacccgaacctgggccctgcccacctacaacaaccacctctacaagcaaatctccagccaatctggagcctcaaacgacaaccactactttggctacagcactccttgggggtattttgacttcaacagattccactgtcacttctccccacgtgactggcaaagactcatcaacaacaactggggattccgacccaagagactcaacttcaagctctttaacattcaagtcaaagaggtcacgcagaatgacggtacgacgacgattgccaataaccttaccagcacggttcaagtctttactgactcggagtaccagctcccgtacgtcctcggctcggcgcatcaaggatgcctcccgccgtttccagcagacgtcttcatggtgccacagtatggatacctcaccctgaacaacgggagtcaggcggtaggacgctcttccttttactgcctggagtactttccttctcagatgctgcgtaccggaaacaactttaccttcagctacacctttgaggacgttcctttccacagcagctacgctcacagccagagtttggaccggctgatgaatcctctgatcgaccagtatctgtattacttgagcaaaacaaacgctccaagcggaaccaccacgatgtccaggcttcagttttctcaggccggagcgagtgacattcgggaccagtctaggaactggcttcctggaccctgttaccgccagcagcgagtatcaaaaacagctgcggataacaacaacagtgattattcgtggactggagctaccaagtaccacctcaatggaagagactctctggtgaatccgggcccagctatggccagccacaaggacgatgaagaaaaatattttcctcagagcggggttctcatctttggaaaacaagactcgggaaaaactaatgtggacattgaaaaggtcatgattacagacgaagaggaaatcaggaccaccaatcccgtggctacggagcagtatggttctgtatctaccaacctccagagcggcaacacacaggcagccaccacagatgtcaacacacaaggcgttcttccaggcatggtctggcaggacagagacgtgtacctgcaaggacccatctgggcaaagattcctcacacggacggacactttcacccttctcccctcatgggaggatttggactcaaacaccctcctccgcaaatcctcatcaagaatacccccgtacctgcgaatccttcgaccacattcagcgcggcaaagtttgcttctttcatcacacagtactctacggggcaggtcagcgtggagattgagtgggagctgcagaaggagaacagcaaacgctggaaccccgaaatccagtacacttccaactacaacaagtctgttaatgtggactttactgtggacactaatggtgtgtattcagagcctcgccccattggcacaagatacctggctcgtaatctgtaa

SEQ ID NO: 3206 - DNA, 2208 bp, synthetic construct
  misc_feature 1..2208: note = source = /note="Description of Artificial Sequence: Synthetic polynucleotide"
  source 1..2208: mol_type = other DNA
atggctgccgatggttatcttccagattggctcgaggacactctctctgaaggaataagacagtggtggaagctcaaacctggcccaccaccaccaaagcccgcagagcggcatcaggacgacagcaggggtcttgtgcttcctgggtacaagtacctcggacccttcaacggactcgacaagggagagccggtcaacgaggcagacgccgcggccctcgagcacgacaaggcctacgaccggcagctcgacagcggagacaacccgtacctcaagtacaaccacgccgacgcggagtttcaggagcgtcttaaagaagatacgtcttttgggggcaacctcggacgagcagtcttccaggcgaaaaagagggttcttgaacctctgggcctggttgaggaacctgttaagacggctccgggaaaaaagaggccggtagagcattctcctgcggagccagactcctcctcgggaaccggaaaggcgggccagcagcctgcgaggaagagattgaatttcggtcagactggagacgcagactccgtacctgacccccagcctctcggacagccaccagcagccccctctggtctgggaactaatacgatggctacaggcagtggcgcaccaatggcagacaataacgagggcgccgacggagtgggtaattcctcgggaaattggcattgcgattccacatggatgggcgacagagtcatcaccaccagcacccgaacctgggccctgcccacctacaacaaccacctctacaagcaaatctccagccaatctggagcctcaaacgacgaccactactttggctacagcaccccttgggggtattttgacttcaacagattccactgtcacttctccccacgtgactggcaaagactcatcaacaacaactggggattccgacccaagagactcaacttcaagctctttaacattcaagtcaaagaggtcacgcagaatgacggtacgacgacgattgccaataaccttaccagcacggttcaagtctttactgactcggagtaccagctcccgtacgtcctcggctcggcgcatcaaggatgcctcccgccgtttccagcagacgtcttcatggtgccacagtatggatacctcaccctgaacaacgggagtcaggcggtaggacgctcttccttttactgcctggagtactttccttctcagatgctgcgtaccggaaacaactttaccttcagctacacctttgaggacgttcctttccacagcagctacgctcacagccagagtttggaccggctgatgaatcctctgatcgaccagtatctgtattacttgagcaaaacaaacgctccaagcggaaccaccacgatgtccaggcttcagttttctcaggccggagcgagtgacattcgggaccagtctaggaactggcttcctggaccctgttaccgccagcagcgagtatcaaaaacagctgcggataacaacaacagtgattattcgtggactggagctaccaagtaccacctcaatggaagagactctctggtgaatccgggcccagctatggccagccacaaggacgatgaagaaaaatattttcctcagagcggggttctcatctttggaaaacaagactcgggaaaaactaatgtggacattgaaaaggtcatgattacagacgaagaggaaatcaggaccaccaatcccgtggctacggagcagtatggttctgtatctaccaacctccagagcggcaacacacaggcagccaccacagatgtcaacacacaaggcgttcttccaggcatggtctggcaggacagagacgtgtacctgcaaggacccatctgggcaaagattcctcacacggacggacactttcacccttctcccctcatgggaggatttggactcaaacaccctcctccgcaaatcctcatcaagaatacccccgtacctgcgaatccttcgaccacattcagcgcggcaaagtttgcttctttcatcacacagtactctacggggcaggtcagcgtggagattgagtgggagctgcagaaggagaacagcaaacgctggaaccccgaaatccagtacacttccaactacaacaagtctgttaatgtggactttactgtggacactaatggtgtgtattcagagcctcgccccattggcacaagatacctgactcgtaatctgtaa

SEQ ID NO: 3207 - DNA, 2208 bp, synthetic construct
  misc_feature 1..2208: note = source = /note="Description of Artificial Sequence: Synthetic polynucleotide"
  source 1..2208: mol_type = other DNA
atggctgccgatggttatcttccagattggctcgaggacactctctctgaaggaataagacagtggtggaagctcaaacctggcccaccaccaccaaagcccgcagagcggcatcaggacgacagcaggggtcttgtgcttcctgggtacaagtacctcggacccttcaacggactcgacaagggagagccggtcaacgaggcagacgccgcggccctcgagcacgacaaggcctacgaccggcagctcgacagcggagacaacccgtacctcaagtacaaccacgccgacgcggagtttcaggagcgtcttaaagaagatacgtcttttgggggcaacctcggacgagcagtcttccaggcgaaaaagggggttcttgaacctctgggcctggttgaggaacctgttaagacggctccgggaaaaaagaggccggtagagcattctcctgcggagccagactcctcctcgggaaccggaaaggcgggccagcagcctgcgagaaagagattgaatttcggtcagactggagacgcagactccgtacctgacccccagcctctcggacagccaccagcagccccctctggtctgggaactaatacgatggctacaggcagtggcgcaccaatggcagacaataacgagggcgccgacggagtgggtaattcctcgggaaattggcattgcgattccacatggatgggcgacagagtcatcaccaccagcacccgaacctgggccctgcccacctacaacaaccacctctacaagcaaatctccagccaatctggagcctcaaacgacaaccactactttggctacagcaccccttgggggtattttgacttcaacagattccactgtcacttctccccacgtgactggcaaagactcatcaacaacaactggggattccgacccaagagactcaacttcaagctctttaacattcaagtcaaagaggtcacgcagaatgacggtacgacgacgattgccaataaccttaccagcacggttcaagtctttactgactcggagtaccagctcccgtacgtcctcggctcggcgcatcaaggatgcctcccgccgtttccagcagacgtcttcatggtgccacagtatggatacctcaccctgaacaacgggagtcaggcggtaggacgctcttccttttactgcctggagtactttccttctcagatgctgcgtaccggaaacaactttaccttcagctacacctttgaggacgttcctttccacagcagctacgctcacagccagagtttggaccggctgatgaatcctctgatcgaccagtatctgtattacttgagcaaaacaaacgctccaagcggaaccaccacgatgtccaggcttcagttttctcaggccggagcgagtgacattcgggaccagtctaggaactggcttcctggaccctgttaccgccagcagcgagtatcaaaaacagctgcggataacaacaacagtgattattcgtggactggagctaccaagtaccacctcaatggaagagactctctggtgaatccgggcccagctatggccagccacaaggacgatgaagaaaaatattttcctcagagcggggttctcatctttggaaaacaagactcgggaaaaactaatgtggacattgaaaaggtcatgattacagacgaagaggaaatcaggaccaccaatcccgtggctacggagcagtatggttctgtatctaccaacctccagagcggcaacacacaggcagccaccacagatgtcaacacacaaggcgttcttccaggcatggtctggcaggacagagacgtgtacctgcaaggacccatctgggcaaagattcctcacacggacggacactttcacccttctcccctcatgggaggatttggactcaaacaccctcctccgcaaatcctcatcaagaatacccccgtacctgcgaatccttcgaccacattcagcgcggcaaagcttgcttctttcatcacacagtactctacggggcaggtcagcgtggagattgagtgggagctgcagaaggagaacagcaaacgctggaaccccgaaatccagtacacttccaactacaacaagtctgttaatgtggactttactgtggacactaatggtgtgtattcagagcctcgccccattggcacaagatacctgactcgtaatctgtaa

SEQ ID NO: 3208 - DNA, 2208 bp, synthetic construct
  misc_feature 1..2208: note = source = /note="Description of Artificial Sequence: Synthetic polynucleotide"
  source 1..2208: mol_type = other DNA
atggctgccgatggttatcttccagattggctcgaggacactctctctgaaggaataagacagtggtggaagctcaaacctggcccaccaccaccaaagcccgcagagcggcatcaggacgacagcaggggtcttgtgcttcctgggtacaagtacctcggacccttcaacggactcgacaagggagagccggtcaacgaggcagacgccgcggccctcgagcacgacaaggcctacgaccggcagctcgacagcggagacaacccgtacctcaagtacaaccacgccgacgcggagtttcaggagcgtcttaaagaagatacgtcttttgggggcaacctcggacgagcagtcttccaggcgaaaaagagggttcttgaacctctgggcctggttgaggaacctgttaagacggctccgggaaaaaagaggccggtagagcattctcctgcggagccagactccccctcgggaaccggaaaggcgggccagcagcctgcgagaaagagattgaatttcggtcagactggagacgcagactccgtacctgacccccagcctctcggacagccaccagcagccccctctggtctgggaactaatacgatggctacaggcagtggcgcaccaatggcagacaataacgagggcgccgacggagtgggtaattcctcgggaaattggcattgcgattccacatggatgggcgacagagtcatcaccaccagcacccgaacctgggccctgcccacctacaacaaccacctctacaagcaaatctccagccaatctggagcctcaaacgacaaccactactttggctacagcaccccttgggggtattttgacttcaacagattccactgtcacttctccccacgtgactggcaaagactcatcaacaacaactggggattccgacccaagagactcaacttcaagctctttaacattcaagtcaaagaggtcacgcagaatgacggtacgacgacgattgccaataaccttaccagcacggttcaagtctttactgactcggagtaccagctcccgtacgtcctcggctcggcgcatcaaggatgcctcccgccgtttccagcagacgtcttcatggtgccacagtatggatacctcaccctgaacaacgggagtcaggcggtaggacgctcttccttttactgcctggagtactttccttctcagatgctgcgtaccggaaacaactttaccttcagctacacctttgaggacgttcctttccacagcagctacgctcacagccagagtttggaccggctgatgaatcctctgatcgaccagtatctgtattacttgagcaaaacaaacgctccaagcggaaccaccacgatgtccaggcttcagttttctcaggccggagcgagtgacattcgggaccagtctaggaactggcttcctggaccctgttaccgccagcagcgagtatcaaaaacagctgcggataacaacaacagtgattattcgtggactggagctaccaagtaccacctcaatggaagagactctctggtgaatccgggcccagctatggccagccacaaggacgatgaagaaaaatattttcctcagagcggggttctcatctttggaaaacaagactcgggaaaaactaatgtggacattgaaaaggtcatgattacagacgaagaggaaatcaggaccaccaatcccgtggctacggagcagtatggttctgtatctaccaacctccagagcggcaacacacaggcagccaccacagatgtcaacacacaaggcgttcttccaggcatggtctggcaggacagagacgtgtacctgcaaggacccatctgggcaaagattcctcacacggacggacactttcacccttctcccctcatgggaggatttggactcaaacaccctcctccgcaaatcctcatcaagaatacccccgtacctgcgaatccttcgaccacattcagcgcggcaaagtttgcttctttcatcacacagtactctacggggcaggtcagcgtggagattgagtgggagctgcagaaggagaacagcaaacgctggaaccccgaaatccagtacacttccaactacaacaagtctgttaatgtggactttactgtggacactaatggtgtgtattcagagcctcgccccattggcacaagatacctgactcgtaatctgtaa

SEQ ID NO: 3209 - DNA, 2208 bp, synthetic construct
  misc_feature 1..2208: note = source = /note="Description of Artificial Sequence: Synthetic polynucleotide"
  source 1..2208: mol_type = other DNA
atggctgccgatggttatcttccagattggctcgaggacactctctctgaaggaataagacagtggtggaagctcaaacctggcccaccaccaccaaagcccgcagagcggcatcaggacgacagcaggggtcttgtgcttcctgggtacaagtacctcggacccttcaacggactcgacaagggagagccggtcaacgaggcagacgccgcggccctcgagcacgacaaggcctacgaccggcagctcgacagcggagacaacccgtacctcaagtacaaccacgccgacgcggagtttcaggagcgtcttaaagaagatacgtcttttgggggcaacctcggacgagcagtcttccaggcgaaaaagagggttcttgaacctctgggcctggttgaggaacctgttaagacggctccgggaaaaaagaggccggtagagcattctcctgcggagccagactcctcctcgggaaccggaaaggcgggccagcagcctgcgagaaagagattgaatttcggtcagactggagacgcagactccgtacctgacccccagcctctcggacagccaccagcagccccctctggtctgggaactaatacgatggctacaggcagtggcgcaccaatggcagacaataacgagggcgccgacggagtgggtaattcctcgggaaattggcattgcgattccacatggatgggcgacagagtcatcaccaccagcacccgaacctgggccctgcccacctacaacaaccacccctacaagcaaatctccagccaatctggagcctcaaacgacaaccactactttggctacagcaccccttgggggtattttgacttcaacagattccactgtcacttctccccacgtgactggcaaagactcatcaacaacaactggggattccgacccaagagactcaacttcaagctctttaacattcaagtcaaagaggtcacgcagaatgacggtacgacgacgattgccaataaccttaccagcacggttcaagtctttactgactcggagtaccagctcccgtacgtcctcggctcggcgcatcaaggatgcctcccgccgtttccagcagacgtcttcatggtgccacagtatggatacctcaccctgaacaacgggagtcaggcggtaggacgctcttccttttactgcctggagtactttccttctcagatgctgcgtaccggaaacaactttaccttcagctacacctttgaggacgttcctttccacagcagctacgctcacagccagagtttggaccggctgatgaatcctctgatcgaccagtatctgtattacttgagcaaaacaaacgctccaagcggaaccaccacgatgtccaggcttcagttttctcaggccggagcgagtgacattcgggaccagtctaggaactggcttcctggaccctgttaccgccagcagcgagtatcaaaaacagctgcggataacaacaacagtgattattcgtggactggagctaccaagtaccacctcaatggaagagactctctggtgaatccgggcccagctatggccagccacaaggacgatgaagaaaaatattttcctcagagcggggttctcatctttggaaaacaagactcgggaaaaactaatgtggacattgaaaaggtcatgattacagacgaagaggaaatcaggaccaccaatcccgtggctacggagcagtatggttctgtatctaccaacctccagagcggcaacacacaggcagccaccacagatgtcaacacacaaggcgttcttccaggcatggtctggcaggacagagacgtgtacctgcaaggacccatctgggcaaagattcctcacacggacggacactttcacccttctcccctcatgggaggatttggactcaaacaccctcctccgcaaatcctcatcaagaatacccccgtacctgcgaatccttcgaccacattcagcgcggcaaagtttgcttctttcatcacacagtactctacggggcaggtcagcgtggagattgagtgggagctgcagaaggagaacagcaaacgctggaaccccgaaatccagtacacttccaactacaacaagtctgttaatgtggactttactgtggacactaatggtgtgtattcagagcctcgccccattggcacaagatacctgactcgtaatctgtaa

SEQ ID NO: 3210 - DNA, 2208 bp, synthetic construct
  misc_feature 1..2208: note = source = /note="Description of Artificial Sequence: Synthetic polynucleotide"
  source 1..2208: mol_type = other DNA
atggctgccgatggttatcttccagattggctcgaggacactctctctgaaggaataagacagtggtggaagctcaaacctggcccaccaccaccaaagcccgcagagcggcatcaggacgacagcaggggtcttgtgcttcctgggtacaagtacctcggacccttcaacggactcgacaagggagagccggtcagcgaggcagacgtcgcggccctcgagcacgacaaggcctacgaccggcagctcgacagcggagacaacccgtacctcaagtacaaccacgccgacgcggagtttcaggagcgtcttaaagaagatacgtcttttgggggcaacctcggacgagcagtcttccaggcgaaaaagagggttcttgaacctctgggcctggttgaggaacctgttaagacggctccgggaaaaaagaggccggtagagcattctcctgcggagccagactcctcctcgggaaccggaaaggcgggccagcagcctgcgagaaagagattgaatttcggtcagactggagacgcagactccgtacctgacccccagcctctcggacagccaccagcagccccctctggtctgggaactaatacgatggctacaggcagtggcgcaccaatggcagacaataacgagggcgccgacggagtgggtaattcctcgggaaattggcattgcgattccacatggatgggcgacagagtcatcaccaccagcacccgaacctgggccctgcccacctacaacaaccacctctacaagcaaatctccagccaatctggagcctcaaacgacaaccactactttggctacagcaccccttgggggtattttgacttcaacagattccactgtcacttctccccacgtgactggcaaagactcatcaacaacaactggggattccgacccaagagactcaacttcaagctctttaacattcaagtcaaagaggtcacgcagaatgacggtacgacgacgattgccaataaccttaccagcacggttcaagtctttactgactcggagtaccagctcccgtacgtcctcggctcggcgcatcaaggatgcctcccgccgtttccagcagacgtcttcatggtgccacagtatggatacctcaccctgaacaacgggagtcaggcggtaggacgctcttccttttactgcctggagtactttccttctcagatgctgcgtaccggaaacaactttaccttcagctacacctttgaggacgttcctttccacagcagctacgctcacagccagagtttggaccggctgatgaatcctctgatcgaccagtatctgtattacttgagcaaaacaaacgctccaagcggaaccaccacgatgtccaggcttcagttttctcaggccggagcgagtgacattcgggaccagtctaggaactggcttcctggaccctgttaccgccagcagcgagtatcaaaaacagctgcggataacaacaacagtgattattcgtggactggagctaccaagtaccacctcaatggaagagactctctggtgaatccgggcccagctatggccagccacaaggacgatgaagaaaaatattttcctcagagcggggttctcatctttggaaaacaagactcgggaaaaactaatgtggacattgaaaaggtcatgattacagacgaagaggaaatcaggaccaccaatcccgtggctacggagcagtatggttctgtatctaccaacctccagagcggcaacacacaggcagccaccacagatgtcaacacacaaggcgttcttccaggcatggtctggcaggacagagacgtgtacctgcaaggacccatctgggcaaagattcctcacacggacggacactttcacccttctcccctcatgggaggatttggactcaaacaccctcctccgcaaatcctcatcaagaatacccccgtacctgcgaatccttcgaccacattcagcgcggcaaagtttgcttctttcatcacacagtactctacggggcaggtcagcgtggagattgagtgggagctgcagaaggagaacagcaaacgctggaaccccgaaatccagtacacttccaactacaacaagtctgttaatgtggactttactgtggacactaatggtgtgtattcagagcctcgccccattggcacaagatacctgactcgtaatctgtaa

SEQ ID NO: 3211 - DNA, 2208 bp, synthetic construct
  misc_feature 1..2208: note = source = /note="Description of Artificial Sequence: Synthetic polynucleotide"
  source 1..2208: mol_type = other DNA
atggctgccgatggttatcttccagattggctcgaggacactctctctgaaggaataagacagtggtggaagctcaaacctggcccaccaccaccaaagcccgcagagcggcatcaggacgacagcaggggtcttgtgcttcctgggtacaagtacctcggacccttcaacggactcgacaagggagagccggtcaacgaggcagacgccgcggccctcgagcacgacaaggcctacgaccggcagctcgacagcggagacaacccgtacctcaagtacaaccacgccgacgcggagtttcaggagcgtcttaaagaagatacgtcttttgggggcaacctcggacgagcagtcttccaggcgaaaaagagggttcttgaacctctgggcctggttgaggaacctgttaagacggctccgggaaaaaagaggccggtagagcattctcctgcggagccagactcctcctcgggaaccggaaaggcgggccagcagcctgcgagaaagagattgaatttcggtcagactggagacgcagactccgtacctgacccccagcctctcggacagccaccagcagccccctctggtctgggaactaatacgatggctacaggcagtggcgcaccaatggcagacaataacgagggcgccgacggagtgggtaattcctcgggaaattggcattgcgattccacatggatgggcgacagagtcatcaccaccagcacccgaacctgggccctgcccacctacaacaaccacctctacaagcaaatctccagccaatctggagcctcaaacgacaaccactactttggctacagcaccccttgggggtattttgacttcaacagattccactgtcacttctccccacgtgactggcaaagactcatcaacaacaactggggattccgacccaagagactcaacttcaagctctttaacattcaagtcaaagaggtcacgcagaatgacggtacgacgacgattgccaataaccttaccagcacggttcaagtctttactgactcggagtaccagctcccgtacgtcctcggctcggcgcatcaaggatgcctcccgccgtttccagcagacgtcttcatggtgccacagtatggatacctcaccctgaacaacgggagtcaggcggtaggacgctcttccttttactgcctggagtactttccttctcagatgctgcgtaccggaaacaactttaccttcagctacacctttgaggacgttcctttccacagcagctacgctcacagccagagtttggaccggctgatgaatcctctgatcgaccagtatctgtattacttgagcaaaacaaacgctccaagcggaaccaccacgatgtccaggcttcagttttctcaggccggagcgagtgacattcgggaccagtctaggaactggcttcctggaccctgttaccgccagcagcgagtatcaaaaacagctgcggataacaacaacagtgattattcgtggactggagctaccaagtaccacctcaatggaagagactctctggtgaatccgggcccagctatggccagccacaaggacgatgaagaaaaatattttcctcagagcggggttctcatctttggaaaacaagactcgggaaaaattaatgtggacattgaaaaggtcatgattacagacgaagaggaaatcaggaccaccaatcccgtggctacggagcagtatggttctgtatctaccaacctccagagcggcaacacacaggcagccaccacagatgtcaacacacaaggcgttcttccaggcatggtctggcaggacagagacgtgtacctgcaaggacccatctgggcaaagattcctcacacggacggacactttcacccttctcccctcatgggaggatttggactcaaacaccctcctccgcaaatcctcatcaagaatacccccgtacctgcgaatccttcgaccacattcagcgcggcaaagtttgcttctttcatcacacagtactctacggggcaggtcagcgtggagattgagtgggagctgcagaaggagaacagcaaacgctggaaccccgaaatccagtacacttccaactacaacaagtctgttaatgtggactttactgtggacactaatggtgtgtattcagagcctcgccccattggcacaagatacctgactcgtaatctgtaa

SEQ ID NO: 3212 - DNA, 2208 bp, synthetic construct
  misc_feature 1..2208: note = source = /note="Description of Artificial Sequence: Synthetic polynucleotide"
  source 1..2208: mol_type = other DNA
atggctgccgatggttatcttccagattggctcgaggacactctctctgaaggaataagacagtggtggaagctcaaacctggcccaccaccactaaagcccgcagagcggcatcaggacgacagcaggggtcttgtgcttcctgggtacaagtacctcggacccttcaacggactcgacaagggagagccggtcaacgaggcagacgccgcggccctcgagcacgacaaggcctacgaccggcagctcgacagcggagacaacccgtacctcaagtacaaccacgccgacgcggagtttcaggagcgtcttaaagaagatacgtcttttgggggcaacctcggacgagcagtcttccaggcgaaaaagagggttcttgaacctctgggcctggttgaggaacctgttaagacggctccgggaaaaaagaggccggtagagcattctcctgcggagccagactcctcctcgggaaccggaaaggcgggccagcagcctgcgagaaagagattgaatttcggtcagactggagacgcagactccgtacctgacccccagcctctcggacagccaccagcagccccctctggtctgggaactaatacgatggctacaggcagtggcgcaccaatggcagacaataacgagggcgccgacggagtgggtaattcctcgggaaattggcattgcgattccacatggatgggcgacagagtcatcaccaccagcacccgaacctgggccctgcccacctacaacaaccacctctacaagcaaatctccagccaatctggagcctcaaacgacaaccactactttggctacagcaccccttgggggtattttgacttcaacagattccactgtcacttctccccacgtgactggcaaagactcatcaacaacaactggggattccgacccaagagactcaacttcaagctctttaacattcaagtcaaagaggtcacgcagaatgacggtacgacgacgattgccaataaccttaccagcacggttcaagtctttactgactcggagtaccagctcccgtacgtcctcggctcggcgcatcaaggatgcctcccgccgtttccagcagacgtcttcatggtgccacagtatggatacctcaccctgaacaacgggagtcaggcggtaggacgctcttccttttactgcctggagtactttccttctcagatgctgcgtaccggaaacaactttaccttcagctacacctttgaggacgttcctttccacagcagctacgctcacagccagagtttggaccggctgatgaatcctctgatcgaccagtatctgtattacttgagcaaaacaaacgctccaagcggaaccaccacgatgtccaggcttcagttttctcaggccggagcgagtgacattcgggaccagtctaggagctggcttcctggaccctgttaccgccagcagcgagtatcaaaaacagctgcggataacaacaacagtgattattcgtggactggagctaccaagtaccacctcaatggaagagactctctggtgaatccgggcccagctatggccagccacaaggacgatgaagaaaaatattttcctcagagcggggttctcatctttggaaaacaagactcgggaaaaactaatgtggacattgaaaaggtcatgattacagacgaagaggaaatcaggaccaccaatcccgtggctacggagcagtatggttctgtatctaccaacctccagagcggcaacacacaggcagccaccacagatgtcaacacacaaggcgttcttccaggcatggtctggcaggacagagacgtgtacctgcaaggacccatctgggcaaagattcctcacacggacggacactttcacccttctcccctcatgggaggatttggactcaaacaccctcctccgcaaatcctcatcaagaatacccccgtacctgcgaatccttcgaccacattcagcgcggcaaagtttgcttctttcatcacacagtactctacggggcaggtcagcgtggagattgagtgggagctgcagaaggagaacagcaaacgctggaaccccgaaatccagtacacttccaactacaacaagtctgttaatgtggactttactgtggacactaatggtgtgtattcagagcctcgccccattggcacaagatacctgactcgtaatctgtaa

SEQ ID NO: 3213 - DNA, 2208 bp, synthetic construct
  misc_feature 1..2208: note = source = /note="Description of Artificial Sequence: Synthetic polynucleotide"
  source 1..2208: mol_type = other DNA
atggctgccgatggttatcttccagattggctcgaggacactctctctgaaggaataagacagtggtggaagctcaaacctggcccaccaccaccaaagcccgcagagcggcatcaggacgacagcaggggtcttgtgcttcctgggtacaagtacctcggacccttcaacggactcgacaagggagagccggtcaacgaggcagacgccgcggccctcgagcacgacaaggcctacgaccggcagctcgacagcggagacaacccgtacctcaagtacaaccacgccgacgcggagtttcaggagcgtcttaaagaagatacgtcttttgggggcaacctcggacgagcagtcttccaggcgaaaaagagggttcttgaacctctaggcctggttgaggaacctgttaagacggctccgggaaaaaagaggccggtagagcattctcctgcggagccagactcctcctcgggaaccggaaaggcgggccagcagcctgcgagaaagagattgaatttcggtcagactggagacgcagactccgtacctgacccccagcctctcggacagccaccagcagccccctctggtctgggaactaatacgatggctacaggcagtggcgcaccaatggcagacaataacgagggcgccgacggagtgggtaattcctcgggaaattggcattgcgattccacatggatgggcgacagagtcatcaccaccagcacccgaacctgggccctgcccacctacaacaaccacctctacaagcaaatctccagccaatctggagcctcaaacgacaaccactactttggctacagcaccccttgggggtattttgacttcaacagattccactgtcacttctccccacgtgactggcaaagactcatcaacaacaactggggattccgacccaagagactcaacttcaagctctttaacattcaagtcaaagaggtcacgcagaatgacggtacgacgacgattgccaataaccttaccagcacggttcaagtctttactgactcggagtaccagctcccgtacgtcctcggctcggcgcatcaaggatgcctcccgccgtttccagcagacgtcttcatggtgccacagtatggatacctcaccctgaacaacgggagtcaggcggtaggacgctcttccttttactgcctggagtactttccttctcagatgctgcgtaccggaaacaactttaccttcagctacacctttgaggacgttcctttccacagcagctacgctcacagccagagtttggaccggctgatgaatcctctgatcgaccagtatctgtattacttgagcaaaacaaacgctccaagcggaaccaccacgatgtccaggcttcagttttctcaggccggagcgagtgacattcgggaccagtctaggaactggcttcctggaccctgttaccgccagcagcgagtatcaaaaacagctgcggataacaacaacagtgattattcgtggactggagctaccaagtaccacctcaatggaagagactctctggtgaatccgggcccagctatggccagccacaaggacgatgaagaaaaatattttcctcagagcggggttctcatctttggaaaacaagactcgggaaaaactaatgtggacattgaaaaggtcatgattacagacgaagaggaaatcgggaccaccaatcccgtggctacggagcagtatggttctgtatctaccaacctccagagcggcaacacacaggcagccaccacagatgtcaacacacaaggcgttcttccaggcatggtctggcaggacagagacgtgtacctgcaaggacccatctgggcaaagattcctcacacggacggacactttcacccttctcccctcatgggaggatttggactcaaacaccctcctccgcaaatcctcatcaagaatacccccgtacctgcgaatccttcgaccacattcagcgcggcaaagtttgcttctttcatcacacagtactctacggggcaggtcagcgtggagattgagtgggagctgcagaaggagaacagcaaacgctggaaccccgaaatccagtacacttccaactacaacaagtctgttaatgtggactttactgtggacactaatggtgtgtattcagagcctcgccccattggcacaagatacctgactcgtaatctgtaa

SEQ ID NO: 3214 - DNA, 2208 bp, synthetic construct
  misc_feature 1..2208: note = source = /note="Description of Artificial Sequence: Synthetic polynucleotide"
  source 1..2208: mol_type = other DNA
atggctgccgatggttatcttccagattggctcgaggacactctctctgaaggaataagacagtggtggaagctcaaacctggcccaccaccaccaaagcccgcagagcggcatcaggacgacagcaggggtcttgtgcttcctgggtacaagtacctcggacccttcaacggactcgacaagggagagccggtcaacgaggcagacgccgcggccctcgagcacgacaaggcctacgaccggcagctcgacagcggagacaacccgtacctcaagtacaaccacgccgacgcggagtttcaggagcgtcttaaagaagatacgtcttttgggggcaacctcggacgagcagtcttccaggcgaaaaagagggttcttgaacctctgggcctggttgaggaacctgttaagacggctccgggaaaaaagaggccggtagagcattctcctgcggagccagactcctcctcgggaaccggaaaggcgggccagcagcctgcgagaaagagattgaatttcggtcagactggagacgcagactccgtacctgacccccagcctctcggacagccaccagcagccccctctggtctgggaactaatacgatggctacaggcagtggcgcaccaatggcagacaataacgagggcgccgacggagtgggtaattcctcgggaaattggcattgcgattccacatggatgggcgacagagtcatcaccaccagcacccgaacctgggccctgcccacctacaacaaccacctctacaagcaaatctccagccaatctggagcctcaaacgacaaccactactttggctacagcaccccttgggggtattttgacttcaacagattccactgtcacttctccccacgtgactggcaaagactcatcaacaacaactggggattccgacccaagagactcaacttcaagctctttaacattcaagtcaaagaggtcacgcagaatgacggtacgacgacgattgccaataaccttaccagcacggttcaagtctttactgactcggagtaccggctcccgtacgtcctcggctcggcgcatcaaggatgcctcccgccgtttccagcagacgtcttcatggtgccacagtatggatacctcaccctgaacaacgggagtcaggcggtaggacgctcttccttttactgcctggagtactttccttctcagatgctgcgtaccggaaacaactttaccttcagctacacctttgaggacgttcctttccacagcagctacgctcacagccagagtttggaccggctgatgaatcctctgatcgaccagtatctgtattacttgagcaaaacaaacgctccaagcggaaccaccacgatgtccaggcttcagttttctcaggccggagcgagtgacattcgggaccagtctaggaactggcttcctggaccctgttaccgccagcagcgagtatcaaaaacagctgcggataacaacaacagtgattattcgtggactggagctaccaagtaccacctcaatggaagagactctctggtgaatccgggcccagctatggccagccacaaggacgatgaagaaaaatattttcctcagagcggggttctcatctttggaaaacaagactcgggaaaaactaatgtggacattgaaaaggtcatgattacagacgaagaggaaatcaggaccaccaatcccgtggctacggagcagtatggttctgtatctaccaacctccagagcggcaacacacaggcagccaccacagatgtcaacacacaaggcgttcttccaggcatggtctggcaggacagagacgtgtacctgcaaggacccatctgggcaaagattcctcacacggacggacactttcacccttctcccctcatgggaggatttggactcaaacaccctcctccgcaaatcctcatcaagaatacccccgtacctgcgaatccttcgaccacattcagcgcggcaaagtttgcttctttcatcacacagtactctacggggcaggtcagcgtggagattgagtgggagctgcagaaggagaacagcaaacgctggaaccccgaaatccagtacacttccaactacaacaagtctgttaatgtggactttactgtggacactaatggtgtgtattcagagcctcgccccattggcacaagatacctgactcgtaatctgtaa

SEQ ID NO: 3215 - DNA, 2208 bp, synthetic construct
  misc_feature 1..2208: note = source = /note="Description of Artificial Sequence: Synthetic polynucleotide"
  source 1..2208: mol_type = other DNA
atggctgccgatggttatcttccagattggctcgaggacactctctctgaaggaataagacagtggtggaagctcaaacctggcccaccaccaccaaagcccgcagagcggcatcaggacgacagcaggggtcttgtgcttcctgggtacaagtacctcggacccttcaacggactcgacaagggagagccggtcaacgaggcagacgccgcggccctcgagcacgacaaggcctacgaccggcagctcgacagcggagacaacccgtacctcaagtacaaccacgccgacgcggagtttcaggagcgtcttaaagaagatacgtcttttgggggcaacctcggacgagcagtcttccaggcgaaaaagagggttcttgaacctctgggcctggttgaggaacctgttaagacggctccgggaaaaaagaggccggtagagcattctcctgcggagccagactcctcctcgggaaccggaaaggcgggccagcagcctgcgagaaagagattgaatttcggtcagactggagacgcagactccgtacctgacccccagcctctcggacagccaccagcagccccctctggtctgggaactaatacgatggctacaggcagtggcgcaccaatggcagacaataacgagggcgccgacggagtgggtaattcctcgggaaattggcattgcgattccacatggatgggcgacagagtcatcaccaccagcacccgaacctgggccctgcccacctacaacaaccacctctacaagcaaatctccagccaatctggagcctcaaacgacaaccactactttggctacagcaccccttgggggtattttgacttcaacagattccactgtcacttctccccacgtgactggcaaagactcatcaacaacaactggggattccgacccaagagactcaacttcaagctctttaacattcaagtcaaagaggtcacgcagaatgacggtacgacgacgattgccaataaccttaccagcacggttcaagtctttactgactcggagtaccagctcccgtacgtcctcggctcggcgcatcaaggatgcctcccgccgtttccagcagacgtcttcatggtgccacagtatggatacctcaccctgaacaacgggagtcaggcggtaggacgctcttccttttactgcctggagtactttccttctcagatgctgcgtaccgggaacaactttaccttcagctacacctttgaggacgttcctttccacagcagctacgctcacagccagagtttggaccggctgatgaatcctctgatcgaccagtatctgtattacttgagcaaaacaaacgctccaagcggaaccaccacgatgtccaggcttcagttttctcaggccggagcgagtgacattcgggaccagtctaggaactggcttcctggaccctgttaccgccagcagcgagtatcaaaaacagctgcggataacaacaacagtgattattcgtggactggagctaccaagtaccacctcaatggaagagactctctggtgaatccgggcccagctatggccagccacaaggacgatgaagaaaaatattttcctcagagcggggttctcatctttggaaaacaggactcgggaaaaaccaatgtggacattgaaaaggtcatgattacagacgaagaggaaatcaggaccaccaatcccgtggctacggagcagtatggttctgtatctaccaacctccagagcggcaacacacaggcagccaccacagatgtcaacacacaaggcgttcttccaggcatggtctggcaggacagagacgtgtacctgcaaggacccatctgggcaaagattcctcacacggacggacactttcacccttctcccctcatgggaggatttggactcaaacaccctcctccgcaaatcctcatcaagaatacccccgtacctgcgaatccttcgaccacattcagcgcggcaaagtttgcttctttcatcacacagtactctacggggcaggtcagcgtggagattgagtgggagctgcagaaggagaacagcaaacgctggaaccccaaaatccagtacacttccaactacaacaagtctgttaatgtggactttactgtggacactaatggtgtgtattcagagcctcgccccattggcacaagatacctgactcgtaatctgtaa

SEQ ID NO: 3216 - DNA, 2208 bp, synthetic construct
  misc_feature 1..2208: note = source = /note="Description of Artificial Sequence: Synthetic polynucleotide"
  source 1..2208: mol_type = other DNA
atggctgccgatggttatcttccagattggctcgaggacactctctctgaaggaataagacagtggtggaagctcaaacctggcccaccaccaccaaagcccgcagagcggcatcaggacgacagcaggggtcttgtgcttcctgggtacaagtacctcggacccttcaacggactcgacaagggagagccggtcaacgaggcagacgccgcggccctcgagcacgacaaggcctacgaccggcagctcgacagcggagacaacccgtacctcaagtacaaccacgccgacgcggagtctcaggagcgtcttaaagaagatacgtcttttgggggcaacctcggacgagcagtcttccaggcgaaaaagagggttcttgaacctctgggcctggttgaggaacctgttaagacggctccgggaaaaaagaggccggtagagcattctcctgcggagccagactcctcctcgggaaccggaaaggcgggccagcagcctgcgagaaagagattgaatttcggtcagactggagacgcagactccgtacctgacccccagcctctcggacagccaccagcagccccctctggtctgggaactaatacgatggctacaggcagtggcgcaccaatggcagacaataacgagggcgccgacggagtgggtaattcctcgggaaattggcattgcgattccacatggatgggcgacagagtcatcaccaccagcacccgaacctgggccctgcccacctacaacaaccacctctacaagcaaatctccagccaatctggagcctcaaacgacaaccactactttggctacagcaccccttgggggtattttgacttcaacagattccactgtcacttctccccacgtgactggcaaagactcatcaacaacaactggggattccgacccaagagactcaacttcaagctctttaacattcaagtcaaagaggtcacgcagaatgacggtacgacgacgattgccaataaccttaccagcacggttcaagtctttactgactcggagtaccagctcccgtacgtcctcggctcggcgcatcaaggatgcctcccgccgtttccagcagacgtcttcatggtgccacagtatggatacctcaccctgaacaacgggagtcaggcggtaggacgctcttccttttactgcctggagtactttccttctcagatgctgcgtaccggaaacaactttaccttcagctacacctttgaggacgttcctttccacagcagctacgctcacagccagagtttggaccggctgatgaatcctctgatcgaccagtatctgtattacttgagcaaaacaaacgctccaagcggaaccaccacgatgtccaggcttcagttttctcaggccggagcgagtgacattcgggaccagtctaggaactggcttcctggaccctgttaccgccagcagcgagtatcaaaaacagctgcggataacaacaacagtgattattcgtggactggagctaccaagtaccacctcaatggaagagactctctggtgaatccgggcccagctatggccagccacaaggacgatgaagaaaaatattttcctcagagcggggttctcatctttggaaaacaagactcgggaaaaactaatgtggacattgaaaaggtcatgattacagacgaagaggaaatcaggaccaccaatcccgtggctacggagcagtatggttctgtatctaccaacctccagagcggcaacacacaggcagccaccacagatgtcaacacacaaggcgttcttccaggcatggtctggcaggacagagacgtgtacctgcaaggacccatctgggcaaagattcctcacacggacggacactttcacccttctcccctcatgggaggatttggactcaaacaccctcctccgcaaatcctcatcaagaatacccccgtacctgcgaatccttcgaccacattcagcgcggcaaagtttgcttctttcatcacacagtactctacggggcaggtcagcgtggagattgagtgggagctgcagaaggagaacagcaaacgctggaaccccgaaatccagtacacttccaactacaacaagtctgttaatgtggactttactgtggacactaatggtgtgtattcagagcctcgccccattggcacaagatacctgactcgtaatctgtaa

SEQ ID NO: 3217 - DNA, 2208 bp, synthetic construct
  misc_feature 1..2208: note = source = /note="Description of Artificial Sequence: Synthetic polynucleotide"
  source 1..2208: mol_type = other DNA
atggctgccgatggttatcttccagattggctcgaggacactctctctgaaggaataagacagtggtggaagctcaaacctggcccaccaccaccaaagcccgcagagcggcatcaggacgacagcaggggtcttgtgcttcctgggtacaagtacctcggacccttcaacggactcgacaagggagagccggtcaacgaggcagacgccgcggccctcgagcacgacaaggcctacgaccggcagctcgacagcggagacaacccgtacctcaagtacaaccacgccgacgcggagtttcaggagcgtcttaaagaagatacgtcttttgggggcaacctcggacgagcagtcttccaggcgaaaaagagggttcttgaacctctgggcctggttgaggaacctgttaagacggctccgggaaaaaagaggccggtagagcattctcctgcggagccagactcctcctcgggaaccggaaaggcgggccagcagcctgcgagaaagagattgaatttcggtcagactggagacgcagactccgtacctgacccccagcctctcggacagccaccagcagccccctctggtctgggaactaatacgatggctacaggcagtggcgcaccaacggcagacaataacgagggcgccgacggagtgggtaattcctcgggaaattggcattgcgattccacatggatgggcgacagagtcatcaccaccagcacccgaacctgggccctgcccacctacaacaaccacctctacaagcaaatctccagccaatctggagcctcaaacgacaaccactactttggctacagcaccccttgggggtattttgacttcaacagattccactgtcacttctccccacgtgactggcaaagactcatcaacaacaactggggattccgacccaagagactcaacttcaagctctttaacattcaagtcaaagaggtcacgcagaatgacggtacgacgacgattgccaataaccttaccagcacggttcaagtctttactgactcggagtaccagctcccgtacgtcctcggctcggcgcatcaaggatgcctcccgccgtttccagcagacgtcttcatggtgccacagtatggatacctcaccctgaacaacgggagtcaggcggtaggacgctcttccttttactgcctggagtactttccttctcagatgctgcgtaccggaaacaactttaccttcagctacacctttgaggacgttcctttccacagcagctacgctcacagccagagtttggaccggctgatgaatcctctgatcgaccagtatctgtattacttgagcaaaacaaacgctccaagcggaaccaccacgatgtccaggcttcagttttctcaggccggagcgagtgacattcgggaccagtctaggaactggcttcctggaccctgttaccgccagcagcgagtatcaaaaacagctgcggataacaacaacagtgattattcgtggactggagctaccaagtaccacctcaatggaagagactctctggtgaatccgggcccagctatggccagccacaaggacgatgaagaaaaatattttcctcagagcggggttctcatctttggaaaacaagactcgggaaaaactaatgtggacattgaaaaggtcatgattacagacgaagaggaaatcaggaccaccaatcccgtggctacggagcagtatggttctgtatctaccaacctccagagcggcaacacacaggcagccaccacagatgtcaacacacaaggcgttcttccaggcatggtctggcaggacagagacgtgtacctgcaaggacccatctgggcaaagattcctcacacggacggacactttcacccttctcccctcatgggaggatttggactcaaacaccctcctccgcaaatcctcatcaagaatacccccgtacctgcgaatccttcgaccacattcagcgcggcaaagtttgcttctttcatcacacagtactctacggggcaggtcagcgtggagattgagtgggagctgcagaaggagaacagcaaacgctggaaccccgaaatccagtacacttccaactacaacaagtctgttaatgtggactttactgtggacactaatggtgtgtattcagagcctcgccccattggcacaagatacctgactcgtaatctgtaa

SEQ ID NO: 3218 - DNA, 2208 bp, synthetic construct
  misc_feature 1..2208: note = source = /note="Description of Artificial Sequence: Synthetic polynucleotide"
  source 1..2208: mol_type = other DNA
atggctgccgatggttatcttccagattggctcgaggacactctctctgaaggaataagacagtggtggaagctcaaacctggcccaccaccaccaaagcccgcagagcggcatcaggacgacagcaggggtcttgtgcttcctgggtacaagtacctcggacccttcaacggactcgacaagggagagccggtcaacgaggcagacgccgcggccctcgagcacgacaaggcctacgaccggcagctcgacagcggagacaacccgtacctcaagtacaaccacgccgacgcggagtttcaggagcgtcttaaagaagatacgtcttttgggggcaacctcggacgagcagtcttccaggcgaaaaagagggttcttgaacctctgggcctggttgaggaacctgttaagacggctccgggaaaaaagaggccggtagagcattctcctgcggagccagacgcctcctcgggaaccggaaaggcgggccagcagcctgcgagaaagagattgaatttcggtcagactggagacgcagactccgtacctgacccccagcctctcggacagccaccagcagccccctctggtctgggaactaatacgatggctacaggcagtggcgcaccaatggcagacaataacgagggcgccgacggagtgggtaattcctcgggaaattggcattgcgattccacatggatgggcgacagagtcatcaccaccagcacccgaacctgggccctgcccacctacaacaaccacctctacaagcaaatctccagccaatctggagcctcaaacgacaaccactactttggctacagcaccccttgggggtattttgacttcaacagattccactgtcacttctccccacgtgactggcaaagactcatcaacaacaactggggattccgacccaagagactcaacttcaagctctttaacattcaagtcaaagaggtcacgcagaatgacggtacgacgacgattgccaataaccttaccagcacggttcaagtctttactgactcggagtaccagctcccgtacgtcctcggctcggcgcatcaaggatgcctcccgccgtttccagcagacgtcttcatggtgccacagtatggatacctcaccctgaacaacgggagtcaggcggtaggacgctcttccttttactgcccggagtactttccttctcagatgctgcgtaccggaaacaactttaccttcagctacacctttgaggacgttcctttccacagcagctacgctcacagccagagtttggaccggctgatgaatcctctgatcgaccagtatctgtattacttgagcaaaacaaacgctccaagcggaaccaccacgatgtccaggcttcagttttctcaggccggagcgagtgacattcgggaccagtctaggaactggcttcctggaccctgttaccgccagcagcgagtatcaaaaacagctgcggataacaacaacagtgattattcgtggactggagctaccaagtaccacctcaatggaagagactctctggtgaatccgggcccagctatggccagccacaaggacgatgaagaaaaatattttcctcagagcggggttctcatctttggaaaacaagactcgggaaaaactaatgtggacattgaaaaggtcatgattacagacgaagaggaaatcaggaccaccaatcccgtggctacggagcagtatggttctgtatctaccaacctccagagcggcaacacacaggcagccaccacagatgtcaacacacaaggcgttcttccaggcatggtctggcaggacagagacgtgtacctgcaaggacccatctgggcaaagattcctcacacggacggacactttcacccttctcccctcatgggaggatttggactcaaacaccctcctccgcaaatcctcatcaagaatacccccgtacctgcgaatccttcgaccacattcagcgcggcaaagtttgcttctttcatcacacagtactctacggggcaggtcagcgtggagattgagtgggagctgcagaaggagaacagcaaacgctggaaccccgaaatccagtacacttccaactacaacaagtctgttaatgtggactttactgtggacactaatggtgtgtattcagagcctcgccccattggcacaagatacctgactcgtaatctgtaa

SEQ ID NO: 3219 - DNA, 2208 bp, synthetic construct
  misc_feature 1..2208: note = source = /note="Description of Artificial Sequence: Synthetic polynucleotide"
  source 1..2208: mol_type = other DNA
atggctgccgatggttatcttccagattggctcgaggacactctctctgaaggaataagacagtggtggaagctcaaacctggcccaccaccaccaaagcccgcagagcggcatcaggacgacagcaggggtcttgtgcttcctgggtacaagtacctcggacccttcaacggactcgacaagggagagccggtcaacgaggcagacgccgcggccctcgagcacgacaaggcctacgaccggcagctcgacagcggagacaacccgtacctcaagtacaaccacgccgacgcggagtttcaggagcgtcttaaagaagatacgtcttttgggggcaacctcggacgagcagtcttccaggcgaaaaagagggttcttgaacctctgggcctggttgaggaacctgttaagacggctccgggaaaaaagaggccggtagagcattctcctgcggagccagactcctcctcgggaaccggaaaggcgggccagcagcctgcgagaaagagattgaatttcggtcagactggagacgcagactccgtacctgacccccagcctctcggacagccaccagcagccccctctggtctgggaactaatacgatggctacaggcagtggcgcaccaatggcagacaataacgagggcgccgacggagtgggtaattcctcgggaaattggcattgcgattccacatggatgggcgacagagtcatcaccaccagcacccgaacctgggccctgcccacctacaacaaccacctctacaagcaaatctccagccaatctggagcctcaaacgacaaccactactttggctacagcaccccttgggggtattttgacttcaacagattccactgtcacttctccccacgtgactggcaaagactcatcaacaacaactggggactccgacccaagagactcaacttcaagctctttaacattcaagtcaaagaggtcacgcagaatgacggtacgacgacgattgccaataaccttaccagcacggttcaagtctttactgactcggagtaccagctcccgtacgtcctcggctcggcgcatcaaggatgcctcccgccgtttccagcagacgtcttcatggtgccacagtatggatacctcaccctgaacaacgggagtcaggcggtaggacgctcttccttttactgcctggagtactttccttctcagatgctgcgtaccggaaacaactttaccttcagctacacctttgaggacgttcctttccacagcagctacgctcacagccagagtttggaccggctgatgaatcctctgatcgaccagtatctgtattacttgagcaaaacaaacgctccaagcggaaccaccacgatgtccaggcttcagttttctcaggccggagcgagtgacattcgggaccagtctaggaactggcttcctggaccctgttaccgccagcagcgagtatcaaaaacagctgcggataacaacaacagtgattattcgtggactggagctaccaagtaccacctcaatggaagagactctctggtgaatccgggcccagctatggccagccacaaggacgatgaagaaaaatattttcctcagagcggggttctcatctttggaaaacaagactcgggaaaaactaatgtggacattgaaaaggtcatgattacagacgaagaggaaatcaggaccaccaatcccgtggctacggagcagtatggttctgtatctaccaacctccagagcggcaacacacaggcagccaccacagatgtcaacacacaaggcgttcttccaggcatggtctggcaggacagagacgtgtacctgcaaggacccatctgggcaaagattcctcacacggacggacactttcacccttctcccctcatgggaggatttggactcaaacaccctcctccgcaaatcctcatcaagaatacccccgtacctgcgaatccttcgaccacattcagcgcggcaaagtttgcttctttcatcacacagtactctacggggcaggtcagcgtggagattgagtgggagctgcagaaggagaacagcaaacgctggaaccccgaaatccagtacacttccaactacaacaagtctgttaatgtggactttactgtggacactaatggtgtgtattcagagcctcgccccattggcacaagatacctgactcgtaatctgtaa

SEQ ID NO: 3220 - DNA, 2208 bp, synthetic construct
  misc_feature 1..2208: note = source = /note="Description of Artificial Sequence: Synthetic polynucleotide"
  source 1..2208: mol_type = other DNA
atggctgccgatggttatcttccagattggctcgaggacactctctctgaaggaataagacagtggtggaagctcaaacctggcccaccaccaccaaagcccgcagagcggcatcaggacgacagcaggggtcttgtgcttcctgggtacaagtacctcggacccttcaacggactcgacaagggagagccggtcaacgaggcagacgccgcggccctcgagcacgacaaggcctacgaccggcagctcgacagcggagacaacccgtacctcaagtacaaccacgccgacgcggagtttcaggagcgtcttaaagaagatacgtcttttgggggcaacctcggacgagcagtcttccaggcgaaaaagagggttcttgaacctctgggcctggttgaggaacctgttaagacggctccgggaaaaaagaggccggtagagcattttcctgcggagccagactcctcctcgggaaccggaaaggcgggccagcagcctgcgagaaagagattgaatttcggtcagactggagacgcagactccgtacctgacccccagcctctcggacagccaccagcagccccctctggtctgggaactaatacgatggctacaggcagtggcgcaccaatggcagacaataacgagggcgccgacggagtgggtaattcctcgggaaattggcattgcgattccacatggatgggcgacagagtcatcaccaccagcacccgaacctgggccctgcccacctacaacaaccacctctacaagcaaatctccagccaatctggagcctcaaacgacaaccactactttggctacagcaccccttgggggtattttgacttcaacagattccactgtcacttctccccacgtgactggcaaagactcatcaacaacaactggggattccgacccaagagactcaacttcaagctctttaacattcaagtcaaagaggtcacgcagaatgacggtacgacgacgattgccaataaccttaccagcacggttcaagtctttactgactcggagtaccagctcccgtacgtcctcggctcggcgcatcaaggatgcctcccgccgtttccagcagacgtcttcatggtgccacagtatggatacctcaccctgaacaacgggagtcaggcggtaggacgctcttccttttactgcctggagtactttccttctcagatgctgcgtaccggaaacaactttaccttcagctacacctttgaggacgttcctttccacagcagctacgctcacagccagagtttggaccggctgatgaatcctctgatcgaccagtatctgtattacttgagcaaaacaaacgctccaagcggaaccaccacgatgtccaggcttcagttttctcaggccggagcgagtgacattcgggaccagtctaggaactggcttcctggaccctgttaccgccagcagcgagtatcaaaaacagctgcggataacaacaacagtgattattcgtggactggagctaccaagtaccacctcaatggaagagactctctggtgaatccgggcccagctatggccagccacaaggacgatgaagaaaaatattttcctcagagcggggttctcatcttcggaaaacaagactcgggaaaaactaatgtggacattgaaaaggtcatgattacagacgaagaggaaatcaggaccaccaatcccgtggctacggagcagtatggttctgtatctaccaacctccagagcggcaacacacaggcagccaccacagatgtcaacacacaaggcgttcttccaggcatggtctggcaggacagagacgtgtacctgcaaggacccatctgggcaaagattcctcacacggacggacactttcacccttctcccctcatgggaggatttggactcaaacaccctcctccgcaaatcctcatcaagaatacccccgtacctgcgaatccttcgaccacattcagcgcggcaaagtttgcttctttcatcacacagtactctacggggcaggtcagcgtggagattgagtgggagctgcagaaggagaacagcaaacgctggaaccccgaaatccagtacacttccaactacaacaagtctgttaatgtggactttactgtggacactaatggtgtgtattcagagcctcgccccattggcacaagatacctgactcgtaatctgtaa

SEQ ID NO: 3221 - DNA, 2208 bp, synthetic construct
  misc_feature 1..2208: note = source = /note="Description of Artificial Sequence: Synthetic polynucleotide"
  source 1..2208: mol_type = other DNA
atggctgccgatggttatcttccagattggctcaaggacactctctctgaaggaataagacagtggtggaagctcaaacctggcccaccaccaccaaagcccgcagagcggcatcaggacgacagcaggggtcttgtgcttcctgggtacaagtacctcggacccttcaacggactcgacaagggagagccggtcaacgaggcagacgccgcggccctcgagcacgacaaggcctacgaccggcagctcgacagcggagacaacccgtacctcaagtacaaccacgccgacgcggagtttcaggagcgtcttaaagaagatacgtcttttgggggcaacctcggacgagcagtcttccaggcgaaaaagagggttcttgaacctctgggcctggttgaggaacctgttaagacggctccgggaaaaaagaggccggtagagcattctcctgcggagccagactcctcctcgggaaccggaaaggcgggccagcagcctgcgagaaagagattgaatttcggtcagactggagacgcagactccgtacctgacccccagcctctcggacagccaccagcagccccctctggtctgggaactaatacgatggctacaggcagtggcgcaccaatggcagacaataacgagggcgccgacggagtgggtaattcctcgggaaattggcattgcgattccacatggatgggcgacagagtcatcaccaccagcacccgaacctgggccctgcccacctacaacaaccacctctacaagcaaatctccagccaatctggagcctcaaacgacaaccactactttggctacagcaccccttgggggtattttgacttcaacagattccactgtcacttctccccacgtgactggcaaagactcatcaacaacaactggggattccgacccaagagactcaacttcaagctctttaacattcaagtcaaagaggtcacgcagaatgacggtacgacgacgattgccaataaccttaccagcacggttcaagtctttactgactcggagtaccagctcccgtacgtcctcggctcggcgcatcaaggatgcctcccgccgtttccagcagacgtcttcatggtgccacagtatggatacctcaccctgaacaacgggagtcaggcggtaggacgctcttccttttactgcctggagtactttccttctcagatgctgcgtaccggaaacaactttaccttcagctacacctttgaggacgttcctttccacagcagctacgctcacagccagagtttggaccggctgatgaatcctctgatcgaccagtatctgtattacttgagcaaaacaaacgctccaagcggaaccaccacgatgtccaggcttcagttttctcaggccggagcgagtgacattcgggaccagtctaggaactggcttcctggaccctgttaccgccagcagcgagtatcaaaaacagctgcggataacaacaacagtgattattcgtggactggagctaccaagtaccacctcaatggaagagactctctggtgaatccgggcccagctatggccagccacaaggacgatgaagaaaaatattttcctcagagcggggttctcatctttggaaaacaagactcgggaaaaaccaatgtggacattgaaaaggtcatgattacagacgaagaggaaatcaggaccaccaatcccgtggctacggagcagtatggttctgtatctaccaacctccagagcggcaacacacaggcagccaccacagatgtcaacacacaaggcgttcttccaggcatggtctggcaggacagagacgtgtacctgcaaggacccatctgggcaaagattcctcacacggacggacactttcacccttctcccctcatgggaggatttggactcaaacaccctcctccgcaaatcctcatcaagaatacccccgtacctgcgaatccttcgaccacattcagcgcggcaaagtttgcttctttcatcacacagtactctacggggcaggtcagcgtggagattgagtgggagctgcagaaggagaacagcaaacgctggaaccccgaaatccagtacacttccaactacaacaagtctgttaatgtggactttactgtggacactaatggtgtgtattcagagcctcgccccattggcacaagatacctgactcgtaatctgtaa

SEQ ID NO: 3222 - DNA, 2208 bp, synthetic construct
  misc_feature 1..2208: note = source = /note="Description of Artificial Sequence: Synthetic polynucleotide"
  source 1..2208: mol_type = other DNA
atggctgccgatggttatcttccagattggctcgaggacactctctctgaaggaataagacagtggtggaagctcaaacctggcccaccaccaccaaagcccgcagagcggcatcaggacgacagcaggggtcttgtgcttcctgggtacaagtacctcggacccttcaacggactcgacaagggagagccggtcaacgaggcagacgtcgcggccctcgagcacgacaaggcctacgaccggcagctcgacagcggagacaacccgtacctcaagtacaaccacgccgacgcggagtttcaggagcgtcttaaagaagatacgtcttttgggggcaacctcggacgagcagtcttccaggcgaaaaggagggttcttgaacctctgggcctggttgaggaacctgttaagacggctccgggaaaaaagaggccggtagagcattctcctgcggagccagactcctcctcgggaaccggaaaggcgggccagcagcctgcgagaaagagattgaatttcggtcagactggagacgcagactccgtacctgacccccagcctctcggacagccaccagcagccccctctggtctgggaactaatacgatggctacaggcagtggcgcaccaatggcagacaataacgagggcgccgacggagtgggtaattcctcgggaaattggcattgcgattccacatggatgggcgacagagtcatcaccaccagcacccgaacctgggccctgcccacctacaacaaccacctctacaagcaaatctccagccaatctggagcctcaaacgacaaccactactttggctacagcaccccttgggggtattttgacttcaacagattccactgtcacttctccccacgtgactggcaaagactcatcaacaacaactggggattccgacccaagagactcaacttcaagctctttaacattcaagtcaaagaggtcacgcagaatgacggtacgacgacgattgccaataaccttaccagcacggttcaagtctttactgactcggagtaccagctcccgtacgtcctcggctcggcgcatcaaggatgcctcccgccgtttccagcagacgtcttcatggtgccacagtatggatacctcaccctgaacaacgggagtcaggcggtaggacgctcttccttttactgcctggagtactttccttctcagatgctgcgtaccggaaacaactttaccttcagctacacctttgaggacgttcctttccacagcagctacgctcacagccagagtttggaccggctgatgaatcctctgatcgaccagtatctgtattacttgagcaaaacaaacgctccaagcggaaccaccacgatgtccaggcttcagttttctcaggccggagcgagtgacattcgggaccagtctaggaactggcttcctggaccctgttaccgccagcagcgagtatcaaaaacagctgcggataacaacaacagtgattattcgtggactggagctaccaagtaccacctcaatggaagagactctctggtgaatccgggcccagctatggccagccacaaggacgatgaagaaaaatattttcctcagagcggggttctcatctttggaaaacaagactcgggaaaaactaatgtggacattgaaaaggtcatgattacagacgaagaggaaatcaggaccaccaatcccgtggctacggagcagtatggttctgtatctaccaacctccagagcggcaacacacaggcagccaccacagatgtcaacacacaaggcgttcttccaggcatggtctggcaggacagagacgtgtacctgcaaggacccatctgggcaaagattcctcacacggacggacactttcacccttctcccctcatgggaggatttggactcaaacaccctcctccgcaaatcctcatcaagaatacccccgtacctgcgaatccttcgaccacattcagcgcggcaaagtttgcttctttcatcacacagtactctacggggcaggtcagcgtggagattgagtgggagctgcagaaggagaacagcaaacgctggaaccccgaaatccagtacacttccaactacaacaagtctgttaatgtggactttactgtggacactaatggtgtgtattcagagcctcgccccattggcacaagatacctgactcgtaatctgtaa

SEQ ID NO: 3223 - DNA, 2208 bp, synthetic construct
  misc_feature 1..2208: note = source = /note="Description of Artificial Sequence: Synthetic polynucleotide"
  source 1..2208: mol_type = other DNA
atggctgccgatggttatcttccagattggctcgaggacactctctctgaaggaataagacagtggtggaagctcaaacctggcccaccaccaccaaagcccgcagagcggcatcaggacgacagcaggggtcttgtgcttcctgggtacaagtacctcggacccttcaacggactcgacaagggagagccggtcaacgaggcagacgccgcggccctcgagcacgacaaggcctacgaccggcagctcgacagcggagacaacccgtacctcaagtacaaccacgccgacgcggagtttcaggagcgtcttaaagaagatacgtcttttgggggcaacctcggacgagcagtcttccaggcgaaaaagagggttcttgaacctctgggcctggttgaggaacctgttaagacggctccgggaaaaaagaggccggtagagcattctcctgcggagccagactcctcctcgggaaccggaaaggcgggccagcagcctgcgagaaagagattgaatttcggtcagactggagacgcagactccgtacctgacccccagcctctcggacagccaccagcagccccctctggtctgggaactaatacgatggctacaggcagtggcgcaccaatggcagacaataacgagggcgccgacggagtgggtaattcctcgggaaattggcattgcgattccacatggatgggcgacagagtcatcaccaccagcacccgaacctgggccctgcccacctacaacaaccacctctacaagcaaatctccagccaatctggagcctcaaacgacaaccactactttggctacagcaccccttgggggtattttgacttcaacagattccactgtcacttctccccacgtgactggcaaagactcatcaacaacaactggggattccgacccaagagactcaacttcaagctctttaacattcaagtcaaagaggtcacgcagaatgacggtacgacgacgattgccaataaccttaccagcacggttcaagtctttactgactcggagtaccagctcccgtacgtcctcggctcggcgcatcaaggatgcctcccgccgtttccagcagacgtcttcatggtgccacagtatggatacctcaccctgaacaacgggagtcaggcggtaggacgctcttccttttactgcctggagtactttccttctcagatgctgcgtaccggaaacaactttaccttcagctacacctttgaggacgttcctttccacagcagctacgctcacagccagagtttggaccggctgatgaatcctctgatcgaccagtatctgtattacttgagcaaaacaaacgctctaagcggaaccaccacgatgtccaggcttcagttttctcaggccggagcgagtgacattcgggaccagtctaggaactggcttcctggaccctgttaccgccagcagcgagtatcaaaaacagctgcggataacaacaacagtgattattcgtggactggagctaccaagtaccacctcaatggaagagactctctggtgaatccgggcccagctatggccagccacaaggacgatgaagaaaaatattttcctcagagcgaggttctcatctttggaaaacaagactcgggaaaaactaatgtggacattgaaaaggtcatgattacagacgaagaggaaatcaggaccaccaatcccgtggctacggagcagtatggttctgtatctaccaacctccagagcggcaacacacaggcagccaccacagatgtcaacacacaaggcgttcttccaggcatggtctggcaggacagagacgtgtacctgcaaggacccatctgggcaaagattcctcacacggacggacactttcacccttctcccctcatgggaggatttggactcaaacaccctcctccgcaaatcctcatcaagaatacccccgtacctgcgaatccttcgaccacattcagcgcggcaaagcttgcttctttcatcacacagtactctacggggcaggtcagcgtggagattgagtgggagctgcagaaggagaacagcaaacgctggaaccccgaaatccagtacacttccaactacaacaagtctgttaatgtggactttactgtggacactaatggtgtgtattcagagcctcgccccattggcacaagatacctgactcgtaatctgtaa

SEQ ID NO: 3224 - DNA, 2208 bp, synthetic construct
  misc_feature 1..2208: note = source = /note="Description of Artificial Sequence: Synthetic polynucleotide"
  source 1..2208: mol_type = other DNA
atggctgccgatggttatcttccagattggctcgaggacactctctctgaaggaataagacagtggtggaagctcaaacctggcccaccaccaccaaagcccgcagagcggcatcaggacgacagcaggggtcttgtgcttcctgggtacaagtacctcggacccttcaacggactcgacaagggagagccggtcaacgaggcagacgccgcggccctcgagcacgacaaggcctacgaccggcagctcgacagcggagacaacccgtacctcaagtacaaccacgccgacgcggagtttcaggagcgtcttaaagaagatacgtcttttgggggcaacctcggacgagcagtcttccaggcgaaaaagagggttcttgaacctctgggcctggttgaggaacctgttaagacggctccgggaaaaaagaggccggtagagcattctcctgcggagccagactcctcctcgggaaccggaaaggcgggccagcagcctgcgagaaagagattgaatttcggtcagactggagacgcagactccgtacctgacccccagcctctcggacagccaccagcagccccctctggtctgggaactaatacgatggctacaggcagtggcgcaccaatggcagacaataacgagggcgccgacggagtgggtaattcctcgggaaattggcattgcgattccacatggatgggcgacagagtcatcaccaccagcacccgaacctgggccctgcccacctacaacaaccacctctacaagcaaatctccagccaatctggagcctcaaacgacaaccactactttggctacagcaccccttgggggtattttgacttcaacagattccactgtcacttctccccacgtgactggcaaagactcatcaacaacaactggggattccgacccaagagactcaacttcaagctctttaacattcaagtcaaagaggtcacgcagaatgacggtacgacgacgattgccaataaccttaccagcacggttcaagtctttactgactcggagtaccagctcccgtacgccctcggctcggcgcatcaaggatgcctcccgccgtttccagcagacgtcttcatggtgccacagtatggatacctcaccctgaacaacgggagtcaggcggtaggacgctcttccttttactgcctggagtactttccttctcagatgctgcgtaccggaaacaactttaccttcagctacacctttgaggacgttcctttccacagcagctacgctcacagccagagtttggaccggctgatgaatcctctgatcgaccagtatctgtattacttgagcaaaacaaacgctccaagcggaaccaccacgatgtccaggcttcagttttctcaggccggagcgagtgacattcgggaccagtctaggaactggcttcctggaccctgttaccgccagcagcgagtatcaaaaacagctgcggataacaacaacagtgattattcgtggactggagctaccaagtaccacctcaatggaagagactctctggtgaatccgggcccagctatggccagccacaaggacgatgaagaaaaatattttcctcagagcggggttctcatctttggaaaacaagactcgggaaaaaccaatgtggacattgaaaaggtcatgattacagacgaagaggaaatcaggaccaccaatcccgtggctacggagcagtatggttctgtatctaccaacctccagagcggcaacacacaggcagccaccacagatgtcaacacacaaggcgttcttccaggcatggtctggcaggacagagacgtgtacctgcaaggacccatctgggcaaagattcctcacacggacggacactttcacccttctcccctcatgggaggatttggactcaaacaccctcctccgcaaatcctcatcaagaatacccccgtacctgcgaatccttcgaccacattcagcgcggcaaagtttgcttctttcatcacacagtactctacggggcaggtcagcgtggagattgagtgggagctgcagaaggagaacagcaaacgctggaaccccgaaatccagtacacttccaactacaacaagtctgttaatgtggactttactgtggacactaatggtgtgtattcagagcctcgccccattggcacaagatacctgactcgtaatctgtaa

SEQ ID NO: 3225 - DNA, 2208 bp, synthetic construct
  misc_feature 1..2208: note = source = /note="Description of Artificial Sequence: Synthetic polynucleotide"
  source 1..2208: mol_type = other DNA
atggctgccgatggttatcttccagattggctcgaggacactctctctgaaggaataagacagtggtggaagctcaaacctggcccaccaccaccaaagcccgcagagcggcatcaggacgacagcaggggtcttgtgcttcctgggtacaagtacctcggacccttcaacggactcgacaagggagagccggtcaacgaggcagacgccgcggccctcgagcacgacaaggcctacgaccggcagctcgacagcggagacaacccgtacctcaagtacaaccacgccgacgcggagtttcaggagcgtcttaaagaagatacgtcttttgggggcaacctcggacgagcagtcttccaggcgaaaaagagggttcttgaacctctgggcctggttgaggaacctgttaagacggctccgggaaaaaagaggccggtagagcattctcctgcggagccagactcctcctcgggaaccggaaaggcgggccagcagcctgcgagaaagagattgaatttcggtcagactggagacgcagactccgtacctgacccccagcctctcggacagccaccagcagccccctctggtctgggaactaatacgatggctacaggcagtggcgcaccaatggcagacaataacgagggcgccgacggagtgggtaattcctcgggaaattggcattgcgattccacatggatgggcgacagagtcatcaccaccagcacccgaacctgggccctgcccacctacaacaaccacctctacaagcaaatctccagccaatctggagcctcaaacgacaaccactactttggctacagcaccccttgggggtattttgacttcagcagattccactgtcacttctccccacgtgactggcaaagactcatcaacaacaactggggattccgacccaagagactcaacttcaagctctttaacattcaagtcaaagaggtcacgcagaatgacggtacgacgacgattgccaataaccttaccagcacggttcaagtctttactgactcggagtaccagctcccgtacgtcctcggctcggcgcatcaaggatgcctcccgccgtttccagcagacgtcttcatggtgccacagtatggatacctcaccctgaacaacgggagtcaggcggtaggacgctcttccttttactgcctggagtactttccttctcagatgctgcgtaccggaaacaactttaccttcagctacacctttgaggacgttcctttccacagcagctacgctcacagccagagtttggaccggctgatgaatcctctgatcgaccagtatctgtattacttgagcaaaacaaacgctccaagcggaaccaccacgatgtccaggcttcagttttctcaggccggagcgagtgacattcgggaccagtctaggaactggcttcctggaccctgttaccgccagcagcgagtatcaaaaacagctgcggataacaacaacagtgattattcgtggactggagctaccaagtaccacctcaatggaagagactctctggtgaatccgggcccagctatggccagccacaaggacgatgaagaaaaatattttcctcagagcggggttctcatctttggaaaacaagactcgggaaaaaccaatgtggacattgaaaaggtcatgattacagacgaagaggaaatcaggaccaccaatcccgtggctacggagcagtatggttctgtatctaccaacctccagagcggcaacacacaggcagccaccacagatgtcaacacacaaggcgttcttccaggcatggtctggcaggacagagacgtgtacctgcaaggacccatctgggcaaagattcctcacacggacggacactttcacccttctcccctcatgggaggatttggactcaaacaccctcctccgcaaatcctcatcaagaatacccccgtacctgcgaatccttcgaccacattcagcgcggcaaagtttgcttctttcatcacacagtactctacggggcaggtcagcgtggagattgagtgggagctgcagaaggagaacagcaaacgctggaaccccgaaatccagtacacttccaactacaacaagtctgttaatgtggactttactgtggacactaatggtgtgtattcagagcctcgccccattggcacaagatacctgactcgtaatctgtaa

SEQ ID NO: 3226 - DNA, 2208 bp, synthetic construct
  misc_feature 1..2208: note = source = /note="Description of Artificial Sequence: Synthetic polynucleotide"
  source 1..2208: mol_type = other DNA
atggctgccgatggttatcttccagattggctcgaggacactctctctgaaggaataagacagtggtggaagctcaaacctggcccaccaccaccaaagcccgcagagcggcatcaggacgacagcaggggtcttgtgcttcctgggtacaagtacctcggacccttcaacggactcgacaagggagagccggtcaacgaggcagacgccgcggccctcgagcacgacaaggcctacgaccggcagctcgacagcggagacaacccgtacctcaagtacaaccacgccgacgcggagtttcaggagcgtcttaaagaagatacgtcttttgggggcaacctcggacgagcagtcttccaggcgaaaaagagggttcttgaacccctgggcctggttgaggaacctgttaagacggctccgggaaaaaagaggccggtagagcattctcctgcggagccagactcctcctcgggaaccggaaaggcgggccagcagcctgcgagaaagagattgaatttcggtcagactggagacgcagactccgtacctgacccccagcctctcggacagccaccagcagccccctctggtctgggaactaatacgatggctacaggcagtggcgcaccaatggcagacaataacgagggcgccgacggagtgggtaattcctcgggaaattggcattgcgattccacatggatgggcgacagagtcatcaccaccagcacccgaacctgggccctgcccacctacaacaaccacctctacaagcaaatctccagccaatctggagcctcaaacgacaaccactacgttggctacagcaccccttgggggtattttgacttcaacagattccactgtcacttctccccacgtgactggcaaagactcatcaacaacaactggggattccgacccaagagactcaacttcaagctctttaacattcaagtcaaagaggtcacgcagaatgacggtacgacgacgattgccaataaccttaccagcacggttcaagtctttactgactcggagtaccagctcccgtacgtcctcggctcggcgcatcaaggatgcctcccgccgtttccagcagacgtcttcatggtgccacagtatggatacctcaccctgaacaacgggagtcaggcggtaggacgctcttccttttactgcctggagtactttccttctcagatgctgcgtaccggaaacaactttaccttcagctacacctttgaggacgttcctttccacagcagctacgctcacagccagagtttggaccggctgatgaatcctctgatcgaccagtatctgtattacttgagcaaaacaaacgctccaagcggaaccaccacgatgtccaggcttcagttttctcaggccggagcgagtgacattcgggaccagtctaggaactggcttcctggaccctgttaccgccagcagcgagtatcaaaaacagctgcggataacaacaacagtgattattcgtggactggagctaccaagtaccacctcaatggaagagactctctggtgaatccgggcccagctatggccagccacaaggacgatgaagaaaaatattttcctcagagcggggttctcatctttggaaaacaagactcgggaaaaactaatgtggacattgaaaaggtcatgattacagacgaagaggaaatcaggaccaccaatcccgtggctacggagcagtatggttctgtatctaccaacctccagagcggcaacacacaggcagccaccacagatgtcaacacacaaggcgttcttccaggcatggtctggcaggacagagacgtgtacctgcaaggacccatctgggcaaagattcctcacacggacggacactttcacccttctcccctcatgggaggatttggactcaaacaccctcctccgcaaatcctcatcaagaatacccccgtacctgcgaatccttcgaccacattcagcgcggcaaagtttgcttctttcatcacacagtactctacggggcaggtcagcgtggagattgagtgggagctgcagaaggagaacagcaaacgctggaaccccgaaatccagtacacttccaactacaacaagtctgttaatgtggactttactgtggacactaatggtgtgtattcagagcctcgccccattggcacaagatacctgactcgtaatctgtaa

SEQ ID NO: 3227 - DNA, 2208 bp, synthetic construct
  misc_feature 1..2208: note = source = /note="Description of Artificial Sequence: Synthetic polynucleotide"
  source 1..2208: mol_type = other DNA
atggctgccgatggttatcttccagattggctcgaggacactctctctgaaggaataagacagtggtggaagctcaaacctggcccaccaccaccaaagcccgcagagcggcatcaggacgacagcaggggtcttgtgcttcctgggtacaagtacctcggacccttcaacggactcgacaagggagagccggtcaacgaggcagacgccgcggccctcgagcacgacaaggcctacgaccggcagctcgacagcggagacaacccgtacctcaagtacaaccacgccgacgcggagtttcaggagcgtcttaaagaagatacgtcttttgggggcaacctcggacgagcagtcttccaggcgaaaaagagggttcttgaacctctgggcctggttgaggaacctgttaagacggctccgggaaaaaagaggccggtagagcattctcctgcggagccagactcctcctcgggaaccggaaaggcgggccagcagcctgcgagaaagagattgaatttcggtcagactggagacgcagactccgtacctgacccccagcctctcggacagccaccagcagccccctctggtctgggaactaatacgatggctacaggcagtggcgcaccaatggcagacaataacgagggcgccgacggagtgggtaattcctcgggaaattggcattgcgattccacatggatgggcgacagagtcatcaccaccagcacccgaacctgggccctgcccacctacaacaaccacctctacaagcaaatctccagccaatctggagcctcaaacgacaaccactactttggctacagcaccccttgggggcattttgacttcaacagattccactgtcacttctccccacgtgactggcaaagactcatcaacaacaactggggattccgacccaagagactcaacttcaagctctttaacattcaagtcaaagaggtcacgcagaatgacggtacgacgacgattgccaataaccttaccagcacggttcaagtctttactgactcggagtaccagctcccgtacgtcctcggctcggcgcatcaaggatgcctcccgccgtttccagcagacgtcttcatggtgccacagtatggatacctcaccctgaacaacgggagtcaggcggtaggacgctcttccttttactgcctggagtactttccttctcagatgctgcgtaccggaaacaactttaccttcagctacacctttgaggacgttcctttccacagcagctacgctcacagccagagtttggaccggctgatgaatcctctgatcgaccagtatctgtattacttgagcaaaacaaacgctccaagcggaaccaccacgatgtccaggcttcagttttctcaggccggagcgagtgacattcgggaccagtctaggaactggcttcctggaccctgttaccgccagcagcgagtatcaaaaacagctgcggataacaacaacagtgattattcgtggactggagctaccaagtaccacctcaatggaagagactctctggtgaatccgggcccagctatggccagccacaaggacgatgaagaaaaatattttcctcagagcggggttctcatctttggaaaacaagactcgggaaaaaccaatgtggacattgaaaaggtcatgattacagacgaagaggaaatcaggaccaccaatcccgtggctacggagcagtatggttctgtatctaccaacctccagagcggcaacacacaggcagccaccacagatgtcaacacacaaggcgttcttccaggcatggtctggcaggacagagacgtgtacctgcaaggacccatctgggcaaagattcctcacacggacggacactttcacccttctcccctcatgggaggatttggactcaaacaccctcctccgcaaatcctcatcaagaatacccccgtacctgcgaatccttcgaccacattcagcgcggcaaagtttgcttctttcatcacacagtactctacggggcaggtcagcgtggagattgagtgggagctgcagaaggagaacagcaaacgctggaaccccgaaatccagtacacttccaactacaacaagtctgttaatgtggactttactgtggacactaatggtgtgtattcagagcctcgccccattggcacaagatacctgactcgtaatctgtaa

SEQ ID NO: 3228 - DNA, 2208 bp, synthetic construct
  misc_feature 1..2208: note = source = /note="Description of Artificial Sequence: Synthetic polynucleotide"
  source 1..2208: mol_type = other DNA
atggctgccgatggttatcttccagattggctcgaggacactctctctgaaggaataagacagtggtggaagctcaaacctggcccaccaccaccaaagcccgcagagcggcatcaggacgacagcaggggtcttgtgcttcctgggtacaagtacctcggacccttcaacggactcgacaagggagagccggtcaacgaggcagacgtcgcggccctcgagcacgacaaggcctacgaccggcagctcgacagcggagacaacccgtacctcaagtacaaccacgccgacgcggagtttcaggagcgtcttaaagaagatacgtcttttgggggcaacctcggacgagcagtcttccaggcgaaaaagagggttcttgaacctctgggcctggttgaggaacctgttaagacggctccgggaaaaaagaggccggtagagcattctcctgcggagccagactcctcctcgggaaccggaaaggcgggccagcagcctgcgagaaagagattgaatttcggtcagactggagacgcagactccgtacctgacccccagcctctcggacagccaccagcagccccctctggtctgggaactaatacgatggctacaggcagtggcgcaccaatggcagacaataacgagggcgccgacggagtgggtaattcctcgggaaattggcattgcgattccacatggatgggcgacagagtcatcaccaccagcacccgaacctgggccctgcccacctacaacaaccacctctacaagcaaatctccagccaatctggagcctcaaacgacaaccactactttggctacagcaccccttgggggtattttgacttcaacagattccactgtcacttctccccacgtgactggcaaagactcatcaacaacgactggggattccgacccaagagactcaacttcaagctctttaacattcaagtcaaagaggtcacgcagaatgacggtacgacgacgattgccaataaccttaccagcacggttcaagtctttactgactcggagtaccagctcccgtacgtcctcggctcggcgcatcaaggatgcctcccgccgtttccagcagacgtcttcatggtgccacagtatggatacctcaccctgaacaacgggagtcaggcggtaggacgctcttccttttactgcctggagtactttccttctcagatgctgcgtaccggaaacaactttaccttcagctacacctttgaggacgttcctttccacagcagctacgctcacagccagagtttggaccggctgatgaatcctctgatcgaccagtatctgtattacttgagcaaaacaaacgctccaagcggaaccaccacgatgtccaggcttcagttttctcaggccggagcgagtgacattcgggaccagtctaggaactggcttcctggaccctgttaccgccagcagcgagtatcaaaaacagctgcggataacaacaacagtgattattcgtggactggagctaccaagtaccacctcaatggaagagactctctggtgaatccgggcccagctatggccagccacaaggacgatgaagaaaaatattttcctcagagcggggttctcatctttggaaaacaggactcgggaaaaactaatgtggacattgaaaaggtcatgattacagacgaagaggaaatcaggaccaccaatcccgtggctacggagcagtatggttctgtatctaccaacctccagagcggcaacacacaggcagccaccacagatgtcaacacacaaggcgttcttccaggcatggtctggcaggacagagacgtgtacctgcaaggacccatctgggcaaagattcctcacacggacggacactttcacccttctcccctcatgggaggatttggactcaaacaccctcctccgcaaatcctcatcaagaatacccccgtacctgcgaatccttcgaccacattcagcgcggcaaagtttgcttctttcatcacacagtactctacggggcaggtcagcgtggagattgagtgggagctgcagaaggagaacagcaaacgctggaaccccgaaatccagtacacttccaactacaacaagtctgttaatgtggactttactgtggacactaatggtgtgtattcagagcctcgccccattggcacaagatacctgactcgtaatctgtaa

SEQ ID NO: 3229 - DNA, 2208 bp, synthetic construct
  misc_feature 1..2208: note = source = /note="Description of Artificial Sequence: Synthetic polynucleotide"
  source 1..2208: mol_type = other DNA
atggctgccgatggttatcttccagattggctcgaggacactctctctgaaggaataagacagtggtggaagctcaaacctggcccaccaccaccaaagcccgcagagcggcatcaggacgacagcaggggtcttgtgcttcctgggtacaagtacctcggacccttcaacggactcgacaagggagagccggtcaacgaggcagacgccgcggccctcgagcacgacaaggcctacgaccggcagctcgacagcggagacaacccgtacctcaagtacaaccacgccgacgcggagtttcaggagcgtcttaaagaagatacgtcttttgggggcaacctcggacgagcagtcttccaggcgaaaaagagggttcttgaacctctgggcctggttgaggaacctgttaagacggctccgggaaaaaagaggccggtagagcattctcctgcggagccagactcctcctcgggaaccggaaaggcgggccagcagcctgcgagaaagagattgaatttcggtcagactggagacgcagactccgtacctgacccccagcctctcggacagccaccagcagccccctctggtctgggaactaatacgatggctacaggcagtggcgcaccaatggcagacaataacgagggcgccgacggagtgggtaattcctcgggaaattggcattgcgattccacatggatgggcgacagagtcatcaccaccagcacccgaacctgggccctgcccacctacaacaaccacctctacaagcaaatctccagccaatctggagcctcaaacgacaaccactactttggctacagcaccccttgggggtattttgacttcaacagattccactgtcacttctccccacgtgactggcaaagactcatcaacaacaactggggattccgacccaagagactcaacttcaagctctttaacattcaagtcaaagaggtcacgcagaatgacggtacgacgacgattgccaataaccttaccagcacggttcaagtctttactgactcggagtaccagctcccgtacgtcctcggctcggcgcatcaaggatgcctcccgccgtttccagcagacgtcttcatggtgccacagtatggatacctcaccctgaacaacgggagtcaggcggtaggacgctcttccttttactgcctggagtactttccttctcagatgctgcgtaccggaaacaactttaccttcagctacacctttgaggacgttcctttccacagcagctacgctcacagccagagtttggaccggctgatgaatcctctgatcgaccagtatctgtattacttgagcaaaacaaacgctccaagcggaaccaccacgatgtccaggcttcagttttctcaggccggagcgagtgacattcgggaccagtctaggaactggcttcctggaccctgttaccgccagcagcgagtatcaaaaacagctgcggataacaacaacagtgattattcgtggactggagctaccaagtaccacctcaatggaagagactctctggtgaatccgggcccagctatggccagccacaaggacgatgaagaaaaatattttcctcagagcggggttctcatctttggaaaacaagactcggaaaaaaccaatgtggacattgaaaaggtcatgattacagacgaagaggaaatcaggaccaccaatcccgtggctacggagcagtatggttctgtatctaccaacctccagagcggcaacacacaggcagccaccacagatgtcaacacacaaggcgttcttccaggcatggtctggcaggacagagacgtgtacctgcaaggacccatctgggcaaagattcctcacacggacggacactttcacccttctcccctcatgggaggatttggactcaaacaccctcctccgcaaatcctcatcaagaatacccccgtacctgcgaatccttcgaccacattcagcgcggcaaagtttgcttctttcatcacacagtactctacggggcaggtcagcgtggagattgagtgggagctgcagaaggagaacagcaaacgctggaaccccgaaatccagtacacttccaactacaacaagtctgttaatgtggactttactgtggacactaatggtgtgtattcagagcctcgccccattggcacaagatacctgactcgtaatctgtaa

SEQ ID NO: 3230 - DNA, 2208 bp, synthetic construct
  misc_feature 1..2208: note = source = /note="Description of Artificial Sequence: Synthetic polynucleotide"
  source 1..2208: mol_type = other DNA
atggctgccgatggttatcttccagattggctcgaggacactctctctgaaggaataagacagtggtggaagctcaaacctggcccaccaccaccaaagcccgcagagcggcatcaggacgacagcaggggtcttgtgcttcctgggtacaagtacctcggacccttcaacggactcgacaagggagagccggtcaacgaggcagacgccgcggccctcgagcacgacaaggcctacgaccggcagctcgacagcggagacaacccgtacctcaagtacaaccacgccgacgcggagtttcaggagcgtcttaaagaagatacgtcttttgggggcaacctcggacgagcagtcttccaggcgaaaaagagggttcttgaacctctgggcctggttgaggaacctgttaagacggctccgggaaaaaagaggccggtagagcattctcctgcggagccagactcctcctcgggaaccggaaaggcgggccagcagcctgcgagaaagagattgaatttcggtcagactggagacgcagactccgtacctgacccccagcctctcggacagccaccagcagccccctctggtctgggaactaatacgatggctacaggcagtggcgcaccaatggcagacaataacgagggcgccgacggagtgggtaattcctcgggaaattggcattgcgattccacatggatgggcgacagagtcatcaccaccagcacccgaacctgggccctgcccacctacaacaaccacctctacaagcaaatctccagccaatctggagcctcaaacgacaaccactactttggctacagcaccccttgggggtattttgacttcaacagattccactgtcacttctccccacgtgactggcaaagactcatcaacaacaactggggattccgacccaagagactcaacttcaagctctttaacattcaagtcaaagaggtcacgcagaatgacggtacgacgacgattgccaataaccttaccagcacggttcaagtctttactgactcggagtaccagctcccgtacgtcctcggctcggcgcatcaaggatgcctcccgccgtttccagcagacgtcttcatggtgccacagtatggatacctcaccctgaacaacgggagtcaggcggtaggacgctcttccttttactgcctggagtactttccttctcagatgctgcgtaccggaaacaactttaccttcagctacacctttgaggacgttcctttccacagcagctacgctcacagccagagtttggaccggctgatgaatcctctgatcgaccagtatctgtattacttgagcaaaacaaacgctccaagcggaaccaccacgatgtccaggcttcagttttctcaggccggagcgagtgacattcgggaccagtctaggaactggcttcctggaccctgttaccgccagcagcgagtatcaaaaacagctgcggataacaacaacagtgattattcgtggactggagctaccaagtaccacctcaatggaagagactctctggtgaatccgggcccagctatggccagccacaaggacgatgaagaaaaatattttcctcagagcggggttctcatctttggaaaacaagactcgggaaaaactaatgtggacattgaaaaggtcatgattacagacgaagaggaaatcaggaccaccaatcccgtggctacggagcagtatggttctgtatctaccaacctccagagcggcaacacacaggcagccaccacagatgtcaacacacaaggcgttcttccaggcatggtctggcaggacagagacgtgtacctgcaaggacccatctgggcaaagattcctcacacggacggacactttcacccttctcccctcatgggaggatttggactcaaacaccctcctccgcaaatcctcatcaagaatacccccgtacctgcgaatccttcgaccacattcagcgcggcaaagtttgcttctttcatcacacagtactctacggggcaggtcagcgtggagattgagtgggagctgcagaaggagaacagcaaacgctggaaccccgaaatccagtacacttccaactacaacaagtctgttaatgtggactttactgtggacactaatggtgtgtattcagagcctcgccccattggcacaagatacctgactcgtaatctgtaa

SEQ ID NO: 3231 - DNA, 2208 bp, synthetic construct
  misc_feature 1..2208: note = source = /note="Description of Artificial Sequence: Synthetic polynucleotide"
  source 1..2208: mol_type = other DNA
atggctgccgatggttatcttccagattggctcgaggacactctctctgaaggaataagacagtggtggaagctcaaacctggcccaccaccaccaaagcccgcagagcggcatcaggacgacagcaggggtcttgtgcttcctgggtacaagtacctcggacccttcaacggactcgacaagggagagccggtcaacgaggcagacgtcgcggccctcgagcacgacaaggcctacgaccggcagctcgacagcggagacaacccgtacctcaagtacaaccacgccgacgcggagtttcaggagcgtcttaaagaagatacgtcttttgggggcaacctcggacgagcagtcttccaggcgaaaaagagggttcttgaacctctgggcctggttgaggaacctgttaagacggctccgggaaaaaagaggccggtagagcattctcctgcggagccagactcctcctcgggaaccggaaaggcgggccagcagcctgcgagaaagagattgaatttcggtcagactggagacgcagactccgtacctgacccccagcctctcggacagccaccagcagccccctctggtctgggaactaatacgatggctacaggcagtggcgcaccaatggcagacaataacgagggcgccgacggagtgggtaattcctcgggaaattggcattgcgattccacatggatgggcgacagagtcatcaccaccagcacccgaacctgggccctgcccacctacaacaaccacctctacaagcaaatctccagccaatctggagcctcaaacgacaaccactactttggctacagcaccccttgggggtattttgacttcaacagattccactgtcacttctccccacgtgactggcaaagactcatcaacaacaactggggattccgacccaagagactcaacttcaagctctttaacattcaagtcaaagaggtcacgcagaatgacggtacgacgacgattgccaataaccttaccagcacggttcaagtctttactgactcggagtaccagctcccgtacgtcctcggctcggcgcatcaaggatgcctcccgccgtttccagcagacgtcttcatggtgccacagtatggatacctcaccctgaacaacgggagtcaggcggtaggacgctcttccttttactgcctggagtactttccttctcagatgctgcgtaccggaaacaactttaccttcagctacacctttgaggacgttcctttccacagcagctacgctcacagccagagtttggaccggctgatgaatcctctgatcgaccagtatctgtattacttgagcaaaacaaacgctccaagcggaaccaccacgatgtccaggcttcagttttctcaggccggagcgagtgacattcgggaccagtctaggaactggcttcctggaccctgttaccgccagcagcgagtatcaaaaacagctgcggataacaacaacagtgattattcgtggactggagctaccaagtaccacctcaatggaagagactctctggtgaatccgggcccagctatggccagccacaaggacgatgaagaaaaatattttcctcagagcggggttctcatctttggaaaacaagactcgggaaaaactaatgtggacattgaaaaggtcatgattacagacgaagaggaaatcaggaccaccaatcccgtggctacggagcagtatggttctgtatctaccaacctccagagcggcaacacacaggcagccaccacagatgtcaacacacaaggcgttcttccaggcatggtctggcaggacagagacgtgtacctgcaaggacccatctgggcaaagattcctcacacggacggacactttcacccttctcccctcatgggaggatttggactcaaacaccctcctccgcaaatcctcatcaagaatacccccgtacctgcgaatccttcgaccacattcagcgcggcaaagtttgcttctttcatcacacagtactctacggggcaggtcagcgtggagattgagtgggagctgcagaaggagaacagcaaacgctggaaccccgaaatccagtacacttccaactacaacaagtctgttaatgtggactttactgtggacactaatggtgtgtattcagagcctcgccccattggcacaagatacctgactcgtaatctgtaa

SEQ ID NO: 3232 - DNA, 2208 bp, synthetic construct
  misc_feature 1..2208: note = source = /note="Description of Artificial Sequence: Synthetic polynucleotide"
  source 1..2208: mol_type = other DNA
atggctgccgatggttatcttccagattggctcgaggacactctctctgaaggaataagacagtggtggaagctcaaacctggcccaccaccaccaaagcccgcagagcggcatcaggacgacagcaggggtcttgtgcttcctgggtacaagtacctcggacccttcaacggactcgacaagggagagccggtcaacgaggcagacgccgcggccctcgagcacgacaaggcctacgaccggcagctcgacagcggagacaacccgtacctcaagtacaaccacgccgacgcggagtttcaggagcgtcttaaagaagatacgtcttttgggggcaacctcggacgagcagtcttccaggcgaaaaagagggttcttgaacctctgggcctggttgaggaacctgttaagacggctccgggaaaaaagaggccggtagagcattctcctgcggagccagactcctcctcgggaaccggaaaggcgggccagcagcctgcgagaaagagattgaatttcggtcagactggagacgcagactccgtacctgacccccagcctctcggacagccaccagcagccccctctggtctgggaactaatacgatggctacaggcagtggcgcaccaatggcagacaataacgagggcgccgacggagtgggtaattcctcgggaaattggcattgcgattccacatggatgggcgacagagtcatcaccaccagcacccgaacctgggccctgcccacctacaacaaccacctctacaagcaaatctccagccaatctggagcctcaaacgacaaccactactttggctacagcaccccttgggggtattttgacttcaacagattccactgtcacttctccccacgtgactggcaaagactcatcaacaacaactggggattccgacccaagagactcaacttcaagctctttaacattcaagtcaaagaggtcacgcagaatgacggtacgacgacgattgccaataaccttaccagcacggttcaagtctttactgactcggagtaccagctcccgtacgtcctcggctcggcgcatcaaggatgcctcccgccgtttccagcagacgtcttcatggtgccacagtatggatacctcaccctgaacaacgggagtcaggcggtaggacgctcttccttttactgcctggagtactttccttctcagatgctgcgtaccggaaacaactttaccttcagctacacctttgaggacgttcctttccacagcagctacgctcacagccagagtttggaccggctgatgaatcctctgatcgaccagtatctgtattacttgagcaaaacaaacgctccaagcggaaccaccacgatgtccaggcttcagttttctcaggccggagcgagtgacattcgggaccagtctaggaactggcttcctggaccctgttaccgccagcagcgagtatcaaaaacagctgcggataacaacaacagtgattatccgtggactggagctaccaagtaccacctcaatggaagagactctctggtgaatccgggcccagctatggccagccacaaggacgatgaagaaaaatattttcctcagagcggggttctcatctttggaaaacaagactcgggaaaaaccaatgtggacattgaaaaggtcatgattacagacgaagaggaaatcaggaccaccaatcccgtggctacggagcagtatggttctgtatctaccaacctccagagcggcaacacacaggcagccaccacagatgtcaacacacaaggcgttcttccaggcatggtctggcaggacagagacgtgtacctgcaaggacccatctgggcaaagattcctcacacggacggacactttcacccttctcccctcatgggaggatttggactcaaacaccctcctccgcaaatcctcatcaagaatacccccgtacctgcgaatccttcgaccacattcagcgcggcaaagtttgcttctttcatcacacagtactctacggggcaggtcagcgtggagattgagtgggagctgcagaaggagaacagcaaacgctggaaccccgaaatccagtacacttccaactacaacaagtctgttaatgtggactttactgtggacactaatggtgtgtattcagagcctcgccccattggcacaagatacctgactcgtaatctgtaa

SEQ ID NO: 3233 - DNA, 2208 bp, synthetic construct
  misc_feature 1..2208: note = source = /note="Description of Artificial Sequence: Synthetic polynucleotide"
  source 1..2208: mol_type = other DNA
atggctgccgatggttatcttccagattggctcgaggacactctctctgaaggaataagacagtggtggaagctcaaacctggcccaccaccaccaaagcccgcagagcggcatcaggacgacagcaggggtcttgtgcttcctgggtacaagtacctcggacccttcaacggactcgacaagggagagccggtcaacgaggcagacgccgcggccctcgagcacgacaaggcctacgaccggcagctcgacagcggagacaacccgtacctcaagtacaaccacgccgacgcggagtttcaggagcgtcttaaagaagatacgtcttttgggggcaacctcggacgagcagtcttccaggcgaaaaagagggttcttgaacctctgggcctggttgaggaacctgttaagacggctccgggaaaaaagaggccggtagagcattctcctgcggagccagactcctcctcgggaaccggaaaggcgggccagcagcctgcgagaaagagattgaatttcggtcagactggagacgcagactccgtacctgacccccagcctctcggacagccaccagcagccccctctggtctgggaactaatacgatggctacaggcagtggcgcaccaatggcagacaataacgagggcgccgacggagtgggtaattcctcgggaaattggcattgcgattccacatggatgggcgacagagtcatcaccaccagcacccgaacctgggccctgcccacctacaacaaccacctctacaagcaaatctccagccaatctggagcctcaaacgacaaccactactttggctacagcaccccttgggggtattttgacttcaacagattccactgtcacttctccccacgtgactggcaaagactcatcaacaacaactggggattccgacccaagagactcaacttcaagctctttaacattcaagtcaaagaggtcacgcagaatgacggtacgacgacgattgccaataaccttaccagcacggttcaagtctttactgactcggagtaccagctcccgtacgtcctcggctcggcgcatcaaggatgcctcccgccgtttccagcagacgtcttcatggtgccacagtatggatacctcaccctgaacaacgggagtcaggcggtaggacgctcttccttttactgcctggagtactttccttctcagatgctgcgtaccggaaacaactttaccttcagctacacctttgaggacgttcctttccacagcagctacgctcacagccagagtttggaccggctgatgaatcctctgatcgaccagtatctgtattacttgagcaaaacaaacgctccaagcggaaccaccacgatgtccaggcttcagttttctcaggccggagcgagtgacattcgggaccagtctaggaactggcttcctggaccctgttaccgccagcagcgagtatcaaaaacagctgcggataacaacaacagtgattattcgtggactggagctaccaagtaccacctcaatggaagagactctctggtgaatccgggcccagctatggccagccacaaggacgatgaagaaaaatattttcctcagagcggggttctcatctttggaaaacaagactcgggaaaaactaatgtggacattgaaaaggtcatgattacagacgaagaggaaatcaggaccaccaatcccgtggctacggagcagtatggttctgtatctaccaacctccagagcggcaacacacaggcagccaccacagatgtcaacacacaaggcgctcttccaggcatggtctggcaggacagagacgtgtacctgcaaggacccatctgggcaaagattcctcacacggacggacactttcacccttctcccctcatgggaggatttggactcaaacaccctcctccgcaaatcctcatcaagaatacccccgtacctgcgaatccttcgaccacattcagcgcggcaaagtttgcttctttcatcacacagtactctacggggcaggtcagcgtggagattgagtgggagctgcagaaggagaacagcaaacgctggaaccccgaaatccagtacacttccaactacaacaagtctgttaatgtggactttactgtggacactaatggtgtgtattcagagcctcgccccattggcacaagatacctgactcgtaatctgtaa

SEQ ID NO: 3234 - DNA, 2208 bp, synthetic construct
  misc_feature 1..2208: note = source = /note="Description of Artificial Sequence: Synthetic polynucleotide"
  source 1..2208: mol_type = other DNA
atggctgccgatggttatcttccagattggctcgaggacactctctctgaaggaataagacagtggtggaagctcaaacctggcccaccaccaccaaagcccgcagagcggcatcaggacgacagcaggggtcttgtgcttcctgggtacaagtacctcggacccttcaacggactcgacaagggagagccggtcaacgaggcagacgccgcggccctcgagcacgacaaggcctacgaccggcagctcgacagcggagacaacccgtacctcaagtacaaccacgccgacgcggagtttcaggagcgtcttaaagaagatacgtcttttgggggcaacctcggacgagcagtcttccaggcgaaaaagagggttcttgaacctctgggcctggttgaggaacctgttaagacggctccgggaaaaaagaggccggtagagcattctcctgcggagccagactcctcctcgggaaccggaaaggcgggccagcagcctgcgagaaagagattgaatttcggtcagactggagacgcagactccgtacctgacccccagcctctcggacagccaccagcagccccctctggtctgggaactaatacgatggctacaggcagtggcgcaccaatggcagacaataacgagggcgccgacggagtgggtaattcctcgggaaattggcattgcgattccacatggatgggcgacagagtcatcaccaccagcacccgaacctgggccctgcccacctacaacaaccacctctacaagcaaatctccagccaatctggagcctcaaacgacaaccactactttggctacagcaccccttgggggtattttgacttcaacagattccactgtcacttctccccacgtgactggcaaagactcatcaacaacaactggggattccgacccaagagactcaacttcaagctctttaacattcaagtcaaagaggtcacgcagaatgacggtacgacgacgattgccaataaccttaccagcacggttcaagtctttactgactcggagtaccagctcccgtacgtcctcggctcggcgcatcaaggatgcctcccgccgtttccagcagacgtcttcatggtgccacagtatggatacctcaccctgaacaacgggagtcaggcggtaggacgctcttccttttactgcctggagtactttccttctcagatgctgcgtaccggaaacaactttaccttcagctacacctttgaggacgttcctttccacagcagctacgctcacagccagagtttggaccggctgatgaatcctctgatcgaccagtatctgtattacttgagcaaaacaaacgctccaagcggaaccaccacgatgtccaggcttcagttttctcaggccggagcgagtgacattcgggaccagtctaggaactggcttcctggaccctgttaccgccagcagcgagtatcaaaaacagctgcggataacaacaacagtgattattcgtggactggagctaccaagtaccacctcaatggaagagactctctggtgaatccgggcccagctatggccagccacaaggacgatgaagagaaatattttcctcagagcggggttctcatctttggaaaacaagactcgggaaaaactaatgtggacattgaaaaggtcatgattacagacgaagaggaaatcaggaccaccaatcccgtggctacggagcagtatggttctgtatctaccaacctccagagcggcaacacacaggcagccaccacagatgtcaacacacaaggcgttcttccaggcatggtctggcaggacagagacgtgtacctgcaaggacccatctgggcaaagattcctcacacggacggacactttcacccttctcccctcatgggaggatttggactcaaacaccctcctccgcaaatcctcatcaagaatacccccgtacctgcgaatccttcgaccacattcagcgcggcaaagcttgcttctttcatcacacagtactctacggggcaggtcagcgtggaggttgagtgggagctgcagaaggagaacagcaaacgctggaaccccgaaatccagtacacttccaactacaacaagtctgttaatgtggactttactgtggacactaatggtgtgtattcagagcctcgccccattggcacaagatacctgactcgtaatctgtaa

SEQ ID NO: 3235 - DNA, 2208 bp, synthetic construct
  misc_feature 1..2208: note = source = /note="Description of Artificial Sequence: Synthetic polynucleotide"
  source 1..2208: mol_type = other DNA
atggctgccgatggttatcttccagattggctcgaggacactctctctgaaggaataagacagtggtggaagctcaaacctggcccaccaccaccaaagcccgcagagcggcatcaggacgacagcaggggtcttgtgcttcctgggtacaagtacctcggacccttcaacggactcgacaagggagagccggtcaacgaggcagacgtcgcggccctcgagcacgacaaggcctacgaccggcagctcgacagcggagacaacccgtacctcaagtacaaccacgccgacgcggagtttcaggagcgtcttaaagaagatacgtcttttgggggcaacctcggacgagcagtcttccaggcgaaaaagagggttcttgaacctctgggcctggttgaggaacctgttaagacggctccgggaaaaaagaggccggtagagcattctcctgcggagccagactcctcctcgggaaccggaaaggcgggccagcagcctgcgagaaagagattgaatttcggtcagactggagacgcagactccgtacctgacccccagcctctcggacagccaccagcagccccctctggtctgggaactaatacgatggctacaggcagtggcgcaccaatggcagacaataacgagggcgccgacggagtgggtaattcctcgggaaattggcattgcgattccacatggatgggcgacagagtcatcaccaccagcacccgaacctgggccctgcccacctacaacaaccacctctacaagcaaatctccagccaatctggagcctcaaacgacaaccactactttggctacagcaccccttgggggtattttgacttcaacagattccactgtcacttctccccacgtgactggcaaagactcatcaacaacaactggggattccgacccaagagactcaacttcaagctctttaacattcaagtcaaagaggtcacgcagaatgacggtacgacgacgattgccaataaccttaccagcacggttcaagtctttactgactcggagtaccagctcccgtacgtcctcggctcggcgcatcaaggatgcctcccgccgtttccagcagacgtcttcatggtgccacagtatggatacctcaccctgaacagcgggagtcaggcggtaggacgctcttccttttactgcctggagtactttccttctcagatgctgcgtaccggaaacaactttaccttcagctacacctttgaggacgttcctttccacagcagctacgctcacagccagagtttggaccggctgatgaatcctctgatcgaccagtatctgtattacttgagcaaaacaaacgctccaagcggaaccaccacgatgtccaggcttcagttttctcaggccggagcgagtgacattcgggaccagtctaggaactggcttcctggaccctgttaccgccagcagcgagtatcaaaaacagctgcggataacaacaacagtgattattcgtggactggagctaccaagtaccacctcaatggaagagactctctggtgaatccgggcccagctatggccagccacaaggacgatgaagaaaaatattttcctcagagcggggttctcatctttggaaaacaagactcgggaaaaactaatgtggacattgaaaaggtcatgattacagacgaagaggaaatcaggaccaccaatcccgtggctacggagcagtatggttctgtatctaccaacctccagagcggcaacacacaggcagccaccacagatgtcaacacacaaggcgttcttccaggcatggtctggcaggacagagacgtgtacctgcaaggacccatctgggcaaagattcctcacacggacggacactttcacccttctcccctcatgggaggatttggactcaaacaccctcctccgcaaatcctcatcaagaatacccccgtacctgcgaatccttcgaccacattcagcgcggcaaagtttgcttctttcatcacacagtactctacggggcaggtcagcgtggagattgagtgggagctgcagaaggagaacagcaaacgctggaaccccgaaatccagtacacttccaactacaacaagtctgttaatgtggactttactgtggacactaatggtgtgtattcagagcctcgccccattggcacaagatacctgactcgtaatctgtaa

SEQ ID NO: 3236 - DNA, 2208 bp, synthetic construct
  misc_feature 1..2208: note = source = /note="Description of Artificial Sequence: Synthetic polynucleotide"
  source 1..2208: mol_type = other DNA
atggctgccgatggttatcttccagattggctcgaggacactctctctgaaggaataagacagtggtggaagctcaaacctggcccaccaccaccaaagcccgcagagcggcatcaggacgacagcaggggtcttgtgcttcctgggtacaagtacctcggacccttcaacggactcgacaagggagagccggtcaacgaggcagacgtcgcggccctcgagcacgacaaggcctacgaccggcagctcgacagcggagacaacccgtacctcaagtacaaccacgccgacgcggagtttcaggagcgtcttaaagaagatacgtcttttgggggcaacctcggacgagcagtcttccaggcgaaaaagagggttcttgaacctctgggcctggttgaggaacctgttaagacggctccgggaaaaaagaggccggtagagcattctcctgcggagccagactcctcctcgggaaccggaaaggcgggccagcagcctgcgagaaagagattgaatttcggtcagactggaggcgcagactccgtacctgacccccagcctctcggacagccaccagcagccccctctggtctgggaactaatacgatggctacaggcagtggcgcaccaatggcagacaataacgagggcgccgacggagtgggtaattcctcgggaaattggcattgcgattccacatggatgggcgacagagtcatcaccaccagcacccgaacctgggccctgcccacctacaacaaccacctctacaagcaaatctccagccaatctggagcctcaaacgacaaccactactttggctacagcaccccttgggggtattttgacttcaacagattccactgtcacttctccccacgtgactggcaaagactcatcaacaacaactggggattccgacccaagagactcaacttcaagctctttaacattcaagtcaaagaggtcacgcagaatgacggtacgacgacgattgccaataaccttaccagcacggttcaagtctttactgactcggagtaccagctcccgtacgtcctcggctcggcgcatcaaggatgcctcccgccgtttccagcagacgtcttcatggtgccacagtatggatacctcaccctgaacaacgggagtcaggcggtaggacgctcttccttttactgcctggagtactttccttctcagatgctgcgtaccggaaacaactttaccttcagctacacctttgaggacgttcctttccacagcagctacgctcacagccagagtttggaccggctgatgaatcctctgatcgaccagtatctgtattacttgagcaaaacaaacgctccaagcggaaccaccacgatgtccaggcttcagttttctcaggccggagcgagtgacattcgggaccagtctaggaactggcttcctggaccctgttaccgccagcagcgagtatcaaaaacagctgcggataacaacaacagtgattattcgtggactggagctaccaagtaccacctcaatggaagagactctctggtgaatccgggcccagctatggccagccacaaggacgatgaagaaaaatattttcctcagagcggggttctcatctttggaaaacaagactcgggaaaaactaatgtggacattgaaaaggtcatgattacagacgaagaggaaatcaggaccaccaatcccgtggctacggagcagtatggttctgtatctaccaacctccagagcggcaacacacaggcagccaccacagatgtcaacacacaaggcgttcttccaggcatggtctggcaggacagagacgtgtacctgcaaggacccatctgggcaaagattcctcacacggacggacactttcacccttctcccctcatgggaggatttggactcaaacaccctcctccgcaaatcctcatcaagaatacccccgtacctgcgaatccttcgaccacattcagcgcggcaaagtttgcttctttcatcacacagtactctacggggcaggtcagcgtggagattgagtgggagctgcagaaggagaacagcaaacgctggaaccccgaaatccagtacacttccaactacaacaagtctgttaatgtggactttactgtggacactaatggtgtgtattcagagcctcgccccattggcacaagatacctgactcgtaatctgtaa

SEQ ID NO: 3237 - DNA, 2208 bp, synthetic construct
  misc_feature 1..2208: note = source = /note="Description of Artificial Sequence: Synthetic polynucleotide"
  source 1..2208: mol_type = other DNA
atggctgccgatggttatcttccagattggctcgaggacactctctctgaaggaataagacagtggtggaagctcaaacctggcccaccaccaccaaagcccgcagagcggcatcaggacgacagcaggggtcttgtgcttcctgggtacaagtacctcggacccttcaacggactcgacaagggagagccggtcaacgaggcagacgccgcggccctcgagcacgacaaggcctacgaccggcagctcgacagcggagacaacccgtacctcaagtacaaccacgccgacgcggagtttcaggagcgtcttaaagaagatacgtcttttgggggcaacctcggacgagcagtcttccaggcgaaaaagagggttcttgaacctctgggcctggttgaggaacctgttaagacggctccgggaaaaaagaggccggtagagcattctcctgcggagccagactcctcctcgggaaccggaaaggcgggccagcagcctgcgagaaagagattgaatttcggtcagactggagacgcagactccgtacctgacccccagcctctcggacagccaccagcagccccctctggtctgggaactaatacgatggctacaggcagtggcgcaccaatggcagacaataacgagggcgccgacggagtgggtaattcctcgggaaattggcattgcgattccacatggatgggcgacagagtcatcaccaccagcacccgaacctgggccctgcccacctacaacaaccacctctacaagcaaatctccagccaatctggagcctcaaacgacaaccactactttggctacagcaccccttgggggtattttgacttcaacagattccactgtcacttctccccacgtgactggcaaagactcatcaacaacaactggggattccgacccaagagactcaacttcaagctctttaacattcaagtcaaagaggtcacgcagaatgacggtacgacgacgattgccaataaccttaccagcacggttcaagtctttactgactcggagtaccagctcccgtacgccctcggctcggcgcatcaaggatgcctcccgccgtttccagcagacgtcttcatggtgccacagtatggatacctcaccctgaacaacgggagtcaggcggtaggacgctcttccttttactgcctggagtactttccttctcagatgctgcgtaccggaaacaactttaccttcagctacacctttgaggacgttcctttccacagcagctacgctcacagccagagtttggaccggctgatgaatcctctgatcgaccagtatctgtattacttgagcaaaacaaacgctccaagcggaaccaccacgatgtccaggcttcagttttctcaggccggagcgagtgacattcgggaccagtctaggaactggcttcctggaccctgttaccgccagcagcgagtatcaaaaacagctgcggataacaacaacagtgattattcgtggactggagctaccaagtaccacctcaatggaagagactctctggtgaatccgggcccagctatggccagccacaaggacgatgaagaaaaatattttcctcagagcggggttctcatctttggaaaacaagactcgggaaaaaccaatgtggacattgaaaaggtcatgattacagacgaagaggaaatcaggaccaccaatcccgtggctacggagcagtatggttctgtatctaccaacctccagagcggcaacacacaggcagccaccacagatgtcaacacacaaggcgttcttccaggcatggtctggcaggacagagacgtgtacctgcaaggacccatctgggcaaagattcctcacacggacggacactttcacccttctcccctcatgggaggatttggactcaaacaccctcctccgcaaatcctcatcaagaatacccccgtacctgcgaatccttcgaccacattcagcgcggcaaagtttgcttctttcatcacacagtactctacggggcaggtcagcgtggagattgagtgggagctgcagaaggaggacagcaaacgctggaaccccgaaatccagtacacttccaactacaacaagtctgttaatgtggactttactgtggacactaatggtgtgtattcagagcctcgccccattggcacaagatacctgactcgtaatctgtaa

SEQ ID NO: 3238 - DNA, 2208 bp, synthetic construct
  misc_feature 1..2208: note = source = /note="Description of Artificial Sequence: Synthetic polynucleotide"
  source 1..2208: mol_type = other DNA
atggctgccgatggttatcttccagattggctcgaggacactctctctgaaggaataagacagtggtggaagctcaaacctggcccaccaccaccaaagcccgcagagcggcatcaggacgacagcaggggtcttgtgcttcctgggtacaagtacctcggacccttcaacggactcgacaagggagagccggtcaacgaggcagacgccgcggccctcgagcacgacaaggcctacgaccggcagctcgacagcggagacaacccgtacctcaagtacaaccacgccgacgcggagtttcaggagcgtcttaaagaagatacgtcttttgggggcaacctcggacgagcagtcttccaggcgaaaaagagggttcttgaacctctgggcctggttgaggaacctgttaagacggctccgggaaaaaagaggccggtagagcattctcctgcggagccagactcctcctcgggaaccggaaaggcgggccagcagcctgcgagaaagagattgaatttcggtcagactggagacgcagactccgtacctgacccccagcctctcggacagccaccagcagccccctctggtctgggaactaatacgatggctacaggcagtggcgcaccaatggcagacaataacgagggcgccgacggagtgggtaattcctcgggaaattggcattgcgattccacatggatgggcgacagagtcatcaccaccagcacccgaacctgggccctgcccacctacaacaaccacctctacaagcaaatctccagccaatctggagcctcaaacgacaaccactactttggctacagcaccccttgggggtattttgacttcaacagattccactgtcacttctccccacgtgactggcaaagactcatcaacaacaactggggattccgacccaagagactcaacttcaagctctttaacattcaagtcaaagaggtcacgcagaatgacggtacgacgacgattgccaataaccttaccagcacggttcaagtctttactgactcggagtaccagctcccgtacgtcctcggctcggcgcatcaaggatgcctcccgccgtttccagcagacgtcttcatggtgccacagtatggatacctcaccctgaacaacgggagtcaggcggtaggacgctcttccttttactgcctggagtactttccttctcagatgctgcgtaccggaaacaactttaccttcagctacacctttgaggacgttcctttccacagcagctacgctcacagccagagtttggaccggctgatgaatcctctgatcgaccagtatctgtattacttgagcaaaacaaacgctccaagcggaaccaccacgatgtccaggcttcagttttctcaggccggagcgagtgacattcgggaccagtctaggaactggcttcctggaccctgttaccgccagcagcgagtatcaaaaacagctgcggataacaacaacagtgattattcgtggactggagctaccaagtaccacctcaatggaagagactctctggtgaatccgggcccagctatggccagccacaaggacgatgaagaaaaatattttcctcagagcggggttctcatctttggaaaacaagactcgggaaaaactaatgtggacattgaaaaggtcatgattacagacgaagaggaaatcaggaccaccaatcccgtggctacggagcagtatggttctgtatctaccaacctccagagcggcaacacacaggcagccaccacagatgtcaacacacaaggcgttcttccaggcatggtctggcaggacagagacgtgtacctgcaaggacccatctgggcaaagattcctcacacggacggacactttcacccttctcccctcatgggaggatttggactcaaacaccctcctccgcaaatcctcatcaagaatacccccgtacctgcgaatccttcgaccacatccagcgcggcaaagtttgcttctttcatcacacagtactctacggggcaggtcagcgtggagattgagtgggagctgcagaaggagaacagcaaacgctggaaccccgaaatccagtacacttccaactacaacaagtctgttaatgtggactttactgtggacactaatggtgtgtattcagagcctcgccccattggcacaagatacctgactcgtaatctgtaa

SEQ ID NO: 3239 - DNA, 2208 bp, synthetic construct
  misc_feature 1..2208: note = source = /note="Description of Artificial Sequence: Synthetic polynucleotide"
  source 1..2208: mol_type = other DNA
atggctgccgatggttatcttccagattggctcgaggacactctctctgaaggaataagacagtggtggaagctcaaacctggcccaccaccactaaagcccgcagagcggcatcaggacgacagcaggggtcttgtgcttcctgggtacaagtacctcggacccttcaacggactcgacaagggagagccggtcaacgaggcagacgccgcggccctcgagcacgacaaggcctacgaccggcagctcgacagcggagacaacccgtacctcaagtacaaccacgccgacgcggagtttcaggagcgtcttaaagaagatacgtcttttgggggcaacctcggacgagcagtcttccaggcgaaaaagagggttcttgaacctctgggcctggttgaggaacctgttaagacggctccgggaaaaaagaggccggtagagcattctcctgcggagccagactcctcctcgggaaccggaaaggcgggccagcagcctgcgagaaagagattgaatttcggtcagactggagacgcagactccgtacctgacccccagcctctcggacagccaccagcagccccctctggtctgggaactaatacgatggctacaggcagtggcgcaccaatggcagacaataacgagggcgccgacggagtgggtaattcctcgggaaattggcattgcgattccacatggatgggcgacagagtcatcaccaccagcacccgaacctgggccctgcccacctacaacaaccacctctacaagcaaatctccagccaatctggagcctcaaacgacaaccactactttggctacagcaccccttgggggtattttgacttcaacagattccactgtcacttctccccacgtgactggcaaagactcatcaacaacaactggggattccgacccaagagactcaacttcaagctctttaacattcaagtcaaagaggtcacgcagaatgacggtacgacgacgattgccaataaccttaccagcacggttcaagtctttactgactcggagtaccagctcccgtacgtcctcggctcggcgcatcaaggatgcctcccgccgtttccagcagacgtcttcatggtgccacagtatggatacctcaccctgaacaacgggagtcaggcggtaggacgctcttccttttactgcctggagtactttccttctcagatgctgcgtaccggaaacaactttaccttcagctacacctttgaggacgttcctttccacagcagctacgctcacagccagagtttggaccggctgatgaatcctctgatcgaccagtatctgtattacttgagcaaaacaaacgctccaagcggaaccaccacgatgtccaggcttcagttttctcaggccggagcgagtgacattcgggaccagtctaggaactggcttcctggaccctgttaccgccagcagcgagtatcaaaaacagctgcggataacaacaacagtgattattcgtggactggagctaccaagtaccacctcaatggaagagactctctggtgaatccgggcccagctatggccagccacaaggacgatgaagaaaaatattttcctcagagcggggttctcatctttggaaaacaagactcgggaaaaactaatgtggacattgaaaaggtcatgattacagacgaagaggaaatcaggaccaccaatcccgtggctacggagcagtatggttctgtatctaccaacctccagagcggcaacacacaggcagccaccacagatgtcaacacacaaggcgttcttccaggcatggtctggcaggacagagacgtgtacctgcaaggacccatctgggcaaagattcctcacacggacggacactttcacccttctcccctcatgggaggatttggactcaaacaccctcctccgccaatcctcatcaagaatacccccgtacctgcgaatccttcgaccacattcagcgcggcaaagtttgcttctttcatcacacagtactctacggggcaggtcagcgtggagattgagtgggagctgcagaaggagaacagcaaacgctggaaccccgaaatccagtacacttccaactacaacaagtctgttaatgtggactttactgtggacactaatggtgtgtattcagagcctcgccccattggcacaagatacctgactcgtaatctgtaa

SEQ ID NO: 3240 - DNA, 2208 bp, synthetic construct
  misc_feature 1..2208: note = source = /note="Description of Artificial Sequence: Synthetic polynucleotide"
  source 1..2208: mol_type = other DNA
atggctgccgatggttatcttccagattggctcgaggacactctctctgaaggaataagacagtggtggaagctcaaacctggcccaccaccaccaaagcccgcagagcggcatcaggacgacagcaggggtcttgtgcttcctgggtacaagtacctcggacccttcaacggactcgacaagggagagccggtcaacgaggcagacgccgcggccctcgagcacgacaaggcctacgaccggcagctcgacagcggagacaacccgtacctcaagtacaaccacgccgacgcggagtttcaggagcgtcttaaagaagatacgtcttttgggggcaacctcggacgagcagtcttccaggcgaaaaagagggttcttgaacctctgggcctggttgaggaacctgttaagacggctccgggaaaaaagaggccggtagagcattctcctgcggagccagactcctcctcgggaaccggaaaggcgggccagcagcctgcgagaaagagattgaatttcggtcagactggagacgcagactccgtacctgacccccagcctctcggacagccaccagcagccccctctggtctgggaactaatacgatggctacaggcagtggcgcaccaatggcagacaataacgagggcgccgacggagtgggtaattcctcgggaaattggcattgcgattccacatggatgggcgacagagtcatcaccaccagcacccgaacctgggccctgcccacctacaacaaccacctctacaagcaaatctccagccaatctggagcctcaaacgacaaccactactttggctacagcaccccttgggggtattttgacttcaacagattccactgtcacttctccccacgtgactggcaaagactcatcaacaacaactggggattccgacccaagagactcaacttcaagctctttaacattcaagtcaaagaggtcacgcagaatgacggtacgacgacgattgccaataaccttaccagcacggttcaagtctttactgactcggagtaccagctcccgtacgtcctcggctcggcgcatcaaggatgcctcccgccgtttccagcagacgtcttcatggtgccacagtatggatacctcaccctgaacaacgggagtcaggcggtaggacgctcttccttttactgcctggagtactttccttctcagatgctgcgtaccggaaacaactttaccttcagctacacctttgaggacgttcctttccacagcagctacgctcacagccagagtttggaccggctgatgaatcctctgatcgaccagtatctgtattacttgagcaaaacaaacgctccaagcggaaccaccacgatgtccaggcttcagttttctcaggccggagcgagtgacattcgggaccagtctaggaactggcttcctggaccctgttaccgccagcagcgagtatcaaaaacagctgcggataacaacaacagtgattattcgtggactggagctaccaagtaccacctcaatggaagagactctctggtgaatccgggcccagctatggccagccacaaggacgatgaagaaaaatattttcctcagagcggggttctcatctttggaaaacaagactcgggaaaaactaatgtggacattgaaaaggtcatgattacagacgaagaggaaatcagggccaccaatcccgtggctacggagcagtatggttctgtatctaccaacctccagagcggcaacacacaggcagccaccacagatgtcaacacacaaggcgttcttccaggcatggtctggcaggacagagacgtgtacctgcaaggacccatctgggcaaagattcctcacacggacggacactttcacccttctcccctcatgggaggatttggactcaaacaccctcctccgcaaatcctcatcaagaatacccccgtacctgcgaatccttcgaccacattcagcgcggcaaagtttgcttctttcatcacacagtactctacggggcaggtcagcgtggagattgagtgggagctgcagaaggagaacagcaaacgctggaaccccgaaatccagtacacttccaactacaacaagtctgttaatgtggactttactgtggacactaatggtgtgtattcagagcctcgccccattggcacaagatacctgactcgtaatctgtaa

SEQ ID NO: 3241 - DNA, 2208 bp, synthetic construct
  misc_feature 1..2208: note = source = /note="Description of Artificial Sequence: Synthetic polynucleotide"
  source 1..2208: mol_type = other DNA
atggctgccgatggttatcttccagattggctcgaggacactctctctgaaggaataagacagtggtggaagctcaaacctggcccaccaccaccaaagcccgcagagcggcatcaggacgacagcaggggtcttgtgcttcctgggtacaagtacctcggacccttcaacggactcgacaagggagagccggtcaacgaggcagacgccgcggccctcgagcacgacaaggcctacgaccggcagctcgacagcggagacaacccgtacctcaagtacaaccacgccgacgcggagtttcaggagcgtcttaaagaagatacgtcttttgggggcaacctcggacgagcagtcttccaggcgaaaaagagggttcttgaacctctgggcctggttgaggaacctgttaagacggctccgggaaaaaagaggccggtagagcattctcctgcggagccagactcctcctcgggaaccggaaaggcgggccagcagcctgcgagaaagagattgaatttcggtcagactggagacgcagactccgtacctgacccccagcctctcggacagccaccagcagccccctctggtctgggaactaatacgatggctacaggcagtggcgcaccaatggcagacaataacgagggcgccgacggagtgggtaattcctcgggaaattggcattgcgattccacatggatgggcgacagagtcatcaccaccagcacccgaacctgggccctgcccacctacaacaaccacctctacaagcaaatctccagccaatctggagcctcaaacgacaaccactactttggctacagcaccccttgggggtattttgacttcaacagattccactgtcacttctccccacgtgactggcaaagactcatcagcaacaactggggattccgacccaagagactcaacttcaagctctttaacattcaagtcaaagaggtcacgcagaatgacggtacgacgacgattgccaataaccttaccagcacggttcaagtctttactgactcggagtaccagctcccgtacgtcctcggctcggcgcatcaaggatgcctcccgccgtttccagcagacgtcttcatggtgccacagtatggatacctcaccctgaacaacgggagtcaggcggtaggacgctcttccttttactgcctggagtactttccttctcagatgctgcgtaccggaaacaactttaccttcagctacacctttgaggacgttcctttccacagcagctacgctcacagccagagtttggaccggctgatgaatcctctgatcgaccagtatctgtattacttgagcaaaacaaacgctccaagcggaaccaccacgatgtccaggcttcagttttctcaggccggagcgagtgacattcgggaccagtctaggaactggcttcctggaccctgttaccgccagcagcgagtatcaaaaacagctgcggataacaacaacagtgattattcgtggactggagctaccaagtaccacctcaatggaagagactctctggtgaatccgggcccagctatggccagccacaaggacgatgaagaaaaatattttcctcagagcggggttctcatctttggaaaacaagactcgggaaaaactaatgtggacattgaaaaggtcatgattacagacgaagaggaaatcaggaccaccaatcccgtggctacggagcagtatggttctgtatctaccaacctccagagcggcaacacacaggcagccaccacagatgtcaacacacaaggcgttcttccaggcatggtctggcaggacagagacgtgtacctgcaaggacccatctgggcaaagattcctcacacggacggacactttcacccttctcccctcatgggaggatttggactcaaacaccctcctccgcaaatcctcatcaagaatacccccgtacctgcgaatccttcgaccacattcagcgcggcaaagtttgcttctttcatcacacagtactctacggggcaggtcagcgtggagattgagtgggagccgcagaaggagaacagcaaacgctggaaccccgaaatccagtacacttccaactacaacaagtctgttaatgtggactttactgtggacactaatggtgtgtattcagagcctcgccccattggcacaagatacctgactcgtaatctgtaa

SEQ ID NO: 3242 - DNA, 2208 bp, synthetic construct
  misc_feature 1..2208: note = source = /note="Description of Artificial Sequence: Synthetic polynucleotide"
  source 1..2208: mol_type = other DNA
atggctgccgatggttatcttccagattggctcgaggacactctctctgaaggaataagacagtggtggaagctcaaacctggcccaccaccaccaaagcccgcagagcggcatcaggacgacagcaggggtcttgtgcttcctgggtacaagtacctcggacccttcaacggactcgacaagggagagccggtcaacgaggcagacgccgcggccctcgagcacgacaaggcctacgaccggcagctcgacagcggagacaacccgtacctcaagtacaaccacgccgacgcggagtttcaggagcgtcttaaagaagatacgtcttttgggggcaacctcggacgagcagtcttccaggcgaaaaagggggttcttgaacctctgggcctggttgaggaacctgttaagacggctccgggaaaaaagaggccggtagagcattctcctgcggagccagactcctcctcgggaaccggaaaggcgggccagcagcctgcgagaaagagattgaatttcggtcagactggagacgcagactccgtacctgacccccagcctctcggacagccaccagcagccccctctggtctgggaactaatacgatggctacaggcagtggcgcaccaatggcagacaataacgagggcgccgacggagtgggtaattcctcgggaaattggcattgcgattccacatggatgggcgacagagtcatcaccaccagcacccgaacctgggccctgcccacctacaacaaccacctctacaagcaaatctccagccaatctggagcctcaaacgacaaccactactttggctacagcaccccttgggggtattttgacttcaacagattccactgtcacttctccccacgtgactggcaaagactcatcaacaacaactggggattccgacccaagagactcaacttcaagctctttaacattcaagtcaaagaggtcacgcagaatgacggtacgacgacgattgccaataaccttaccagcacggttcaagtctttactgactcggagtaccagctcccgtacgtcctcggctcggcgcatcaaggatgcctcccgccgtttccagcagacgtcttcatggtgccacagtatggatacctcaccctgaacaacgggagtcaggcggtaggacgctcttccttttactgcctggagtactttccttctcagatgctgcgtaccggaaacaactttaccttcagctacacctttgaggacgttcctttccacagcagctacgctcacagccagagtttggaccggctgatgaatcctctgatcgaccagtatctgtattacttgagcaaaacaaacgctccaagcggaaccaccacgatgtccaggcttcagttttctcaggccggagcgagtgacattcgggaccagtctaggaactggcttcctggaccctgttaccgccagcagcgagtatcaaaaacagctgcggataacaacaacagtgattattcgtggactggagctaccaagtaccacctcaatggaagagactctctggtgaatccgggcccagctatggccagccacaaggacgatgaagaaaaatattttcctcagagcggggttctcatctttggaaaacaagactcgggaaaaactaatgtggacattgaaaaggtcatgattacagacgaagaggaaatcaggaccaccaatcccgtggctacggagcagtatggttctgtatctaccaacctccagagcggcaacacacaggcagccaccacagatgtcaacacacaaggcgttcttccaggcatggtctggcaggacagagacgtgtacctgcaaggacccatctgggcaaagattcctcacacggacggacactttcacccttctcccctcatgggaggatttggactcaaacaccctcctccgcaaatcctcatcaagaatacccccgtacctgcgaatccttcgaccacattcagcgcggcaaagtttgcttctttcatcacacagtactctacggggcaggtcagcgtggagattgagtgggagctgcagaaggagaacagcaaacgctggaaccccgaaatccagtacacttccaactacaacaagtctgttaatgtggactttactgtggacactaatggtgtgtattcagagcctcgccccattggcacaagatacctgactcgtaatctgtaa

SEQ ID NO: 3243 - DNA, 2208 bp, synthetic construct
  misc_feature 1..2208: note = source = /note="Description of Artificial Sequence: Synthetic polynucleotide"
  source 1..2208: mol_type = other DNA
atggctgccgatggttatcttccagattggctcgaggacactctctctgaaggaataagacagtggtggaagctcaaacctggcccaccaccaccaaagcccgcagagcggcatcaggacgacagcaggggtcttgtgcttcctgggtacaagtacctcggacccttcaacggactcgacaagggagagccggtcaacgaggcagacgccgcggccctcgagcacgacaaggcctacgaccggcagctcgacagcggagacaacccgtacctcaagtacaaccacgccgacgcggagtttcaggagcgtcttaaagaagatacgtcttttgggggcaacctcggacgagcagtcttccaggcgaaaaagagggttcttgaacctctgggcctggttgaggaacctgttaagacggctccgggaaaaaagaggccggtagagcattctcctgcggagccagactcctcctcgggaaccggaaaggcgggccagcagcctgcgagaaagagattgaatttcggtcagactggagacgcggactccgtacctgacccccagcctctcggacagccaccagcagccccctctggtctgggaactaatacgatggctacaggcagtggcgcaccaatggcagacaataacgagggcgccgacggagtgggtaattcctcgggaaattggcattgcgattccacatggatgggcgacagagtcatcaccaccagcacccgaacctgggccctgcccacctacaacaaccacctctacaagcaaatctccagccaatctggagcctcaaacgacaaccactactttggctacagcaccccttgggggtattttgacttcaacagattccactgtcacttctccccacgtgactggcaaagactcatcaacaacaactggggattccgacccaagagactcaacttcaagctctttaacattcaagtcaaagaggtcacgcagaatgacggtacgacgacgattgccaataaccttaccagcacggttcaagtctttactgactcggagtaccagctcccgtacgtcctcggctcggcgcatcaaggatgcctcccgccgtttccagcagacgtcttcatggtgccacagtatggatacctcaccctgaacaacgggagtcaggcggtaggacgctcttccttttactgcctggagtactttccttctcagatgctgcgtaccggaaacaactttaccttcagctacacctttgaggacgttcctttccacagcagctacgctcacagccagagtttggaccggctgatgaatcctctgatcgaccagtatctgtattacttgagcagaacaaacgctccaagcggaaccaccacgatgtccaggcttcagttttctcaggccggagcgagtgacattcgggaccagtctaggaactggcttcctggaccctgttaccgccagcagcgagtatcaaaaacagctgcggataacaacaacagtgattattcgtggactggagctaccaagtaccacctcaatggaagagactctctggtgaatccgggcccagctatggccagccacaaggacgatgaagaaaaatattttcctcagagcggggttctcatctttggaaaacaagactcgggaaaaactaatgtggacattgaaaaggtcatgattacagacgaagaggaaatcaggaccaccaatcccgtggctacggagcagtatggttctgtatctaccaacctccagagcggcaacacacaggcagccaccacagatgtcaacacacaaggcgttcttccaggcatggtctggcaggacagagacgtgtacctgcaaggacccatctgggcaaagattcctcacacggacggacactttcacccttctcccctcatgggaggatttggactcaaacaccctcctccgcaaatcctcatcaagaatacccccgtacctgcgaatccttcgaccacattcagcgcggcaaagtttgcttctttcatcacacagtactctacggggcaggtcagcgtggagattgagtgggagctgcagaaggagaacagcaaacgctggaaccccgaaatccagtacacttccaactacaacaagtctgttaatgtggactttactgtggacactaatggtgtgtattcagagcctcgccccattggcacaagatacctgactcgtaatctgtaa

SEQ ID NO: 3244 - DNA, 2208 bp, synthetic construct
  misc_feature 1..2208: note = source = /note="Description of Artificial Sequence: Synthetic polynucleotide"
  source 1..2208: mol_type = other DNA
atggctgccgatggttatcttccagattggctcgaggacactctctctgaaggaataagacagtggtggaagctcaaacctggcccaccaccaccaaagcccgcagagcggcatcaggacgacagcaggggtcttgtgcttcctgggtacaagtacctcggacccttcaacggactcgacaagggagagccggtcaacgaggcagacgccgcggccctcgagcacgacaaggcctacgaccggcagctcgacagcggagacaacccgtacctcaagtacaaccacgccgacgcggagtttcaggagcgtcttaaagaagatacgtcttttgggggcaacctcggacgagcagtcttccaggcgaaaaagagggttcttgaacctctgggcctggttgaggaacctgttaagacggctccgggaaaaaagaggccggtagagcattctcctgcggagccagactcctcctcgggaaccggaaaggcgggccagcagcctgcgagaaagagattgaatttcggtcagactggagacgcagactccgtacctgacccccagcctctcggacagccaccagcagccccctctggtctgggaactaatacgatggctacaggcagtggcgcaccaatggcagacaataacgagggcgccgacggagtgggtaattcctcgggaaattggcattgcgattccacatggatgggcgacagagtcatcaccaccagcacccgaacctgggccctgcccacctacaacaaccacctctacaagcaaatctccagccaatctggagcctcaaacgacaaccactactttggctacagcaccccttgggggtattttgacttcaacagattccactgtcacttctccccacgtgactggcaaagactcatcaacaacaactggggattccgacccaagagactcaacttcaagctctttaacattcaagtcaaagaggtcacgcagaatgacggtacgacgacgattgccaataaccttaccagcacggttcaagtctttactgactcggagtaccagctcccgtacgtcctcggctcggcgcatcaaggatgcctcccgccgtttccagcagacgtcttcatggtgccacagtatggatacctcaccctgaacaacgggagtcaggcggtaggacgctcttccttttactgcctggagtactttccttctcagatgctgcgtaccggaaacaactttaccttcagctacacctttgaggacgttcctttccacagcagctacgctcacagccagagtttggaccggctgatgaatcctctgatcgaccagtatctgtattacttgagcaaaacaaacgctccaagcggaaccaccacgatgtccaggcttcagttttctcaggccggagcgagtgacattcgggaccagtctaggaactggcttcctggaccctgttaccgccagcagcgagtatcaaaaacagctgcggataacaacaacagtgattattcgtggactggagctaccaagtaccacctcaatggaagagactctctggtgaatccgggcccagctatggccagccacaaggacgatgaagaaaaatattttcctcagagcggggttctcatctttggaaaacaagactcgggaaaaactaatgtggacattgaaaaggtcatgattacagacgaagaggaaatcaggaccaccaatcccgtggctacggagcagtatggttctgtatctaccaacctccagagcggcaacacacaggcagccaccacagatgtcaacacacaaggcgttcttccaggcatggtctggcaggacagagacgtgtacctgcaaggacccatctgggcaaagattcctcacacggacggacactttcacccttctcccctcatgggaggatttggactcaaacaccctcctccgcaaatcctcatcaagaatacccccgtacctgcgaatccttcgaccacattcagcgcggcaaagtttgcttctttcatcacacagtactctacggggcaggtcagcgtggagattgagtgggagctgcagaaggagaacagcaaacgctggaaccccgaaatccagtacacttccaactacaacaagtctgttaatgtggaccttactgtggacactaatggtgtgtattcagagcctcgccccattggcacaagatacctgactcgtaatctgtaa

SEQ ID NO: 3245 - DNA, 2208 bp, synthetic construct
  misc_feature 1..2208: note = source = /note="Description of Artificial Sequence: Synthetic polynucleotide"
  source 1..2208: mol_type = other DNA
atggctgccgatggttatcttccagattggctcgaggacactctctctgaaggaataagacagtggtggaagctcaaacctggcccaccaccactaaagcccgcagagcggcatcaggacgacagcaggggtcttgtgcttcctgggtacaagtacctcggacccttcaacggactcgacaagggagagccggtcaacgaggcagacgccgcggccctcgagcacgacaaggcctacgaccggcagctcgacagcggagacaacccgtacctcaagtacaaccacgccgacgcggagtttcaggagcgtcttaaagaagatacgtcttttgggggcaacctcggacgagcagtcttccaggcgaaaaagagggttcttgaacctctgggcctggttgaggaacctgttaagacggctccgggaaaaaagaggccggtagagcattctcctgcggagccagactcctcctcgggaaccggaaaggcgggccagcagcctgcgagaaagagattgaatttcggtcagactggagacgcagactccgtacctgacccccagcctctcggacagccaccagcagccccctctggtctgggaactaatacgatggctgcaggcagtggcgcaccaatggcagacaataacgagggcgccgacggagtgggtaattcctcgggaaattggcattgcgattccacatggatgggcgacagagtcatcaccaccagcacccgaacctgggccctgcccacctacaacaaccacctctacaagcaaatctccagccaatctggagcctcaaacgacaaccactactttggctacagcaccccttgggggtattttgacttcaacagattccactgtcacttctccccacgtgactggcaaagactcatcaacaacaactggggattccgacccaagagactcaacttcaagctctttaacattcaagtcaaagaggtcacgcagaatgacggtacgacgacgattgccaataaccttaccagcacggttcaagtctttactgactcggagtaccagctcccgtacgtcctcggctcggcgcatcaaggatgcctcccgccgtttccagcagacgtcttcatggtgccacagtatggatacctcaccctgaacaacgggagtcaggcggtaggacgctcttccttttactgcctggagtactttccttctcagatgctgcgtaccggaaacaactttaccttcagctacacctttgaggacgttcctttccacagcagctacgctcacagccagagtttggaccggctgatgaatcctctgatcgaccagtatctgtattacttgagcaaaacaaacgctccaagcggaaccaccacgatgtccaggcttcagttttctcaggccggagcgagtgacattcgggaccagtctaggaactggcttcctggaccctgttaccgccagcagcgagtatcaaaaacagctgcggataacaacaacagtgattattcgtggactggagctaccaagtaccacctcaatggaagagactctctggtgaatccgggcccagctatggccagccacaaggacgatgaagaaaaatattttcctcagagcggggttctcatctttggaaaacaagactcgggaaaaactaatgtggacattgaaaaggtcatgattacagacgaagaggaaatcaggaccaccaatcccgtggctacggagcagtatggttctgtatctaccaacctccagagcggcaacacacaggcagccaccacagatgtcaacacacaaggcgttcttccaggcatggtctggcaggacagagacgtgtacctgcaaggacccatctgggcaaagattcctcacacggacggacactttcacccttctcccctcatgggaggatttggactcaaacaccctcctccgcaaatcctcatcaagaatacccccgtacctgcgaatccttcgaccacattcagcgcggcaaagtttgcttctttcatcacacagtactctacggggcaggtcagcgtggagattgagtgggagctgcagaaggagaacagcaaacgctggaaccccgaaatccagtacacttccaactacaacaagtctgttaatgtggactttactgtggacactaatggtgtgtattcagagcctcgccccattggcacaagatacctgactcgtaatctgtaa

SEQ ID NO: 3246 - DNA, 2208 bp, synthetic construct
  misc_feature 1..2208: note = source = /note="Description of Artificial Sequence: Synthetic polynucleotide"
  source 1..2208: mol_type = other DNA
atggctgccgatggttatcttccagattggctcgaggacactctctctgaaggaataagacagtggtggaagctcaaacctggcccaccaccaccaaagcccgcagagcggcatcaggacgacagcaggggtcttgtgcttcctgggtacaagtacctcggacccttcaacggactcgacaagggagagccggtcaacgaggcagacgccgcggccctcgagcacgacaaggcctacgaccggcagctcgacagcggagacaacccgtacctcaagtacaaccacgccgacgcggagtttcaggagcgtcttaaagaagatacgtcttttgggggcaacctcggacgagcagtcttccaggcgaaaaagagggttcttgaacctctgggcctggttgaggaacctgttaagacggctccgggaaaaaagaggccggtagagcattctcctgcggagccagactcctcctcgggaaccggaaaggcgggccagcagcctgcgagaaagagattgaatttcggtcagactggagacgcagactccgtacctgacccccagcctctcggacagccaccagcagccccctctggtctgggaactaatacgatggctacaggcagtggcgcaccaatggcagacaataacgagggcgccgacggagtgggtaattcctcgggaaattggcattgcgattccacatggatgggcgacagagtcatcaccaccagcacccgaacctgggccctgcccacctacaacaaccacctctacaagcaaatctccagccaatctggagcctcaaacgacaaccactactttggctacagcaccccttgggggtattttgacttcaacagattccactgtcacttctccccacgtgactggcaaagactcatcaacaacaactggggattccgacccaagagactcaacttcaagctctttaacattcaagtcaaagaggtcacgcagaatgacggtacgacgacgattgccaataaccttaccagcacggttcaagtctttactgactcggagtaccagctcccgtacgtcctcggctcggcgcatcaaggatgcctcccgccgtttccagcagacgtcttcatggtgccacagtatggatacctcaccctgaacaacgggagtcaggcggtaggacgctcttccttttactgcctggagtactttccttctcagatgctgcgtaccggaaacaactttaccttcagctacacctttgaggacgttcctttccacagcagctacgctcacagccagagtttggaccggctgatgaatcctctgatcgaccagtatctgtattacttgagcaaaacaaacgctccaagcggaaccaccacgatgtccaggcttcagttttctcaggccggagcgagtgacattcgggaccagtctaggaactggcttcctggaccctgttaccgccagcagcgagtatcaaaaacagctgcggataacaacaacagtgattattcgtggactggagctaccaagtaccacctcaatggaagagactctctggtgaatccgggcccagctatggccagccacaaggacgatgaagaaaaatattttcctcagagcggggttctcatctttggaaaacaagactcgggaaaaactaatgtggacattgaaaaggtcatgattacagacgaagaggaaatcaggaccaccaatcccgtggctacggagcagtatggttctgtatctaccaacctccagagcggcgacacacaggcagccaccacagatgtcaacacacaaggcgttcttccaggcatggtctggcaggacagagacgtgtacctgcaaggacccatctgggcaaagattcctcacacggacggacactttcacccttctcccctcatgggaggatttggactcaaacaccctcctccgcaaatcctcatcaagaatacccccgtacctgcgaatccttcgaccacattcagcgcggcaaagtttgcttctttcatcacacagtactctacggggcaggtcagcgtggagattgagtgggagctgcagaaggagaacagcaaacgctggaaccccgaaatccagtacacttccaactacaacaagtctgttaatgtggactttactgtggacactaatggtgtgtattcagagcctcgccccattggcacaagatacctgactcgtaatctgtaa

SEQ ID NO: 3247 - DNA, 2208 bp, synthetic construct
  misc_feature 1..2208: note = source = /note="Description of Artificial Sequence: Synthetic polynucleotide"
  source 1..2208: mol_type = other DNA
atggctgccgatggttatcttccagattggctcgaggacactctctctgaaggaataagacagtggtggaagctcaaacctggcccaccaccaccaaagcccgcagagcggcatcaggacgacagcaggggtcttgtgcttcctgggtacaagtacctcggacccttcaacggactcgacaagggagagccggtcaacgaggcagacgccgcggccctcgagcacgacaaggcctacgaccggcagctcgacagcggaggcaacccgtacctcaagtacaaccacgccgacgcggagtttcaggagcgtcttaaagaagatacgtcttttgggggcaacctcggacgagcagtcttccaggcgaaaaagagggttcttgaacctctgggcctggttgaggaacctgttaagacggctccgggaaaaaagaggccggtagagcattctcctgcggagccagactcctcctcgggaaccggaaaggcgggccagcagcctgcgagaaagagattgaatttcggtcagactggagacgcagactccgtacctgacccccagcctctcggacagccaccagcagccccctctggtctgggaactaatacgatggctacaggcagtggcgcaccaatggcagacaataacgagggcgccgacggagtgggtaattcctcgggaaattggcattgcgattccacatggatgggcgacagagtcatcaccaccagcacccgaacctgggccctgcccacctacaacaaccacctctacaagcaaatctccagccaatctggagcctcaaacgacaaccactactttggctacagcaccccttgggggtattttgacttcaacagattccactgtcacttctccccacgtgactggcaaagactcatcaacaacaactggggattccgacccaagagactcaacttcaagctctttaacattcaagtcaaagaggtcacgcagaatgacggtacgacgacgattgccaataaccttaccagcacggttcaagtctttactgactcggagtaccagctcccgtacgtcctcggctcggcgcatcaaggatgcctcccgccgtttccagcagacgtcttcatggtgccacagtatggatacctcaccctgaacaacgggagtcaggcggtaggacgctcttccttttactgcctggagtactttccttctcagatgctgcgtaccggaaacaactttaccttcagctacacctttgaggacgttcctttccacagcagctacgctcacagccagagtttggaccggctgatgaatcctctgatcgaccagtatctgtattacttgagcaaaacaaacgctccaagcggaaccaccacgatgtccaggcttcagttttctcaggccggagcgagtgacattcgggaccagtctaggaactggcttcctggaccctgttaccgccagcagcgagtatcaaaaacagctgcggataacaacaacagtgattattcgtggactggagctaccaagtaccacctcaatggaagagactctctggtgaatccgggcccagctatggccagccacaaggacgatgaagaaaaatattttcctcagagcggggttctcatctttggaaaacaagactcgggaaaaactaatgtggacattgaaaaggtcatgattacagacgaagaggaaatcaggaccaccaatcccgtggctacggagcagtatggttctgtatctaccaacctccagagcggcaacacacaggcagccaccacagatgtcaacacacaaggcgttcttccaggcatggtctggcaggacagagacgtgtacctgcaaggacccatctgggcaaagattcctcacacggacggacactttcacccttctcccctcatgggaggatttggactcaaacaccctcctccgcaaatcctcatcaagaatacccccgtacctgcgaatccttcgaccacattcagcgcggcaaagtttgcttctttcatcacacagtactctacggggcaggtcagcgtggagattgagtgggagctgcagaaggagaacagcaaacgctggaaccccgaaatccagtacacttccaactacaacaagtctgttaatgtggactttactgtggacactaatggtgtgtattcagagcctcgccccattggcacaagatacctgactcgtaatctgtaa

SEQ ID NO: 3248 - DNA, 2208 bp, synthetic construct
  misc_feature 1..2208: note = source = /note="Description of Artificial Sequence: Synthetic polynucleotide"
  source 1..2208: mol_type = other DNA
atggctgccgatggttatcttccagattggctcgaggacactctctctgaaggaataagacagtggtggaagctcaaacctggcccaccaccaccaaagcccgcagagcggcatcaggacgacagcaggggtcttgtgcttcctgggtacaagtacctcggacccttcaacggactcgacaagggagagccggtcaacgaggcagacgccgcggccctcgagcacgacaaggcctacgaccggcagctcgacagcggagacaacccgtacctcaagtacaaccacgccgacgcggagtttcaggagcgtcttaaagaagatacgtcttttgggggcaacctcggacgagcagtcttccaggcgaaaaagagggttcttgaacctctgggcctggttgaggaacctgttaagacggctccgggaaaaaagaggccggtagagcattctcctgcggagccagactcctcctcgggaaccggaaaggcgggccagcagcctgcgagaaagagattgaatttcggtcagactggagacgcagactccgtacctgacccccagcctctcggacagccaccagcagccccctctggtctgggaactaatacgatggctacaggcagtggcgcaccaatggcagacaataacgagggcgccgacggagtgggtaattcctcgggaaattggcattgcgattccacatggatgggcgacagagtcatcaccaccagcacccgaacctgggccctgcccacctacaacaaccacctctacaagcaaatctccagccaatctggagcctcaaacgacaaccactactttggctacagcaccccttgggggtattttgacttcaacagattccactgtcacttctccccacgtgactggcaaagactcatcaacaacaactggggattccgacccaagagactcaacttcaagctctttaacattcaagtcaaagaggtcacgcagaatgacggtacgacgacgattgccaataaccttaccagcacggttcaagtctttactgactcggagtaccagctcccgtacgtcctcggctcggcgcatcaaggatgcctcccgccgtttccagcagacgtcttcatggtgccacagtatggatacctcaccctgaacaacgggagtcaggcggtaggacgctcttccttttactgcctggagtactttccttctcagatgctgcgtaccggaaacaactttaccttcagctacacctttgaggacgttcctttccacagcagctacgctcacagccagagtttggaccggctgatgaatcctctgatcgaccagtatctgtattacttgagcaaaacaaacgctccaagcggaaccaccacgatgtccaggcttcagttttctcaggccggagcgagtgacattcgggaccagtctaggaactggcttcctggaccctgttaccgccagcagcgagtatcaaaaacagctgcggataacaacaacagtgattattcgtggactggagctaccaagtaccacctcaatggaagagactctctggtgaatccgggcccagctatggccagccacaaggacgatgaagaaaaatattttcctcagagcggggttctcatctttggaaaacaagactcgggaaaaactaatgtggacattgaaaaggtcatgattacagacgaagaggaaatcaggaccaccaatcccgtggctacggagcagtatggttctgtatctaccaacctccagagcggcaacacacaggcagccaccacagatgtcaacacacaaggcgttcttccaggcatggtctggcaggacagagacgtgtacctgcaaggacccatctgggcaaagattcctcacacggacggacactttcacccttctcccctcatgggaggatttggactcaaacaccctcctccgcaaatcctcatcaagaatacccccgtacctgcgaatccttcgaccacattcagcgcggcaaagcttgcttctttcatcacacagtactctacggggcaggtcagcgtggagattgagtgggagctgcagaaggagaacagcaaacgctggaaccccgaaatccagtacacttccaactacaacaagtctgttaatgtggactttactgtggacactaatggtgtgtattcagagcctcgccccattggcacaagatacctgactcgtaatctgtaa

SEQ ID NO: 3249 - DNA, 2208 bp, synthetic construct
  misc_feature 1..2208: note = source = /note="Description of Artificial Sequence: Synthetic polynucleotide"
  source 1..2208: mol_type = other DNA
atggctgccgatggttatcttccagattggctcgaggacactctctctgaaggaataagacagtggtggaagctcaaacctggcccaccaccaccaaagcccgcagagcggcatcaggacgacagcaggggtcttgtgcttcctgggtacaagtacctcggacccttcaacggactcgacaagggagagccggtcaacgaggcagacgccgcggccctcgagcacgacaaggcctacgaccggcagctcgacagcggagacaacccgtacctcaagtacaaccacgccgacgcggagtttcaggagcgtcttaaagaagatacgtcttttgggggcaacctcggacgagcagtcttccaggcgaaaaagagggttcttgaacctctaggcctggttgaggaacctgttaagacggctccgggaaaaaagaggccggtagagcattctcctgcggagccagactcctcctcgggaaccggaaaggcgggccagcagcctgcgagaaagagattgaatttcggtcagactggagacgcagactccgtacctgacccccagcctctcggacagccaccagcagccccctctggtctgggaactaatacgatggctacaggcagtggcgcaccaatggcagacaataacgagggcgccgacggagtgggtaattcctcgggaaattggcattgcgattccacatggatgggcgacagagtcatcaccaccagcacccgaacttgggccctgcccacctacaacaaccacctctacaagcaaatctccagccaatctggagcctcaaacgacaaccactactttggctacagcaccccttgggggtattttgacttcaacagattccactgtcacttctccccacgtgactggcaaagactcatcaacaacaactggggattccgacccaagagactcaacttcaagctctttaacattcaagtcaaagaggtcacgcagagtgacggtacgacgacgattgccaataaccttaccagcacggttcaagtctttactgactcggagtaccagctcccgtacgtcctcggctcggcgcatcaaggatgcctcccgccgtttccagcagacgtcttcatggtgccacagtatggatacctcaccctgaacaacgggagtcaggcggtaggacgctcttccttttactgcctggagtactttccttctcagatgctgcgtaccggaaacaactttaccttcagctacacctttgaggacgttcctttccacagcagctacgctcacagccagagtttggaccggctgatgaatcctctgatcgaccagtatctgtattacttgagcaaaacaaacgctccaagcggaaccaccacgatgtccaggcttcagttttctcaggccggagcgagtgacattcgggaccagtctaggaactggcttcctggaccctgttaccgccagcagcgagtatcaaaaacagctgcggataacaacaacagtgattattcgtggactggagctaccaagtaccacctcaatggaagagactctctggtgaatccgggcccagctatggccagccacaaggacgatgaagaaaaatattttcctcagagcgggattctcatctttggaaaacaagactcgggaaaaactaatgtggacattgaaaaggtcatgattacagacgaagaggaaatcaggaccaccaatcccgtggctacggagcagtatggttctgtatctaccaacctccagagcggcaacacacaggcagccaccacagatgtcaacacacaaggcgttcttccaggcatggtctggcaggacagagacgtgtacctgcaaggacccatctgggcaaagattcctcacacggacggacactttcacccttctcccctcatgggaggatttggactcaaacaccctcctccgcaaatcctcatcaagaatacccccgtacctgcgaatccttcgaccacattcagcgcggcaaagtttgcttctttcatcacacagtaccctacggggcaggtcagcgtggagattgagtgggagctgcagaaggagaacagcaaacgctggaaccccgaaatccagtacacttccaactacaacaagtctgttaatgtggactttactgtggacactaatggtgtgtattcagagcctcgccccattggcacaagatacctgactcgtaatctgtaa

SEQ ID NO: 3250 - DNA, 2208 bp, synthetic construct
  misc_feature 1..2208: note = source = /note="Description of Artificial Sequence: Synthetic polynucleotide"
  source 1..2208: mol_type = other DNA
atggctgccgatggttatcttccagattggctcgaggacactctctctgaaggaataagacagtggtggaagctcaaacctggcccaccaccaccaaagcccgcagagcggcatcaggacgacagcaggggtcttgtgcttcctgggtacaagtacctcggacccttcaacggactcgacaagggagagccggtcaacgaggcagacgccgcggccctcgagcacgacaaggcctacgaccggcagctcgacagcggagacaacccgtacctcaagtacaaccacgccgacgcggagtttcaggagcgtcttaaagaagatacgtcttttgggggcaacctcggacgagcagtcttccaggcgaaaaagagggttcttgaacctctgggcctggttgaggaacctgttaagacggctccgggaaaaaagaggccggtagagcattctcctgcggagccagacgcctcctcgggaaccggaaaggcgggccagcagcctgcgagaaagagattgaatttcggtcagactggagacgcagactccgtacctgacccccagcctctcggacagccaccagcagccccctctggtctgggaactaatacgatggctacaggcagtggcgcaccaatggcagacaataacgagggcgccgacggagtgggtaattcctcgggaaattggcattgcgattccacatggatgggcgacagagtcatcaccaccagcacccgaacctgggccctgcccacctacaacaaccacctctacaagcaaatctccagccaatctggagcctcaaacgacaaccactactttggctacagcaccccttgggggtattttgacttcaacagattccactgtcacttctccccacgtgactggcaaagactcatcaacaacaactggggattccgacccaagagactcaacttcaagctctttaacattcaagtcaaagaggtcacgcagaatgacggtacgacgacgattgccaataaccttaccagcacggttcaagtctttactgactcggagtaccagctcccgtacgtcctcggctcggcgcatcaaggatgcctcccgccgtttccagcagacgtcttcatggtgccacagtatggatacctcaccctgaacaacgggagtcaggcggtaggacgctcttccttttactgcctggagtactttccttctcagatgctgcgtaccggaaacaactttaccttcagctacacctttgaggacgttcctttccacagcagctacgctcacagccagagtttggaccggctgatgaatcctctgatcgaccagtatctgtattacttgagcaaaacaaacgctccaagcggaaccaccacgatgtccaggcttcagttttctcaggccggagcgagtgacattcgggaccagtctaggaactggcttcctggaccctgttaccgccagcagcgagtatcaaaaacagctgcggataacaacaacagtgattattcgtggactggagctaccaagtaccacctcaatggaagagactctctggtgaatccgggcccagctatggccagccacaaggacgatgaagaaaaatattttcctcagagcggggttctcatctttggaaaacaagactcgggaaaaactaatgtggacattgaaaaggtcatgattacagacgaagaggaaatcaggaccaccaatcccgtggctacggagcagtatggttctgtatctaccaacctccagagcggcaacacacaggcagccaccacagatgtcaacacacaaggcgttcttccaggcatggtctggcaggacagagacgtgtacctgcaaggacccatctgggcaaagattcctcacacggacggacactttcacccttctcccctcatgggaggatttggactcaaacaccctcctccgcaaatcctcatcaagaatacccccgtacctgcgaatccttcgaccacattcagcgcggcaaagtttgcttctttcatcacacagtactctacggggcaggtcagcgtggagattgagtgggagctgcagaaggagaacagcaaacgctggaaccccgaaatccagtacacttccaactacaacaagtctgttaatgtggactttactgtggacactaatggtgtgtattcagagcctcgccccattggcacaagatacctgactcgtaatctgtaa

SEQ ID NO: 3251 - DNA, 2208 bp, synthetic construct
  misc_feature 1..2208: note = source = /note="Description of Artificial Sequence: Synthetic polynucleotide"
  source 1..2208: mol_type = other DNA
atggctgccgatggttatcttccagattggctcgaggacactctctctgaaggaataagacagtggtggaagctcaaacctggcccaccaccaccaaagcccgcagagcggcatcaggacgacagcaggggtctcgtgcttcctgggtacaagtacctcggacccttcaacggactcgacaagggagggccggtcaacgaggcagacgccgcggccctcgagcacgacaaggcctacgaccggcagctcgacagcggagacaacccgtacctcaagtacaaccacgccgacgcggagtttcaggagcgtcttaaagaagatacgtcttttgggggcaacctcggacgagcagtcttccaggcgaaaaagagggttcttgaacctctgggcctggttgaggaacctgttaagacggctccgggaaaaaagaggccggtagagcattctcctgcggagccagactcctcctcgggaaccggaaaggcgggccagcagcctgcgagaaagagattgaatttcggtcagactggagacgcagactccgtacctgacccccagcctctcggacagccaccagcagccccctctggtctgggaactaatacgatggctacaggcagtggcgcaccaatggcagacaataacgagggcgccgacggagtgggtaattcctcgggaaattggcattgcgattccacatggatgggcgacagagtcatcaccaccagcacccgaacctgggccctgcccacctacaacaaccacctctacaagcaaatctccagccaatctggagcctcaaacgacaaccactactttggctacagcaccccttgggggtattttgacttcaacagattccactgtcacttctccccacgtgactggcaaagactcatcaacaacaactggggattccgacccaagagactcaacttcaagctctttaacattcaagtcaaagaggtcacgcagaatgacggtacgacgacgattgccaataaccttaccagcacggttcaagtctttactgactcggagtaccagctcccgtacgtcctcggctcggcgcatcaaggatgcctcccgccgtttccagcagacgtcttcatggtgccacagtatggatacctcaccctgaacaacgggagtcaggcggtaggacgctcttccttttactgcctggagtactttccttctcagatgctgcgtaccggaaacaactttaccttcagctacacctttgaggacgttcctttccacagcagctacgctcacagccagagtttggaccggctgatgaatcctctgatcgaccagtatctgtattacttgagcaaaacaaacgctccaagcggaaccaccacgatgtccaggcttcagttttctcaggccggagcgagtgacattcgggaccagtctaggaactggcttcctggaccctgttaccgccagcagcgagtatcaaaaacagctgcggataacaacaacagtgattattcgtggactggagctaccaagtaccacctcaatggaagagactctctggtgaatccgggcccagctatggccagccacaaggacgatgaagaaaaatattttcctcagagcggggttctcatctttggaaaacaagactcgggaaaaactaatgtggacattgaaaaggtcatgattacagacgaagaggaaatcaggaccaccaatcccgtggctacggagcagtatggttctgtatctaccaacctccagagcggcaacacacaggcagccaccacagatgtcaacacacaaggcgttcttccaggcatggtctggcaggacagagacgtgtacctgcaaggacccatctgggcaaagattcctcacacggacggacactttcacccttctcccctcatgggaggatttggactcaaacaccctcctccgcaaatcctcatcaagaatacccccgtacctgcgaatccttcgaccacattcagcgcggcaaagtttgcttctttcatcacacagtactctacggggcaggtcagcgtggagattgagtgggagctgcagaaggagaacagcaaacgctggaaccccgaaatccagtacacttccaactacaacaagtctgttaatgtggactttactgtggacactaatggtgtgtattcagagcctcgccccattggcacaagatacctgactcgtaatctgtaa

SEQ ID NO: 3252 - DNA, 2208 bp, synthetic construct
  misc_feature 1..2208: note = source = /note="Description of Artificial Sequence: Synthetic polynucleotide"
  source 1..2208: mol_type = other DNA
atggctgccgatggttatcttccagattggctcgaggacactctctctgaaggaataagacagtggtggaagctcaaacctggcccaccaccaccaaagcccgcagagcggcatcaggacgacagcaggggtcttgtgcttcctgggtacaagtacctcggacccttcaacggactcgacaagggagagccggtcaacgaggcagacgccgcggccctcgagcacgacaaggcctacgaccggcagctcgacagcggagacaacccgtacctcaagcacaaccacgccgacgcggagtttcaggagcgtcttaaagaagatacgtcttttgggggcaacctcggacgagcagtcttccaggcgaaaaagagggttcttgaacctctgggcctggttgaggaacctgttaagacggctccgggaaaaaagaggccggtagagcattctcctgcggagccagactcctcctcgggaaccggaaaggcgggccagcagcctgcgagaaagagattgaatttcggtcagactggagacgcagactccgtacctgacccccagcctctcggacagccaccagcagccccctctggtctgggaactaatacgatggctacaggcagtggcgcaccaatggcagacaataacgagggcgccgacggagtgggtaattcctcgggaaattggcattgcgattccacatggatgggcgacagagtcatcaccaccagcacccgaacctgggccctgcccacctacaacaaccacctctacaagcaaatctccagccaatctggagcctcaaacgacaaccactactttggctacagcaccccttgggggtattttgacttcaacagattccactgtcacttctccccacgtgactggcaaagactcatcaacaacaactggggattccgacccaagagactcaacttcaagctctttaacattcaagtcaaagaggtcacgcagaatgacggtacgacgacgattgccaataaccttaccagcacggttcaagtctttactgactcggagtaccagctcccgtacgtcctcggctcggcgcatcaaggatgcctcccgccgtttccagcagacgtcttcatggtgccacagtatggatacctcaccctgaacaacgggagtcaggcggtaggacgctcttccttttactgcctggagtactttccttctcagatgctgcgtaccggaaacaactttaccttcagctacacctttgaggacgttcctttccacagcagctacgctcacagccagagtttggaccggctgatgaatcctctgatcgaccagtatctgtattacttgagcaaaacaaacgctccaagcggaaccaccacgatgtccaggcttcagttttctcaggccggagcgagtgacattcgggaccagtctaggaactggcttcctggaccctgttaccgccagcagcgagtatcaaaaacagctgcggataacaacaacagtgattattcgtggactggagctaccaagtaccacctcaatggaagagactctctggtgaatccgggcccagctatggccagccacaaggacgatgaagaaaaatattttcctcagagcggggttctcatctttggaaaacaagactcgggaaaaactaatgtggacattgaaaaggtcatgattacagacgaagaggaaatcaggaccaccaatcccgtggctacggagcagtatggttctgtatctaccaacctccagagcggcaacacacaggcagccaccacagatgtcaacacacaaggcgttcttccaggcatggtctggcaggacagagacgtgtacctgcaaggacccatctgggcaaagattcctcacacggacggacactttcacccttctcccctcatgggaggatttggactcaaacaccctcctccgcaaatcctcatcaagaatacccccgtacctgcgaatccttcgaccacattcagcgcggcaaagtttgcttctttcatcacacagtactctacggggcaggtcagcgtggagattgagtgggagctgcagaaggagaacagcaaacgctggaaccccgaaatccagtacacttccaactacaacaagtctgttaatgtggactttactgtggacactaatggtgtgtattcagagcctcgccccattggcacaagatacctgactcgtaatctgtaa

SEQ ID NO: 3253 - DNA, 2208 bp, synthetic construct
  misc_feature 1..2208: note = source = /note="Description of Artificial Sequence: Synthetic polynucleotide"
  source 1..2208: mol_type = other DNA
atggctgccgatggttatcttccagattggctcgaggacactctctctgaaggaataagacagtggtggaagctcaaacctggcccaccaccaccaaagcccgcagagcggcatcaggacgacagcaggggtcttgtgcttcctgggtacaagtacctcggacccttcaacggactcgacaagggagagccggtcaacgaggcagacgccgcggccctcgagcacgacaaggcctacgaccggcagctcgacagcggagacaacccgtacctcaagtacaaccacgccgacgcggagtttcaggagcgtcttaaagaagatacgtcttttgggggcaacctcggacgagcagtcttccaggcgaaaaagagggttcttgaacctctgggcctggttgaggaacctgttaagacggctccgggaaaaaagaggccggtagagcattctcctgcggagccagactcctcctcgggaaccggaaaggcgggccagcagcctgcgagaaagagattgaatttcggtcagactggagacgcagactccgtacctgacccccagcctctcggacagccaccagcagccccctctggtctgggaactaatacgatggctacaggcagtggcgcaccaatggcagacaataacgagggcgccgacggagtgggtaattcctcgggaaattggcattgcgattccacatggatgggcgacagagtcatcaccaccagcacccgaacctgggccctgcccacctacaacaaccacctctacaagcaaatctccagccaatctggagcctcaaacgacaaccactactttggctacagcaccccttgggggtattttgacttcaacagattccactgtcacttctccccacgtgactggcaaagactcatcaacaacaactggggattccgacccaagagactcaacttcaagctctttaacattcaagtcaaagaggtcacgcagaatgacggtacgacgacgattgccaataaccttaccagcacggttcaagtctttactgactcggagtaccagctcccgtacgtcctcggctcggcgcatcaaggatgcctcccgccgtttccagcaggcgtcttcatggtgccacagtatggatacctcaccctgaacaacgggagtcaggcggtaggacgctcttccttttactgcctggagtactttccttctcagatgctgcgtaccggaaacaactttaccttcagctacacctttgaggacgttcctttccacagcagctacgctcacagccagagtttggaccggctgatgaatcctctgatcgaccagtatctgtattacttgagcaaaacaaacgctccaagcggaaccaccacgatgtccaggcttcagttttctcaggccggagcgagtgacattcgggaccagtctaggaactggcttcctggaccctgttaccgccagcagcgagtatcaaaaacagctgcggataacaacaacagtgattattcgtggactggagctaccaagtaccacctcaatggaagagactctctggtgaatccgggcccagctatggccagccacaaggacgatgaagaaaaatattttcctcagagcggggttctcatctttggaaaacaagactcgggaaaaactaatgtggacattgaaaaggtcatgattacagacgaagaggaaatcaggaccaccaatcccgtggctacggagcagtatggttctgtatctaccaacctccagagcggcaacacacaggcagccaccacagatgtcaacacacaaggcgttcttccaggcatggtctggcaggacagagacgtgtacctgcaaggacccatctgggcaaagattcctcacacggacggacactttcacccttctcccctcatgggaggatttggactcaaacaccctcctccgcaaatcctcatcaagaatacccccgtacctgcgaatccttcgaccacattcagcgcggcaaagtttgcttctttcatcacacagtactctacggggcaggtcagcgtggagattgagtgggagctgcagaaggagaacagcaaacgctggaaccccgaaatccagtacacttccaactacaacaagtctgttaatgtggactttactgtggacactaatggtgtgtattcagagcctcgccccattggcacaagatacctgactcgtaatctgtaa

SEQ ID NO: 3254 - DNA, 2208 bp, synthetic construct
  misc_feature 1..2208: note = source = /note="Description of Artificial Sequence: Synthetic polynucleotide"
  source 1..2208: mol_type = other DNA
atggctgccgatggttatcttccagattggctcgaggacactctctctgaaggaataagacagtggtggaagctcaaacctggcccaccaccaccaaagcccgcagagcggcatcaggacgacagcaggggtcttgtgcttcctgggtacaagtacctcggacccttcaacggactcgacaagggagagccggtcaacgaggcagacgccgcggccctcgagcacgacaaggcctacgaccggcagctcgacagcggagacaacccgtacctcaagtacaaccacgccgacgcggagtttcaggagcgtcttaaagaagatacgtcttttgggggcaacctcggacgagcagtcttccaggcgaaaaagagggttcttgaacctctgggcctggttgaggaacctgttaagacggctccgggaaaaaagaggccggtagagcattctcctgcggagccagactcctcctcgggaaccggaaaggcgggccagcagcctgcgagaaagagattgaatttcggtcagactggagacgcagactccgtacctgacccccagcctctcggacagccaccagcagccccctctggtctgggaactaatacgacagctacaggcagtggcgcaccaatggcagacaataacgagggcgccgacggagtgggtaattcctcgggaaattggcattgcgattccacatggatgggcgacagagtcatcaccaccagcacccgaacctgggccctgcccacctacaacaaccacctctacaagcaaatctccagccaatctggagcctcaaacgacaaccactactttggctacagcaccccttgggggtattttgacttcaacagattccactgtcacttctccccacgtgactggcaaagactcatcaacaacaactggggattccgacccaagagactcaacttcaagctctttaacattcaagtcaaagaggtcacgcagaatgacggtacgacgacgattgccaataaccttaccagcacggttcaagtctttactgactcggagtaccagctcccgtacgtcctcggctcggcgcatcaaggatgcctcccgccgtttccagcagacgtcttcatggtgccacagtatggatacctcaccctgaacaacgggagtcaggcggtaggacgctcttccttttactgcctggagtactttccttctcagatgctgcgtaccggaaacaactttaccttcagctacacctttgaggacgttcctttccacagcagctacgctcacagccagagtttggaccggctgatgaatcctctgatcgaccagtatctgtattacttgagcaaaacaaacgctccaagcggaaccaccacgatgtccaggcttcagttttctcaggccggggcgagtgacattcgggaccagtctaggaactggcttcctggaccctgttaccgccagcagcgagtatcaaaaacagctgcggataacaacaacagtgattattcgtggactggagctaccaagtaccacctcaatggaagagactctctggtgaatccgggcccagctatggccagccacaaggacgatgaagaaaaatattttcctcagagcggggttctcatctttggaaaacaagactcgggaaaaactaatgtggacattgaaaaggtcatgattacagacgaagaggaaatcaggaccaccaatcccgtggctacggagcagtatggttctgtatctaccaacctccagagcggcaacacacaggcagccaccacagatgtcaacacacaaggcgttcttccaggcatggtctggcaggacagagacgtgtacctgcaaggacccatctgggcaaagattcctcacacggacggacactttcacccttctcccctcatgggaggatttggactcaaacaccctcctccgcaaatcctcatcaagaatacccccgtacctgcgaatccttcgaccacattcagcgcggcaaagtttgcttctttcatcacacagtactctacggggcaggtcagcgtggagattgagtgggagctgcagaaggagaacagcaaacgctggaaccccgaaatccagtacacttccaactacaacaagtctgttaatgtggactttactgtggacactaatggtgtgtattcagagcctcgccccattggcacaagatacctgactcgtaatctgtaa

SEQ ID NO: 3255 - DNA, 2208 bp, synthetic construct
  misc_feature 1..2208: note = source = /note="Description of Artificial Sequence: Synthetic polynucleotide"
  source 1..2208: mol_type = other DNA
atggctgccgatggttatcttccagattggctcgaggacactctctctgaaggaataagacagtggtggaagctcaaacctggcccaccaccaccaaagcccgcagagcggcatcaggacgacagcaggggtcttgtgcttcctgggtacaagtacctcggacccttcaacggactcgacaagggagagccggtcaacgaggcagacgccgcggccctcgagcacgacaaggcctacgaccggcagctcgacagcggagacaacccgtacctcaagtacaaccacgccgacgcggagtttcaggagcgtcttaaagaagatacgtcttttgggggcaacctcggacgagcagtcttccaggcgaaaaagagggttcttgaacctctgggcctggttgaggaacctgttaagacggctccgggaaaaaagaggccggtagagcattctcctgcggagccagactcctcctcgggaaccggaaaggcgggccagcagcctgcgagaaagagattgaatttcggtcagaccggagacgcagactccgtacctgacccccagcctctcggacagccaccagcagccccctctggtctgggaactaatacgatggctacaggcagtggcgcaccaatggcagacaataacgagggcgccgacggagtgggtaattcctcgggaaattggcattgcgattccacatggatgggcgacagagtcatcaccaccagcacccgaacctgggccctgcccacctacaacaaccacctctacaagcaaatctccagccaatctggagcctcaaacgacaaccactactttggctacagcaccccttgggggtattttgacttcaacagattccactgtcacttctccccacgtgactggcaaagactcatcatcaacaactggggattccgacccaagagactcaacttcaagctctttaacattcaagtcaaagaggtcacgcagaatgacggtacgacgacgattgccaataaccttaccagcacggttcaagtctttactgactcggagtaccagctcccgtacgtcctcggctcggcgcatcaaggatgcctcccgccgtttccagcagacgtcttcatggtgccacagtatggatacctcaccctgaacaacgggagtcaggcggtaggacgctcttccttttactgcctggagtactttccttctcagatgctgcgtaccggaaacaactttaccttcagctacacctttgaggacgttcctttccacagcagctacgctcacagccagagtttggaccggctgatgaatcctctgatcgaccagtatctgtattacttgagcaaaacaaacgctccaagcggaaccaccacgatgtccaggcttcagttttctcaggccggagcgagtgacattcgggaccagtctaggaactggcttcctggaccctgttaccgccagcagcgagtatcaaaaacagctgcggataacaacaacagtgattattcgtggactggagctaccaagtaccacctcaatggaagagactctctggtgaatccgggcccagctatggccagccacaaggacgatgaagaaaaatattttcctcagagcggggttctcatctttggaaaacaagactcgggaaaaactaatgtggacattgaaaaggtcatgattacagacgaagaggaaatcaggaccaccaatcccgtggctacggagcagtatggttctgtatctaccaacctccagagcggcaacacacaggcagccaccacagatgtcaacacacaaggcgttcttccaggcatggtctggcaggacagagacgtgtacctgcaaggacccatctgggcaaagattcctcacacggacggacactttcacccttctcccctcatgggaggatttggactcaaacaccctcctccgcaaatcctcatcaagaatacccccgtacctgcgaatccttcgaccacattcagcgcggcaaagtttgcttctttcatcacacagtactctacggggcaggtcagcgtggagattgagtgggagctgcagaaggagaacagcaaacgctggaaccccgaaatccagtacacttccaactacaacaagtctgttaatgtggactttactgtggacactaatggtgtgtattcagagcctcgccccattggcacaagatacctgactcgtaatctgtaa

SEQ ID NO: 3256 - DNA, 2208 bp, synthetic construct
  misc_feature 1..2208: note = source = /note="Description of Artificial Sequence: Synthetic polynucleotide"
  source 1..2208: mol_type = other DNA
atggctgccgatggttatcttccagattggctcgaggacactctctctgaaggaataagacagtggtggaagctcaaacctggcccaccaccaccaaagcccgcagagcggcatcaggacgacagcaggggtcttgtgcttcctgggtacaagtacctcggacccttcaacggactcgacaagggagagccggtcaacgaggcagacgccgcggccctcgagcacgacaaggcctacgaccggcagctcgacagcggagacaacccgtacctcaagtacaaccacgccgacgcggagtttcaggagcgtcttaaagaagatacgtcttttgggggcaacctcggacgagcagtcttccaggcgaaaaagagggttcttgaacctctgggcctggttgaggaacctgttaagacggctccgggaaaaaagaggccggtagagcattctcctgcggagccagactcctcctcgggaaccggaaaggcgggccagcagcctgcgagaaagagattgaatttcggtcagactggagacgcagactccgtacctgacccccagcctctcggacagccaccagcagccccctctggtctgggaactaatacgatggctacaggcagtggcgcaccaatggcagacaataacgagggcgccgacggagtgggtaattcctcgggaaattggcattgcgattccacatggatgggcgacagagtcatcaccaccagcacccgaacctgggccctgcccacctacaacaaccacctctacaagcaaatctccagccaatctggagcctcaaacgacaaccactactttggctacagcaccccttgggggtattttgacttcaacagattccactgtcacttctccccacgtgactggcaaagactcatcaacaacaactggggattccgacccaagagactcaacttcaagctctttaacattcaagtcaaagaggtcacgcagaatgacggtacgacgacgattgccaataaccttaccagcacggttcaagtctttactgactcggagtaccagctcccgtacgtcctcggctcggcgcatcaaggatgcctcccgccgtttccagcagacgtcttcatggtgccacagtatggatacctcaccctgaacaacgggagtcaggcggtaggacgctcttccttttactgcctggagtactttccttctcagatgctgcgtaccggaaacaactttaccttcagctacacctttgaggacgttcctttccacagcagctacgctcacagccagagtttggaccggctgatgaatcctctgatcgaccagtatctgtattacttgagcaaaacaaacgctccaagcggaaccaccacgatgtccaggcttcagttttctcaggccggagcgagtgacattcgggaccagtctaggaactggcttcctggaccctgttaccgccagcagcgagtatcaaaaacagctgcggataacaacaacagtgattattcgtggactggagctaccaagtaccacctcaatggaagagactctctggtgaatccgggcccagctatggccagccacaaggacgatgaagagaaatattttcctcagagcggggttctcatctttggaaaacaagactcgggaaaaactaatgtggacattgaaaaggtcatgattacagacgaagaggaaatcaggaccaccaatcccgtggctacggagcagtatggttctgtatctaccaacctccagagcggcaacacacaggcagccaccacagatgtcaacacacaaggcgttcttccaggcatggtctggcaggacagagacgtgtaccagcaaggacccatctgggcaaagattcctcacacggacggacactttcacccttctcccctcatgggaggatttggactcaaacaccctcctccgcaaatcctcatcaagaatacccccgtacctgcgaatccttcgaccacattcagcgcggcaaagcttgcttctttcatcacacagtactctacggggcaggtcagcgtggaggttgagtgggagctgcagaaggagaacagcaaacgctggaaccccgaaatccagtacacttccaactacaacaagtctgttaatgtggactttactgtggacactaatggtgtgtattcagagcctcgccccattggcacaagatacctgactcgtaatctgtaa

SEQ ID NO: 3257 - DNA, 2208 bp, synthetic construct
  misc_feature 1..2208: note = source = /note="Description of Artificial Sequence: Synthetic polynucleotide"
  source 1..2208: mol_type = other DNA
atggctgccgatggttatcttccagattggctcgaggacactctctctgaaggaataagacagtggtggaagctcaaacctggcccaccaccaccaaagcccgcagagcggcatcaggacgacagcaggggtcttgtgcttcctgggtacaagtacctcggacccttcaacggactcgacaagggagagccggtcaacgaggcagacgccgcggccctcgagcacgacaaggcctacgaccggcagctcgacagcggagacaacccgtacctcaagtacaaccacgccgacgcggagtttcaggagcgtcttaaagaagatacgtcttttgggggcaacctcggacgagcagtcttccaggcgaaaaagagggttcttgaacctctgggcctggttgaggaacctgttaagacggctccgggaaaaaagaggccggtagagcattctcctgcggagccagactcctcctcgggaaccggaaaggcgggccagcagcctgcgagaaagagattgaatttcggtcagactggagacgcagactccgtacctgacccccagcctctcggacagccaccagcagccccctctggtctgggaactaatacgatggctacaggcagtggcgcaccaatggcagacagtaacgagggcgccgacggagtgggtaattcctcgggaaattggcattgcgattccacatggatgggcgacagagtcatcaccaccagcacccgaacctgggccctgcccacctacaacaaccacctctacaagcaaatctccagccaatctggagcctcaaacgacaaccactactttggctacagcaccccttgggggtattttgacttcaacagattccactgtcacttctccccacgtgactggcaaagactcatcaacaacaactggggattccgacccaagagactcaacttcaagctctttaacattcaagtcaaagaggtcacgcagaatgacggtacgacgacgattgccaataaccttaccagcacggttcaagtctttactgactcggagtaccagctcccgtacgtcctcggctcggcgcatcaaggatgcctcccgccgtttccagcagacgtcttcatggtgccacagtatggatacctcaccctgaacaacgggagtcaggcggtaggacgctcttccttttactgcctggagtactttccttctcagatgctgcgtaccggaaacaactttaccttcagctacacctttgaggacgttcctttccacagcagctacgctcacagccagagtttggaccggctgatgaatcctctgatcgaccagtatctgtattacttgagcaaaacaaacgctccaagcggaaccaccacgatgtccaggcttcagttttctcaggccggagcgagtgacattcgggaccagtctaggaactggcttcctggaccctgttaccgccagcagcgagtatcaaaaacagctgcggataacaacaacagtgattattcgtggactggagctaccaagtaccacctcaatggaagagactctctggtgaatccgggcccagctatggccagccacaaggacgatgaagaaaaatattttcctcagagcggggttctcatctttggaaaacaagactcgggaaaaactaatgtggacattgaaaaggtcatgattacagacgaagaggaaatcaggaccaccaatcccgtggctacggagcagtatggttctgtatctaccaacctccagagcggcaacacacaggcagccaccacagatgtcaacacacaaggcgttcttccaggcatggtctggcaggacagagacgtgtacctgcaaggacccatctgggcaaagattcctcacacggacggacactttcacccttctcccctcatgggaggatttggactcaaacaccctcctccgcaaatcctcatcaagaatacccccgtacctgcgaatccttcgaccacattcagcgcggcaaagtttgcttctttcatcacacagtactctacggggcaggtcagcgtggagattgagtgggagctgcagaaggagaacagcaaacgctggaaccccgaaatccagtacacttccaactacaacaagtctgttaatgtggactttactgtggacactaatggtgtgtattcagagcctcgccccattggcacaagatacctgactcgtaatctgtaa

SEQ ID NO: 3258 - DNA, 2208 bp, synthetic construct
  misc_feature 1..2208: note = source = /note="Description of Artificial Sequence: Synthetic polynucleotide"
  source 1..2208: mol_type = other DNA
atggctgccgatggttatcttccagattggctcgaggacactctctctgaaggaataagacagtggtggaagctcaaacctggcccaccaccaccaaagcccgcagagcggcatcaggacgacagcaggggtcttgtgcttcctgggtacaagtacctcggacccttcaacggactcgacaagggagagccggtcaacgaggcagacgccgcggccctcgagcacgacaaggcctacgaccggcagctcgacagcggagacaacccgtacctcaagtacaaccacgccgacgcggagtttcaggagcgtcttaaagaagatacgtcttttgggggcaacctcggacgagcagtcttccaggcgaaaaagagggttcttgaacctctgggcctggttgaggaacctgttaagacggctccgggaaaaaagaggccggtagagcattctcctgcggagccagactcctcctcgggaaccggaaaggcgggccagcagcctgcgagaaagagattgaatttcggtcagactggagacgcagactccgtacctgacccccagcctctcggacagccaccagcagccccctctggtctgggaactaatacgatggctacaggcagtggcgcaccaatggcagacaataacgagggcgccgacggagtgggtaattcctcgggaaattggcattgcgattccacatggatgggcgacagagtcatcaccaccagcacccgaacctgggccctgcccacctacaacaaccacctctacaagcaaatctccagccaatctggagcctcaaacgacaaccactactttggctacagcaccccttgggggtattttgacttcaacagattccactgtcacttctccccacgtgactggcaaagactcatcaacaacaactggggattccgacccaagagactcaacttcaagctctttaacattcaagtcaaagaggtcacgcagaatgacggtacgacgacgattgccaataaccttaccagcacggttcaagtctttactgactcggagtaccagctcccgtacgtcctcggctcggcgcatcaaggatgcctcccgccgtttccagcagacgtctccatggtgccacagtatggatacctcaccctgaacaacgggagtcaggcggtaggacgctcttccttttactgcctggagtactttccttctcagatgctgcgtaccggaaacaactttaccttcagctacacctttgaggacgttcctttccacagcagctacgctcacagccagagtttggaccggctgatgaatcctctgatcgaccagtatctgtattacttgagcaaaacaaacgctccaagcggaaccaccacgatgtccaggcttcagttttctcaggccggagcgagtgacattcgggaccagtctaggaactggcttcctggaccctgttaccgccagcagcgagtatcaaaaacagctgcggataacaacaacagtgattattcgtggactggagctaccaagtaccacctcaatggaagagactctctggtgaatccgggcccagctatggccagccacaaggacgatgaagaaaaatattttcctcagagcggggttctcatctttggaaaacaagactcgggaaaaactaatgtggacattgaaaaggtcatgattacagacgaagaggaaatcaggaccaccaatcccgtggctacggagcagtatggttctgtatctaccaacctccagagcggcaacacacaggcagccaccacagatgtcaacacacaaggcgttcttccaggcatggtctggcaggacagagacgtgtacctgcaaggacccatctgggcaaagattcctcacacggacggacactttcacccttctcccctcatgggaggatttggactcaaacaccctcctccgcaaatcctcatcaagaatacccccgtacctgcgaatccttcgaccacattcagcgcggcaaagtttgcttctttcatcacacagtactctacggggcaggtcagcgtggagattgagtgggagctgcagaaggagaacagcaaacgctggaaccccgaaatccagtacacttccaactacaacaagtctgttaatgtggactttactgtggacactaatggtgtgtattcagagcctcgccccattggcacaagatacctgactcgtaatctgtaa

SEQ ID NO: 3259 - DNA, 2208 bp, synthetic construct
  misc_feature 1..2208: note = source = /note="Description of Artificial Sequence: Synthetic polynucleotide"
  source 1..2208: mol_type = other DNA
atggctgccgatggttatcttccagattggctcgaggacactctctctgaaggaataagacagtggtggaagctcaaacctggcccaccaccaccaaagcccgcagagcggcatcaggacgacagcaggggtcttgtgcttcctgggtacaagtacctcggacccttcaacggactcgacaagggagagccggtcaacgaggcagacgtcgcggccctcgagcacgacaaggcctacgaccggcagctcgacagcggagacaacccgtacctcaagtacaaccacgccgacgcggagtttcaggagcgtcttaaagaagatacgtcttttgggggcaacctcggacgagcagtcttccaggcgaaaaagagggttcttgaacctctgggcctggttgaggaacctgttaagacggctccgggaaaaaagaggccggtagagcattctcctgcggagccagactcctcctcgggaaccggaaaggcgggccagcagcctgcgagaaagagattgaatttcggtcagactggagacgcagactccgtacctgacccccagcctctcggacagccaccagcagccccctctggtctgggaactaatacgatggctacaggcagtggcgcaccaatggcagacaataacgagggcgccgacggagtgggtaattcctcgggaaattggcattgcgattccacatggatgggcgacagagtcatcaccaccagcacccgaacctgggccctgcccacctacaacaaccacctctacaagcaaatctccagccaatctggagcctcaaacgacaaccactactttggctacagcaccccttgggggtattttgacttcaacagattccactgtcacttctccccacgtgactggcaaagactcatcaacaacaactggggattccgacccaagagactcaacttcaagctctttaacattcaagtcaaagaggtcacgcagaatgacggtacgacgacgattgccaataaccttaccagcacggttcaagtctttactgactcggagtaccagctcccgtacgtcctcggctcggcgcatcaaggatgcctcccgccgtttccagcagacgtcttcatggtgccacagtatggatacctcaccctgaacaacgggagtcaggcggtaggacgctcttccttttactgcctggagtactttccttctcagatgctgcgtaccggaaacaactttaccttcagctacacctttgaggacgttcctttccacagcagctacgctcacagccagagtttggaccggctgatgaatcctctgatcgaccagtatctgtattacttgagcaaaacaaacgctccaagcggaaccaccacgatgtccaggcttcagttttctcaggccggagcgagtgacattcgggaccagtctaggaactggcttcctggaccctgttaccgccagcagcgagtatcaaaaacagctgcggataacaacaacagtgattattcgtggactggagctaccaagtaccacctcaatggaagagactctctggtgaatccgggcccagctatggccagccacaaggacgatgaagaaaaatattttcctcagagcggggttctcatctttggaaaacaagactcgggaaaaactaatgtggacattgaaaaggtcatgattacagacgaagaggaaatcaggaccaccaatcccgtggctacggagcagtatggtcctgtatctaccaacctccagagcggcaacacacaggcagccaccacagatgtcaacacacaaggcgttcttccaggcatggtctggcagggcagagacgtgtacctgcaaggacccatctgggcaaagattcctcacacggacggacactttcacccttctcccctcatgggaggatttggactcaaacaccctcctccgcaaatcctcatcaagaatacccccgtacctgcgaatccttcgaccacattcagcgcggcaaagtttgcttctttcatcacacagtactctacggggcaggtcagcgtggagattgagtgggagctgcagaaggagaacagcaaacgctggaaccccgaaatccagtacacttccaactacaacaagtctgttaatgtggactttactgtggacactaatggtgtgtattcagagcctcgccccattggcacaagatacctgactcgtaatctgtaa

SEQ ID NO: 3260 - DNA, 2208 bp, synthetic construct
  misc_feature 1..2208: note = source = /note="Description of Artificial Sequence: Synthetic polynucleotide"
  source 1..2208: mol_type = other DNA
atggctgccgatggttatcttccagattggctcgagggcactctctctgaaggaataagacagtggtggaagctcaaacctggcccaccaccaccaaagcccgcagagcggcatcaggacgacagcaggggtcttgtgcttcctgggtacaagtacctcggacccttcaacggactcgacaagggagagccggtcaacgaggcagacgccgcggccctcgagcacgacaaggcctacgaccggcagctcgacagcggagacaacccgtacctcaagtacaaccacgccgacgcggagtttcaggagcgtcttaaagaagatacgtcttttgggggcaacctcggacgagcagtcttccaggcgaaaaagagggttcttgaacctctgggcctggttgaggaacctgttaagacggctccgggaaaaaagaggccggtagagcattctcctgcggagccagactcctcctcgggaaccggaaaggcgggccagcagcctgcgagaaagagattgaatttcggtcagactggagacgcagactccgtacctgacccccagcctctcggacagccaccagcagccccctctggtctgggaactaatacgatggctacaggcagtggcgcaccaatggcagacaataacgagggcgccgacggagtgggtaattcctcgggaaattggcattgcgattccacatggatgggcgacagagtcatcaccaccagcacccgaacctgggccctgcccacctacaacaaccacctctacaagcaaatctccagccaatctggagcctcaagcgacaaccactactttggctacagcaccccttgggggtattttgacttcaacagattccactgtcacttctccccacgtgactggcaaagactcatcaacaacaactggggattccgacccaagagactcaacttcaagctctttaacattcaagtcaaagaggtcacgcagaatgacggtacgacgacgattgccaataaccttaccagcacggttcaagtctttactgactcggagtaccagctcccgtacgtcctcggctcggcgcatcaaggatgcctcccgccgtttccagcagacgtcttcatggtgccacagtatggatacctcaccctgaacaacgggagtcaggcggtaggacgctcttccttttactgcctggagtactttccttctcagatgctgcgtaccggaaacaactttaccttcagctacacctttgaggacgttcctttccacagcagctacgctcacagccagagtttggaccggctgatgaatcctctgatcgaccagtatctgtattacttgagcaaaacaaacgctccaagcggaaccaccacgatgtccaggcttcagttttctcaggccggagcgagtgacattcgggaccagtctaggaactggcttcctggaccctgttaccgccagcagcgagtatcaaaaacagctgcggataacaacaacagtgattattcgtggactggagctaccaagtaccacctcaatggaagagactctctggtgaatccgggcccagctatggccagccacaaggacgatgaagaaaaatattttcctcagagcggggttctcatctttggaaaacaagactcgggaaaaactaatgtggacattgaaaaggtcatgattacagacgaagaggaaatcaggaccaccaatcccgtggctacggagcagtatggttctgtatctaccaacctccagagcggcaacacacaggcagccaccacagatgtcaacacacaaggcgttcttccaggcatggtctggcaggacagagacgtgtacctgcaaggacccatctgggcaaagattcctcacacggacggacactttcacccttctcccctcatgggaggatttggactcaaacaccctcctccgcaaatcctcatcaagaatacccccgtacctgcgaatccttcgaccacattcagcgcggcaaagcttgcttctttcatcacacagtactctacggggcaggtcagcgtggagattgagtgggagctgcagaaggagaacagcaaacgctggaaccccgaaatccagtacacttccaactacaacaagtctgttaatgtggactttactgtggacactaatggtgtgtattcagagcctcgccccattggcacaagatacctgactcgtaatctgtaa

SEQ ID NO: 3261 - DNA, 2208 bp, synthetic construct
  misc_feature 1..2208: note = source = /note="Description of Artificial Sequence: Synthetic polynucleotide"
  source 1..2208: mol_type = other DNA
atggctgccgatggttatcttccagattggctcgaggacactctctctgaaggaataagacagtggtggaagctcaaacctggcccaccaccaccaaagcccgcagagcggcatcaggacgacagcaggggtcttgtgcttcctgggtacaagtacctcggacccttcaacggactcgacaagggagagccggtcaacgaggcagacgtcgcggccctcgagcacgacaaggcctacgaccggcagctcgacagcggagacaacccgtacctcaagtacaaccacgccgacgcggagtttcaggagcgtcttaaagaagatacgtcttttgggggcaacctcggacgagcagtcttccaggcgaaaaagagggttcttgaacctctgggcctggttgaggaacctgttaagacggctccgggaaaaaagaggccggtagagcattctcctgcggagccagactcctcctcgggaaccggaaaggcgggccagcagcctgcgagaaagagattgaatttcggtcagactggagacgcagactccgtacctgacccccagcctctcggacagccaccagcagccccctctggtctgggaactaatacgatggctacaggcagtggcgcaccaatggcagacaataacgagggcgccgacggagtgggtaattcctcgggaaattggcattgcgattccacatggatgggcgacagagtcatcaccaccagcacccgaacctgggccctgcccacctacaacaaccacctctacaagcaaatctccagccaatctggagcctcaaacgacaaccactactttggctacagcaccccttgggggtattttgacttcaacagattccactgtcacttctccccacgtgactggcaaagactcatcaacaacaactggggattccgacccaagagacccaacttcaagctctttaacattcaagtcaaagaggtcacgcagaatgacggtacgacgacgattgccaataaccttaccagcacggttcaagtctttactgactcggagtaccagctcccgtacgtcctcggctcggcgcatcaaggatgcctcccgccgtttccagcagacgtcttcatggtgccacagtatggatacctcaccctgaacaacgggagtcaggcggtaggacgctcttccttttactgcctggagtactttccttctcagatgctgcgtaccggaaacaactttaccttcagctacacctttgaggacgttcctttccacagcagctacgctcacagccagagtttggaccggctgatgaatcctctgatcgaccagtatctgtattacttgagcaaaacaaacgctccaagcggaaccaccacgatgtccaggcttcagttttctcaggccggagcgagtgacattcgggaccagtctaggaactggcttcctggaccctgttaccgccagcagcgagtatcaaaaacagctgcggataacaacaacagtgattattcgtggactggagctaccaagtaccacctcaatggaagagactctctggtgaatccgggcccagctatggccagccacaaggacgatgaagaaaaatattttcctcagagcggggttctcatctttggaaaacaagactcgggaaaaactaatgtggacattgaaaaggtcatgattacagacgaagaggaaatcaggaccaccaatcccgtggctacggagcagtatggttctgtatctaccaacctccagagcggcaacacacaggcagccaccacagatgtcaacacacaaggcgttcttccaggcatggtctggcaggacagagacgtgtacctgcaaggacccatctgggcaaagattcctcacacggacggacactttcacccttctcccctcatgggaggatttggactcaaacaccctcctccgcaaatcctcatcaagaatacccccgtacctgcgaatccttcgaccacattcagcgcggcaaagtttgcttctttcatcacacagtactctacggggcaggtcagcgtggagattgagtgggagctgcagaaggagaacagcaaacgctggaaccccgaaatccagtacacttccaactacaacaagtctgttaatgtggactttactgtggacactaatggtgtgtattcagagcctcgccccattggcacaagatacctgactcgtaatctgtaa

SEQ ID NO: 3262 - DNA, 2208 bp, synthetic construct
  misc_feature 1..2208: note = source = /note="Description of Artificial Sequence: Synthetic polynucleotide"
  source 1..2208: mol_type = other DNA
atggctgccgatggttatcttccagattggctcgaggacactctctctgaaggaataagacagtggtggaagctcaaacctggcccaccaccaccaaagcccgcagagcggcatcaggacgacagcaggggtcttgagcttcctgggtacaagtacctcggacccttcaacggactcgacaagggagagccggtcaacgaggcagacgccgcggccctcgagcacgacaaggcctacgaccggcagctcgacagcggagacaacccgtacctcaagtacaaccacgccgacgcggagtttcaggagcgtcttaaagaagatacgtcttttgggggcaacctcggacgagcagtcttccaggcgaaaaagagggttcttgaacctctgggcctggttgaggaacctgttaagacggctccgggaaaaaagaggccggtagagcattctcctgcggagccagactcctcctcgggaaccggaaaggcgggccagcagcctgcgagaaagagattgaatttcggtcagactggagacgcagactccgtacctgacccccagcctctcggacagccaccagcagccccctctggtctgggaactaatacgatggctacaggcagtggcgcaccaatggcagacaataacgagggcgccgacggagtgggtaattcctcgggaaattggcattgcgattccacatggatgggcgacagagtcatcaccaccagcacccgaacctgggccctgcccacctacaacaaccacctctacaagcaaatctccagccaatctggagcctcaaacgacaaccactactttggctacagcaccccttgggggtattttgacttcaacagattccactgtcacttctccccacgtgactggcaaagactcatcaacaacaactggggattccgacccaagagactcaacttcaagctctttaacattcaagtcaaagaggtcacgcagaatgacggtacgacgacgattgccaataaccttaccagcacggttcaagtctttactgactcggagtaccagctcccgtacgtcctcggctcggcgcatcaaggatgcctcccgccgtttccagcagacgtcttcatggtgccacagtatggatacctcaccctgaacaacgggagtcaggcggtaggacgctcttccttttactgcctggagtactttccttctcagatgctgcgtaccggaaacaactttaccttcagctacacctttgaggacgttcctttccacagcagctacgctcacagccagagtttggaccggctgatgaatcctctgatcgaccagtatctgtattacttgagcaaaacaaacgctccaagcggaaccaccacgatgtccaggcttcagttttctcaggccggagcgagtgacattcgggaccagtctaggaactggcttcctggaccctgttaccgccagcagcgagtatcaaaaacagctgcggataacaacaacagtgattattcgtggactggagctaccaagtaccacctcaatggaagagactctctggtgaatccgggcccagctatggccagccacaaggacgatgaagaaaaatattttcctcagagcggggttctcatctttggaaaacaagactcgggaaaaactaatgtggacattgaaaaggtcatgattacagacgaagaggaaatcaggaccaccaatcccgtggctacggagcagtatggttctgtatctaccaacctccagagcggcaacacacaggcagccaccacagatgtcaacacacaaggcgttcttccaggcatggtctggcaggacagagacgtgtacctgcaaggacccatctgggcaaagattcctcacacggacggacactttcacccttctcccctcatgggaggatttggactcaaacaccctcctccgcaaatcctcatcaagaatacccccgtacctgcgaatccttcgaccacattcagcgcggcaaagtttgcttctttcatcacacagtactctacggggcaggtcagcgtggagattgagtgggagctgcagaaggagaacagcaaacgctggaaccccgaaatccagtacacttccaactacaacaagtctgttaatgtggactttactgtggacactaatggtgtgtattcagagcctcgccccattggcacaagatacctgactcgtaatctgtaa

SEQ ID NO: 3263 - DNA, 2208 bp, synthetic construct
  misc_feature 1..2208: note = source = /note="Description of Artificial Sequence: Synthetic polynucleotide"
  source 1..2208: mol_type = other DNA
atggctgccgatggttatcttccagattggctcgaggacaccctctctgagggaataagacagtggtggaagctcaaacctggcccaccaccaccaaagcccgcagagcggcatcaggacgacagcaggggtcttgtgcttcctgggtacaagtacctcggacccttcaacggactcgacaagggagagccggtcaacgaggcagacgccgcggccctcgagcacgacaaggcctacgaccggcagctcgacagcggagacaacccgtacctcaagtacaaccacgccgacgcggagtttcaggagcgtcttaaagaagatacgtcttttgggggcaacctcggacgagcagtcttccaggcgaaaaagagggttcttgaacctctgggcctggttgaggaacctgttaagacggctccgggaaaaaagaggccggtagagcattctcctgcggagccagactcctcctcgggaaccggaaaggcgggccagcagcctgcgagaaagagattgaatttcggtcagactggagacgcagactccgtacctgacccccagcctctcggacagccaccagcagccccctctggtctgggaactaatacgatggctacaggcagtggcgcaccaatggcagacaataacgagggcgccgacggagtgggtaattcctcgggaaattggcattgcgattccacatggatgggcgacagagtcatcaccaccagcacccgaacctgggccctgcccacctacaacaaccacctctacaagcaaatctccagccaatctggagcctcaaacgacaaccactactttggctacagcaccccttgggggtattttgacttcaacagattccactgtcacttctccccacgtgactggcaaagactcatcaacaacaactggggattccgacccaagagactcaacttcaagctctttaacattcaagtcaaagaggtcacgcagaatgacggtatgacgacgattgccaataaccttaccagcacggttcaagtctttactgactcggagtaccagctcccgtacgtcctcggctcggcgcatcaaggatgcctcccgccgtttccagcagacgtcttcatggtgccacagtatggatacctcaccctgaacaacgggagtcaggcggtaggacgctcttccttttactgcctggagtactttccttctcagatgctgcgtaccggaaacaactttaccttcagctacacctttgaggacgttcctttccacagcagctacgctcacagccagagtttggaccggctgatgaatcctctgatcgaccagtatctgtattacttgagcaaaacaaacgctccaagcggaaccaccacgatgtccaggcttcagttttctcaggccggagcgagtgacattcgggaccagtctaggaactggcttcctggaccctgttaccgccagcagcgagtatcaaaaacagctgcggataacaacaacagtgattattcgtggactggagctaccaagtaccacctcaatggaagagactctctggtgaatccgggcccagctatggccagccacaaggacgatgaagaaaaatattttcctcagagcggggttctcatctttggaaaacaagactcgggaaaaactaatgtggacattgaaaaggtcatgattacagacgaagaggaaatcaggaccaccaatcccgtggctacggagcagtatggttctgtatctaccaacctccagagcggcaacacacaggcagccaccacagatgtcaacacacaaggcgttcttccaggcatggtctggcaggacagagacgtgtacctgcaaggacccatctgggcaaagattcctcacacggacggacactttcacccttctcccctcatgggaggatttggactcaaacaccctcctccgcaaatcctcatcaagaatacccccgtacctgcgaatccttcgaccacattcagcgcggcaaagtttgcttctttcatcacacagtactctacggggcaggtcagcgtggagattgagtgggagctgcagaaggagaacagcaaacgctggaaccccgaaatccagtacacttccaactacaacaagtctgttaatgtggactttactgtggacactaatggtgtgtattcagagcctcgccccattggcacaagatacctgactcgtaatctgtaa

SEQ ID NO: 3264 - DNA, 2208 bp, synthetic construct
  misc_feature 1..2208: note = source = /note="Description of Artificial Sequence: Synthetic polynucleotide"
  source 1..2208: mol_type = other DNA
atggctgccgatggttatcttccagattggctcgaggacactctctctgaaggaataagacagtggtggaagctcaaacctggcccaccaccactaaagcccgcagagcggcatcaggacgacagcaggggtcttgtgcttcctgggtacaagtacctcggacccttcaacggactcgacaagggagagccggtcaacgaggcagacgccgcggccctcgagcacgacaaggcctacgaccggcagctcgacagcggagacaacccgtacctcaagtacaaccacgccgacgcggagtttcaggagcgtcttaaagaagatacgtcttttgggggcaacctcggacgagcagtcttccaggcgaaaaagagggttcttgaacctctgggcctggttgaggaacctgttaagacggctccgggaaaaaagaggccggtagagcattctcctgcggagccagactcctcctcgggaaccggaaaggcgggccagcagcctgcgagaaagagattgaatttcggtcagactggagacgcagactccgtacctgacccccagcctctcggacagccaccagcagccccctctggtctgggaactaatacgatggctacaggcagtggcgcaccaatggcagacaataacgagggcgccgacggagtgggtaattcctcgggaaattggcattgcgattccacatggatgggcgacagagtcatcaccaccagcacccgaacctgggccctgcccacctacaacaaccacctctacaagcaaatctccagccaatctggagcctcaaacgacaaccactactttggctacagcaccccttgggggtattttgacttcaacagattccactgtcacttctccccacgtgactggcaaagactcatcaacaacaactggggattccgacccaagagactcaacttcaagctctttaacattcaagtcaaagaggtcacgcagaatgacggtacgacgacgattgccaataaccttaccagcacggttcaagtctttactgactcggagtaccagctcccgtacgtcctcggctcggcgcatcaaggatgcctcccgccgtttccagcagacgtcttcatggtgccacagtatggatacctcaccctgaacaacgggagtcaggcggtaggacgctcttccttttactgcctggagtactttccttctcagatgctgcgtaccggaaacaactttaccttcagctacacctttgaggacgttcctttccacagcagctacgctcacagccagagtttggaccggctgatgaatcctctgatcgaccagtatctgtattacttgagcaaaacaaacgctccaagcggaaccaccacgatgtccaggcttcagttttctcaggccggagcgagtgacattcgggaccagtctaggaactggcttcctggaccctgttaccgccagcagcgagtatcaaaaacagctgcggataacaacaacagtgattattcgtggactggagctaccaagtaccacctcaatggaagagactctctggtgaatccgggcccagctatggccagccacaaggacgatgaagaaaaatattttcctcagagcggggttctcatctttggaaaacaagactcgggaaaaactaatgtggacattgaaaaggtcatgattacagacgaagaggaaatcaggaccaccaatcccgtggctacggagcagtatggttctgtatctaccaacctccagagcggcaacacacaggcagccaccacagatgtcaacacacaaggcgttcctccaggcatggtctggcaggacagagacgtgtacctgcaaggacccatctgggcaaagattcctcacacggacggacactttcacccttctcccctcatgggaggatttggactcaaacaccctcctccgcaaatcctcatcaagaatacccccgtacctgcgaatccttcgaccacattcagcgcggcaaagtttgcttctttcatcacacagtactctacggggcaggtcagcgtggagattgagtgggagctgcagaaggagaacagcaaacgctggaaccccgaaatccagtacacttccaactacaacaagtctgttaatgtggactttactgtggacactaatggtgtgtattcagagcctcgccccattggcacaagatacctgactcgtaatctgtaa

SEQ ID NO: 3265 - DNA, 2208 bp, synthetic construct
  misc_feature 1..2208: note = source = /note="Description of Artificial Sequence: Synthetic polynucleotide"
  source 1..2208: mol_type = other DNA
atggctgccgatggttatcttccagattggctcgaggacactctctctgaaggaataagacagtggtggaagctcaaacctggcccaccaccaccaaagcccgcagagcggcatcaggacgacagcaggggtcttgtgcttcctgggtacaagtacctcggacccttcaacggactcgacaagggagagccggtcaacgaggcagacgccgcggccctcgagcacgacaaggcctacgaccggcagctcgacagcggagacaacccgtacctcaagtacaaccacgccgacgcggagtttcaggagcgtcttaaagaagatacgtcttttgggggcaacctcggacgagcagtcttccaggcgaaaaagagggttcttgaacctctgggcctggttgaggaacctgttaagacggctccgggaaaaaagaggccggtagagcattctcctgcggagccagactcctcctcgggaaccggaaaggcgggccagcagcctgcgagaaagagattgaatttcggtcagactggagacgcagactccgtacctgacccccagcctctcggacagccaccagcagccccctctggtctgggaactaatacgatggctacaggcagtggcgcaccaatggcagacaataacgagggcgccgacggagtgggtaattcctcgggaaattggcattgcgattccacatggatgggcgacagagtcatcaccaccagcacccgaacctgggccctgcccacctacaacaaccacctctacaagcaaatctccagccaatctggagcctcaaacgacaaccactactttggctacagcaccccttgggggtattttgacttcaacagattccactgtcacttctccccacgtgactggcaaagactcatcaacaacaactggggattccgacccaagagactcaacttcaagctctttaacattcaagtcaaagaggtcacgcagaatgacggtacgacgacgattgccaataaccttaccagcacggttcaagtctttactgactcggagtaccagctcccgtacgtcctcggctcggcgcatcaaggatgcctcccgccgtttccagcagacgtcttcatggtgccacagtatggatacctcaccctgaacaacgggagtcaggcggtaggacgctcttccttttactgcctggagtactttccttctcagatgctgcgtaccggaaacaactttaccttcagctacacctttgaggacgttcctttccacagcagctacgctcacagccagagtttggaccggctgatgaatcctctgatcgaccagtatctgtattacttgagcaaaacaaacgctccaagcggaaccaccacgatgtccaggcttcagttttctcaggccggagcgagtgacattcgggaccagtctaggaactggcttcctggaccctgttaccgccagcagcgagtatcaaaaacagctgcggataacaacaacagtgattattcgtggactggagctaccaagtaccacctcaatggaagagactctctggtgaatccgggcccagctatggccagccacaaggacgatgaagaaaaatattttcctcagagcggggttctcatctttggaaaacaagactcgggaaaaaccaatgtggacattgaaaaggtcatgattacagacgaagaggaaatcaggaccaccaatcccgtggctacggagcagtatggttctgtatctaccaacctccagagcggcaacacacaggcagccaccacagatgtcaacacacaaggcgttcttccaggcatggcctggcaggacagagacgtgtacctgcaaggacccatctgggcaaagattcctcacacggacggacactttcacccttctcccctcatgggaggatttggactcaaacaccctcctccgcaaatcctcatcaagaatacccccgtacctgcgaatccttcgaccacactcagcgcggcaaagtttgcttctttcatcacacagtactctacggggcaggtcagcgtggagattgagtgggagctgcagaaggagaacagcaaacgctggaaccccgaaatccagtacacttccaactacaacaagtctgttaatgtggactttactgtggacactaatggtgtgtattcagagcctcgccccattggcacaagatacctgactcgtaatctgtaa

SEQ ID NO: 3266 - DNA, 2208 bp, synthetic construct
  misc_feature 1..2208: note = source = /note="Description of Artificial Sequence: Synthetic polynucleotide"
  source 1..2208: mol_type = other DNA
atggctgccgatggttatcttccagattggctcgaggacactctctctgaaggaataagacagtggtggaagctcaaacctggcccaccaccaccaaagcccgcagagcggcatcaggacgacagcaggggtcttgtgcttcctgggtacaagtacctcggacccttcaacggactcgacaagggagagccggtcaacgaggcagacgccgcggccctcgagcacgacaaggcccacgaccggcagctcgacagcggagacaacccgtacctcaagtacaaccacgccgacgcggagtttcaggagcgtcttaaagaagatacgtcttttgggggcaacctcggacgagcagtcttccaggcgaaaaagagggttcttgaacctctgggcctggttgaggaacctgttaagacggctccgggaaaaaagaggccggtagagcattctcctgcggagccagactcctcctcgggaaccggaaaggcgggccagcagcctgcgagaaagagattgaatttcggtcagactggagacgcagactccgtacctgacccccagcctctcggacagccaccagcagccccctctggtctgggaactaatacgatggctacaggcagtggcgcaccaatggcagacaataacgagggcgccgacggagtgggtaattcctcgggaaattggcattgcgattccacatggatgggcgacagagtcatcaccaccagcacccgaacctgggccctgcccacctacaacaaccacctctacaagcaaatctccagccaatctggagcctcaaacgacaaccactactttggctacagcaccccttgggggtattttgacttcaacagattccactgtcacttctccccacgtgactggcaaagactcatcaacaacaactggggattccgacccaagagactcaacttcaagctctttaacattcaagtcaaagaggtcacgcagaatgacggtacgacgacgattgccaataaccttaccagcacggttcaagtctttactgactcggagtaccagctcccgtacgtcctcggctcggcgcatcaaggatgcctcccgccgtttccagcagacgtcttcatggtgccacagtatggatacctcaccctgaacaacgggagtcaggcggtaggacgctcttccttttactgcctggagtactttccttctcagatgctgcgtaccggaaacaactttaccttcagctacacctttgaggacgttcctttccacagcagctacgctcacagccagagtttggaccggctgatgaatcctctgatcgaccagtatctgtattacttgagcaaaacaaacgctccaagcggaaccaccacgatgtccaggcttcagttttctcaggccggagcgagtgacattcgggaccagtctaggaactggcttcctggaccctgttaccgccagcagcgagtatcaaaaacagctgcggataacaacaacagtgattattcgtggactggagctaccaagtaccacctcaatggaagagactctctggtgagtccgggcccagctatggccagccacaaggacgatgaagaaaaatattttcctcagagcggggttctcatctttggaaaacaagactcgggaaaaactaatgtggacattgaaaaggtcatgattacagacgaagaggaaatcaggaccaccaatcccgtggctacggagcagtatggttctgtatctaccaacctccagagcggcaacacacaggcagccaccacagatgtcaacacacaaggcgttcttccaggcatggtctggcaggacagagacgtgtacctgcaaggacccatctgggcaaagattcctcacacggacggacactttcacccttctcccctcatgggaggatttggactcaaacaccctcctccgcaaatcctcatcaagaatacccccgtacctgcgaatccttcgaccacattcagcgcggcaaagtttgcttctttcatcacacagtactctacggggcaggtcagcgtggagattgagtgggagctgcagaaggagaacagcaaacgctggaaccccgaaatccagtacacttccaactacaacaagtctgttaatgtggactttactgtggacactaatggtgtgtattcagagcctcgccccattggcacaagatacctgactcgtaatctgtaa

SEQ ID NO: 3267 - DNA, 2208 bp, synthetic construct
  misc_feature 1..2208: note = source = /note="Description of Artificial Sequence: Synthetic polynucleotide"
  source 1..2208: mol_type = other DNA
atggctgccgatggttatcttccagattggctcgaggacactctctctgaaggaataagacagtggtggaagctcaaacctggcccaccaccactaaagcccgcagagcggcatcaggacgacagcaggggtcttgtgcttcctgggtacaagtacctcggacccttcaacggactcgacaagggagagccggtcaacgaggcagacgccgcggccctcgagcacgacaaggcctacgaccggcagctcgacagcggagacaacccgtacctcaagtacaaccacgccgacgcggagtttcaggagcgtcttaaagaagatacgtcttttgggggcaacctcggacgagcagtcttccaggcgaaaaagagggttcttgaacctctgggcctggttgaggaacctgttaagacggctccgggaaaaaagaggccggtagagcattctcctgcggagccagactcctcctcgggaaccggaaaggcgggccagcagcctgcgagaaagagattgaatttcggtcagactggagacgcagactccgtacctgacccccagcctctcggacagccaccagcagccccctctggtctgggaactaatacgatggctacaggcagtggcgcaccaatggcagacaataacgagggcgccgacggagtgggtaattcctcgggaaattggcattgcgattccacatggatgggcgacagagtcatcaccaccagcacccgaacctgggccctgcccacctacaacaaccacctctacaagcaaatctccagccaatctggagcctcaaacgacaaccactactttggctacagcaccccttgggggtattttgacttcaacagattccactgtcacttctccccacgtgactggcaaagactcatcaacaacaactggggattccgacccaagagactcaacttcaagctctttaacattcaagtcaaagaggtcacgcagaatgacggtacgacgacgattgccaataaccttaccagcacggttcaagtctttactgactcggagtaccagctcccgtacgtcctcggctcggcgcatcaaggatgcctcccgccgtttccagcagacgtcttcatggtgccacagtatggatacctcaccctgaacaacgggagtcaggcggtaggacgctcttccttttactgcctggagtactttccttctcagatgctgcgtaccggaaacaactttaccttcagctacacctttgaggacgttcctttccacagcagctacgctcacagccagagtttggaccggctgatgaatcctctgatcgaccagtatctgtattacttgagcaaaacaaacgctccaagcggaaccaccacgatgtccaggcttcagttttctcaggccggagcgagtgacattcgggaccagtctaggaactggcttcctggaccctgttaccgccagcagcgagtatcaaaaacagctgcggataacaacaacagtgattattcgtggactggagctaccaagtaccacctcaatggaagagactctctggtgaatccgggcccagctatggccagccacaaggacgatgaagaaaaatattttcctcagagcggggttctcatctttggaaaacaagactcgggaaaaactaatgtggacattgaaaaggtcatgattacagacgaagaggaaatcaggaccaccaatcccgtggctacggagcagtatggttctgtatctaccaacctccagagcggcaacacacaggcagccaccacagatgtcaacacacaaggcgttcttccaggcatggtctggcaggacagagacgtgtacctgcaaggacccatctgggcaaagattcctcacacggacggacactttcacccttctcccctcatgggaggatttggactcaaacaccctcctccgcaaatcctcatcaagaatacccccgtacctgcgaatccttcgaccacattcagcgcggcaaagtttgcttctttcatcacacagtactctacggggcaggtcagcgtggggattgagtgggagctgcagaaggagaacagcaaacgctggaaccccgaaatccagtacacttccaactacaacaagtctgttaatgtggactttactgtggacactaatggtgtgtattcagagcctcgccccattggcacaagatacctgactcgtaatctgtaa

SEQ ID NO: 3268 - DNA, 2208 bp, synthetic construct
  misc_feature 1..2208: note = source = /note="Description of Artificial Sequence: Synthetic polynucleotide"
  source 1..2208: mol_type = other DNA
atggctgccgatggttatcttccagattggctcgaggacactctctctgaaggaataagacagtggtggaagctcaaacctggcccaccaccaccaaagcccgcagagcggcatcaggacgacagcaggggtcttgtgcttcctgggtacaagtacctcggacccttcaacggactcgacaagggagagccggtcaacgaggcagacgccgcggccctcgagcacgacaaggcctacgaccggcagctcgacagcggagacaacccgtacctcaagtacaaccacgccgacgcggagtttcaggagcgtcttaaagaagatacgtcttttgggggcaacctcggacgagcagtcttccaggcgaaaaagagggttcttgaacctctgggcctggttgaggaacctgttaagacggctccgggaaaaaagaggccggtagagcattctcctgcggagccagactcctcctcgggaaccggaaaggcgggccagcagcctgcgagaaagagattgaatttcggtcagactggagacgcagactccgtacctgacccccagcctctcggacagccaccagcagccccctctggtctgggaactaatacgatggctacaggcagtggcgcaccaatggcagacaataacgagggcgccgacggagtgggtaattcctcgggaaattggcattgcgactccacatggatgggcgacagagtcatcaccaccagcacccgaacctgggccctgcccacctacaacaaccacctctacaagcaaatctccagccaatctggagcctcaaacgacaaccactactttggctacagcaccccttgggggtattttgacttcaacagattccactgtcacttctccccacgtgactggcaaagactcatcaacaacaactggggattccgacccaagagactcaacttcaagctctttaacattcaagtcaaagaggtcacgcagaatgacggtacgacgacgattgccaataaccttaccagcacggttcaagtctttactgactcggagtaccagctcccgtacgtcctcggctcggcgcatcaaggatgcctcccgccgtttccagcagacgtcttcatggtgccacagtatggatacctcaccctgaacaacgggagtcaggcggtaggacgctcttccttttactgcctggagtactttccttctcagatgctgcgtaccggaaacaactttaccttcagctacacctttgaggacgttcctttccacagcagctacgctcacagccagagtttggaccggctgatgaatcctctgatcgaccagtatctgtattacttgagcaaaacaaacgctccaagcggaaccaccacgatgtccaggcttcagttttctcaggccggagcgagtgacattcgggaccagtctaggaactggcttcctggaccctgttaccgccagcagcgagtatcaaaaacagctgcggataacaacaacagtgattattcgtggactggagctaccaagtaccacctcaatggaagagactctctggtgaatccgggcccagctatggccagccacaaggacgatgaagaaaaatattttcctcagagcggggttctcatctttggaaaacaagactcgggaaaaactaatgtggacattgaaaaggtcatgattacagacgaagaggaaatcaggaccaccaatcccgtggctacggagcagtatggttctgtatctaccaacctccagagcggcaacacacaggcagccaccacagatgtcaacacacaaggcgttcttccaggcatggtctggcaggacagagacgtgtgcctgcaaggacccatttgggcaaagattcctcacacggacggacactttcacccttctcccctcatgggaggatttggactcaaacaccctcctccgcaaatcctcatcaagaatacccccgtacctgcgaatccttcgaccacattcagcgcggcaaagtttgcttctttcatcacacagtactctacggggcaggtcagcgtggagattgagtgggagctgcagaaggagaacagcaaacgttggaaccccgaaatccagtacacttccaactacaacaagtctgttaatgtggactttactgtggacactaatggtgtgtattcagagcctcgccccattggcacaagatacctgactcgtaatctgtaa

SEQ ID NO: 3269 - DNA, 2208 bp, synthetic construct
  misc_feature 1..2208: note = source = /note="Description of Artificial Sequence: Synthetic polynucleotide"
  source 1..2208: mol_type = other DNA
atggctgccgatggttatcttccagattggctcgaggacactctctctgaaggaataagacagtggtggaagctcaaacctggcccaccaccaccaaagcccgcagagcggcatcaggacgacagcaggggtcttgtgcttcctgggtacaagtacctcggacccttcaacggactcgacaagggagagccggtcaacgaggcagacgccgcggccctcgagcacgacaaggcctacgaccggcagctcgacagcggagacaacccgtacctcaagtacaaccacgccgacgcggagtttcaggagcgtcttaaagaagatacgtcttttgggggcaacctcggacgagcagtcttccaggcgaaaaagagggttcttgaacctctgggcctggttgaggaacctgttaagacggctccgggaaaaaagaggccggtagagcattctcctgcggagccagactcctcctcgggaaccggaaaggcgggccagcagcctgcgagaaagagattgaatttcggtcagactggagacgcagactccgtacctgacccccagcctctcggacagccaccagcagccccctctggtctgggaactaatacgatggctacaggcagtggcgcaccaatggcagacaataacgagggcgccgacggagtgggtaattcctcgggaaattggcattgcgattccacatggatgggcgacagagtcatcaccaccagcacccgaacctgggccctgcccacctacaacaaccacctctacaagcaaatctccagccaatctggagcctcaaacgacaaccactactttggctacagcaccccttgggggtattttgacttcaacagattccactgtcacttctccccacgtgactggcaaagactcatcaacaacaactggggattccgacccaagagactcaacttcaagctctttaacattcaagtcaaagaggtcgcgcagaatgacggtacgacgacgattgccaataaccttaccagcacggttcaagtctttactgactcggagtaccagctcccgtacgtcctcggctcggcgcatcaaggatgcctcccgccgtttccagcagacgtcttcatggtgccacagtatggatacctcaccctgaacaacgggagtcaggcggtaggacgctcttccttttactgcctggagtactttccttctcagatgctgcgtaccggaaacaactttaccttcagctacacctttgaggacgttcctttccacagcagctacgctcacagccagagtttggaccggctgatgaatcctctgatcgaccagtatctgtattacttgagcaaaacaaacgctccaagcggaaccaccacgatgtccaggcttcagttttctcaggccggagcgagtgacattcgggaccagtctaggaactggcttcctggaccctgttaccgccagcagcgagtatcaaaaacagctgcggataacaacaacagtgattattcgtggactggagctaccaagtaccacctcaatggaagagactctctggtgaatccgggcccagctatggccagccacaaggacgatgaagaaaaatattttcctcagagcggggttctcatctttggaaaacaagactcgggaaaaactaatgtggacattgaaaaggtcatgattacagacgaagaggaaatcaggaccaccaatcccgtggctacggagcagtatggttctgtatctaccaacctccagagcggcaacacacaggcagccaccacagatgtcaacacacaaggcgttcttccaggcatggtctggcaggacagagacgtgtacctgcaaggacccatctgggcaaagattcctcacacggacggacactttcacccttctcccctcatgggaggatttggactcaaacaccctcctccgcaaatcctcatcaagaatacccccgtacctgcgaatccttcgaccacattcagcgcggcaaagtttgcttctttcatcacacagtactctacggggcaggtcagcgtggagattgagtgggagctgcagaaggagaacagcaaacgctggaaccccgaaatccagtacacttccaactacaacaagtctgttaatgtggactttactgtggacactaatggtgtgtattcagagcctcgccccattggcacaagatacctgactcgtaatctgtaa

SEQ ID NO: 3270 - DNA, 2208 bp, synthetic construct
  misc_feature 1..2208: note = source = /note="Description of Artificial Sequence: Synthetic polynucleotide"
  source 1..2208: mol_type = other DNA
atggctgccgatggttatcttccagattggctcgaggacactctctctgaaggaataagacagtggtggaagctcaaacctggcccaccaccgccaaagcccgcagagcggcataaggacgacagcaggggtcttgtgcttcctgggtacaagtacctcggacccttcaacggactcgacaaaggagagccggtcaacgaggcagacgccgcggccctcgagcacgacaaggcctacgaccggcagctcgacagcggagacaacccgtacctcaagtacaaccacgccgacgcggagtttcaggagcgccttaaagaagatacgtcttttgggggcaacctcgcaagagcagtattccaggcgaaaaagagggttcttgaacctctgggcctggttgaggagcctgttaagacggctccgggaaaaaagaggccggtagagcactctcctgcggagccagattcctcctccggaactggaaagtcgggccaacagcctgcaagaaagagattgaattttggtcagactggagacgcagactccgtacctgacccccagcctctcggacagccaccagcagccccctctggtctgggaactaatacgatggcttcaggcagtggcgcaccaatggcagacaataacgagggcgccgacggagtgggtaattcctcgggaaattggcattgcgattccacatggatgggcgacagagtcatcaccaccagcacccgcacctgggctctgcccacctacaacaaccatctgtacaagcaaatttccagccagtctggagccagcaacgacaaccactactttggctacagcaccccttgggggtattttgacttcaacagattccactgccacttctccccacgtgactggcaaagactcatcaacaacaattggggattccggcccaaaagactcaacttcaagctctttaacattcaagtcaaggaggtcacgcagaatgacggtacgacgacgattgccaataaccttaccagcacggttcaggtgtttactgactcggagtaccagctcccgtacgtcctcggctcggcgcatcaaggatgcctcccgccgttcccagcagacgtcttcatggtgccacagtatggatacctcaccctgaacaacgggagtcaggcggtaggacgctcttcattttactgcccggagtaccttccttctcagatgctgcgtaccggaaacaactttaccttcagctacacctttgaggacgttccttttcacagcagctacgctcacagccagagtttggaccgtctcatgaatcctctcatcgaccagtacctgtattacttgagcagaacaaacactccaagcggaaccactacgcagtccaggcttcagttttctcaagccggagcgagtgacattcgggaccagtctaggaactggcttcctggaccctgttaccgccagcagcgagtatcaaagacagctgcggacaacaacaacagtgattactcgtggactggagctaccaagtatcacctcaatggaagagactctctggtgaatccgggcacagccatggccagccacaaggacgatgaagaaaagtattttcctcagagcggggttctcatcttcggaaaacaagactcgggaaaaactaatgtggacattgaaaaggtcatgattacagacgaagaggaaaccaggaccaccaatcccgtggctacggagcagtatggttctgtatctaccaatctccagagcggcaacacacaagcagctacctcagatgtcaacacacaaggcgttcttccaggcatggtctggcaggacagagacgtgtacctgcagggacccatctgggcaaagattccacacacggacggacattttcacccttctcctcttatgggaggatttggactgaagcaccctcccccgcagattctcatcaagaataccccggtacctgcgaatccttctaccgccttcagcgcggcaaagtttgcttccttcatcacacagtactccacggggcaggtcagcgtggagatcgagtgggagctgcagaaagagaacagcgaacgctggaaccccgagatccagtatacctccaactacaacaagtctgttaatgtggactttactgtggacactaatggcgtgtattcagagcctcgccccattggcacaaggtacctgactcgtaatctgtaa

SEQ ID NO: 3271 - DNA, 2208 bp, synthetic construct
  misc_feature 1..2208: note = source = /note="Description of Artificial Sequence: Synthetic polynucleotide"
  source 1..2208: mol_type = other DNA
atggctgccgatggttatcttccagattggctcgaggacactctctctgaaggaataagacagtggtggaagctcaaacctggcccaccaccgccaaagcccgcagagcggcataaggacgacagcaggggtcttgtgcttcctgggtacaagtacctcggacccttcaacggactcgacaaaggagagccggtcaacgaggcagacgccgcggccctcgagcacgacaaggcctacgaccggcagctcgacagcggagacaacccgtacctcaagtacaaccacgccgacgcggagtttcaggagcgccttaaagaagatacgtcttttgggggcaacctcgcaagagcagtattccaggcgaaaaagagggttcttgaacctctgggcctggttgaggagcctgttaagacggctccgggaaaaaagaggccggtagagcactctcctgcggagccagattcctcctccggaactggaaagtcgggccaacagcctgcaagaaagagattgaattttggtcagactggagacgcagactccgtacctgacccccagcctctcggacagccaccagcagccccctctggtctgggaactaatacgatggcttcaggcagtggcgcaccaatggcagacaataacgagggcgccgacggagtgggtaattcctcgggaaattggcattgcgattccacatggatgggcgacagagtcatcaccaccagcacccgcacctgggctctgcccacctacaacaaccatctgtacaagcaaatttccagccagtctggagccagcaacgacaaccactactttggctacagcaccccttgggggtattttgacttcaacagattccactgccacttctccccacgtgactggcaaagactcatcaacaacaattggggattccggcccaaaagactcaacttcaagctctttaacattcaagtcaaggaggtcacgcagaatgacggtacgacgacgattgccaataaccttaccagcacggttcaggtgtttactgactcggagtaccagctcccgtacgtcctcggctcggcgcatcaaggatgcctcccgccgttcccagcagacgtcctcatggtgccacagtatggatacctcaccctgaacaacgggagtcaggcggtaggacgctcttcattttactgcccggagtaccttccttctcagatgctgcgtaccggaaacaactttaccttcagctacacctttgaggacgttccttttcacagcagctacgctcacagccagagtttggaccgtctcatgaatcctctcatcgaccagtacctgtattacttgagcagaacaaacactccaagcggaaccactacgcagtccaggcttcagttttctcaagccggagcgagtgacattcgggaccagtctaggaactggcttcctggaccctgttaccgccagcagcgagtatcaaagacagctgcggacaacaacaacagtgattactcgtggactggagctaccaagtatcacctcaatggaagagactctctggtgaatccgggcacagccatggccagccacaaggacgatgaagaaaagtattttcctcagagcggggttctcatcttcggaaaacaagactcgggaaaaactaatgtggacattgaaaaggtcatgattacagacgaagaggaaatcaggaccaccaatcccgtggctacggagcagtatggttctgtatctaccaatctccagagcggcaacacacaagcagctacctcagatgtcaacacacaaggcgttcttccaggcatggtctggcaggacagagacgtgtacctgcagggacccatctgggcaaagattccacacacggacggacattttcacccttctcctcttatgggaggatttggactgaagcaccctcccccgcagattctcatcaagaataccccggtacctgcgaatccttctaccgccttcagcgcggcaaagtttgcttccttcatcacacagtactccacggggcaggtcagcgtggagatcgagtgggagctgcagaaagagaacagcgaacgctggaaccccgagatccagtatacctccaactacaacaagtctgttaatgtggactttactgcggacactaatggcgtgtattcagagcctcgccccattggcacaaggtacctgactcgtaatctgtaa

SEQ ID NO: 3272 - DNA, 2208 bp, synthetic construct
  misc_feature 1..2208: note = source = /note="Description of Artificial Sequence: Synthetic polynucleotide"
  source 1..2208: mol_type = other DNA
atggctgccgatggttatcttccagattggctcgaggacactctctctgaaggaataagacagtggtggaagctcaaacctggcccaccaccgccaaagcccgcagagcggcataaggacgacagcaggggtcttgtgcttcctgggtacaagtacctcggacccttcaacggactcgacaaaggagagccggtcaacgaggcagacgccgcggccctcgagcacgacaaggcctacgaccggcagctcgacagcggagacaacccgtacctcaagtacaaccacgccgacgcggagtttcaggagcgccttaaagaagatacgtcttttgggggcaacctcgcaagagcagtattccaggcgaaaaagagggttcttgaacctctgggcctggttgaggagcctgttaagacggctccgggaaaaaagaggccggtagagcactctcctgcggagccagattcctcctccggaactggaaagtcgggccaacagcctgcaagaaagagattgaattttggtcagactggagacgcagactccgtacctgacccccagcctctcggacagccaccagcagccccctctggtctgggaactaatacgatggcttcaggcagtggcgcaccaatggcagacaataacgagggcgccgacggagtgggtaattcctcgggaaattggcattgcgattccacatggatgggcgacagagtcatcaccaccagcacccgcgcctgggctctgcccacctacaacaaccatctgtacaagcaaatttccagccagtctggagccagcaacgacaaccactactttggctacagcaccccttgggggtattttgacttcaacagattccactgccacttctccccacgtgactggcaaagactcatcaacaacaattggggattccggcccaaaagactcaacttcaagctctttaacattcaagtcaaggaggtcacgcagaatgacggtacgacgacgattgccaataaccttaccagcacggttcaggtgtttactgactcggagtaccagctcccgtacgtcctcggctcggcgcatcaaggatgcctcccgccgttcccagcagacgtcctcatggtgccacagtatggatacctcaccctgaacaacgggagtcaggcggtaggacgctcttcattttactgcccggagtaccttccttctcagatgctgcgtaccggaaacaactttaccttcagctacacctttgaggacgttccttttcacagcagctacgctcacagccagagtttggaccgtctcatgaatcctctcatcgaccagtacctgtattacttgagcagaacaaacactccaagcggaaccactacgcagtccaggcttcagttttctcaagccggagcgagtgacattcgggaccagtctaggaactggcttcctggaccctgttaccgccagcagcgagtatcaaagacagctgcggacaacaacaacagtgattactcgtggactggagctaccaagtatcacctcaatggaagagactctctggtgaatccgggcacagccatggccagccacaaggacgatgaagaaaagtattttcctcagagcggggttctcatcttcggaaaacaagactcgggaaaaactaatgtggacattgaaaaggtcatgattacagacgaagaggaaatcaggaccaccaatcccgtggctacggagcagtatggttctgtatctaccaatctccagagcggcaacacacaagcagctacctcagatgtcaacacacaaggcgttcttccaggcatggtctggcaggacagagacgtgtacctgcagggacccatctgggcaaagattccacacacggacggacattttcacccttctcctcttatgggaggatttggactgaagcaccctcccccgcagattctcatcaagaataccccggtacctgcgaatccttctaccgccttcagcgcggcaaagtttgcttccttcatcacacagtactccacggggcaggtcagcgtggagatcgagtgggagctgcagaaagagaacagcgaacgctggaaccccgagatccagtatacctccaactacaacaagtctgttaatgtggactttactgtggacactaatggcgtgtattcagagcctcgccccattggcacaaggtacctgactcgtaatctgtaa

SEQ ID NO: 3273 - DNA, 2208 bp, synthetic construct
  misc_feature 1..2208: note = source = /note="Description of Artificial Sequence: Synthetic polynucleotide"
  source 1..2208: mol_type = other DNA
atggctgccgatggttatcttccagattggctcgaggacactctctctgaaggaataagacagtggtggaagctcaaacctggcccaccaccgccaaagcccgcagagcggcataaggacgacagcaggggtcttgtgcttcctgggtacaagtacctcggacccttcaacggactcgacaaaggagagccggtcaacgaggcagacgccgcggccctcgagcacgacaaggcctacgaccggcagctcgacagcggagacaacccgtacctcaagtacaaccacgccgacgcggagtttcaggagcgccttaaagaagatacgtcttttgggggcaacctcgcaagagcagtattccaggcgaaaaagagggttcttgaacctctgggcctggttgaggagcctgttaagacggctccgggaaaaaagaggccggtagagcactctcctgcggagccagattcctcctccggaactggaaagtcgggccaacagcctgcaagaaagagattgaattttggtcagactggagacgcagactccgtacctgacccccagcctctcggacagccaccagcagccccctctggtctgggaactaatacgatggcttcaggcagtggcgcaccaatggcagacaataacgagggcgccgacggagtgggtaattcctcgggaaattggcattgcgattccacatggatgggcgacagagtcatcaccaccagcacccgcacctgggctctgcccacctacaacaaccatctgtacaagcaaatttccagccagtctggagccagcaacgacaaccactactttggctacagcaccccttgggggtattttgacttcaacagattccactgccacttctccccacgtgactggcaaagactcatcaacaacaattggggattccggcccaaaagactcaacttcaagctctttaacattcaagtcaaggaggtcacgcagaatgacggtacgacgacgattgccaataaccttaccagcacggttcaggtgtttactgactcggagtaccagctcccgtacgtcctcggctcggcgcatcaaggatgcctcccgccgttcccagcagacgtcttcatggtgccacagtatggatacctcaccctgaacaacgggagtcaggcggtaggacgctcttcattttactgcccggagtaccttccttctcagatgctgcgtaccggaaacaactttaccttcagctacacctttgaggacgttccttttcacagcagctacgctcacagccagagtttggaccgtctcatgaatcctctcatcgaccagtacctgtattacttgagcagaacaaacactccaagcggaaccactacgcagtccaggcttcagttttctcaagccggagcgagtgacattcgggaccagtctaggaactggcttcctggaccctgttaccgccagcagcgagtatcaaagacagctgcggacaacaacaacagtgattactcgtggactggagctaccaagtatcacctcaatggaagagactctctggtgaatccgggcacagccacggccagccacaaggacgatgaagaaaagtattttcctcagagcggggttctcatcttcggaaaacaagactcgggaaaaactaatgtggacattgaaaaggtcatgattacagacgaagaggaaatcaggaccaccaatcccgtggctacggagcagtatggttctgtatctaccaatctccagagcggcaacacacaagcagctacctcagatgtcaacacacaaggcgttcttccaggcatggtctggcaggacagagacgtgtacctgcagggacccatctgggcaaagattccacacacggacggacattttcacccttctcctcttatgggaggatttggactgaagcaccctcccccgcagattctcatcaagaataccccggtacctgcgaatccttctaccgccttcagcgcggcaaagtttgcttccttcatcacacagtactccacggggcaggtcagcgtggagatcgagtgggagctgcagaaagagaacagcgaacgctggaaccccgagatccagtatacctccaactacaacaagtctgttaatgtggactttactgtggacactaatggcgtgtattcagagcctcgccccattggcacaaggtacctgactcgtaatctgtaa

SEQ ID NO: 3274 - DNA, 2205 bp, synthetic construct
  misc_feature 1..2205: note = source = /note="Description of Artificial Sequence: Synthetic polynucleotide"
  source 1..2205: mol_type = other DNA
atggctgccgatggttatcttccagattggctcgaggacactctctctgaaggaataagacagtggtggaagctcaaacctggcccaccaccgccaaagcccgcagagcggcataaggacgacagcaggggtcttgtgcttcctgggtacaagtacctcggacccttcaacggactcgacaaaggagagccggtcaacgaggcagacgccgcggccctcgagcacgacaaggcctacgaccggcagctcgacagcggagacaacccgtacctcaagtacaaccacgccgacgcggagtttcaggagcgccttaaagaagatacgtcttttgggggcaacctcgcaagagcagtattccaggcgaaaaagagggttcttgaacctctgggcctggttgaggagcctgttaagacggctccgggaaaaaagaggccggtagagcactctcctgcggagccagattcctcctccggaactggaaagtcgggccaacagcctgcaagaaagagattgaattttggtcagactggagacgcagactccgtacctgacccccagcctctcggacagccaccagcagccccctctggtctgggaactaatacgatggcttcaggcagtggcgcaccaatggcagacaataacgagggcgccgacggagtgggtaattcctcgggaaattggcattgcgattccacatggatgggcgacagagtcatcaccaccagcacccgcacctgggctctgcccacctacaacaaccatctgtacaagcaaatttccagccagtctggagccagcaacgacaaccactactttggctacagcaccccttgggggtattttgacttcaacagattccactgccacttctccccacgtgactggcaaagactcatcaacaacaattggggattccggcccaaaagactcaacttcaagctctttaacattcaagtcaaggaggtcacgcagaatgacggtacgacgacgattgccaataaccttaccagcacggttcaggtgtttactgactcggagtaccagctcccgtacgtcctcggctcggcgcatcaaggatgcctcccgccgttcccagcagacgtcttcatggtgccacagtatggatacctcaccctgaacaacgggagtcaggcggtaggacgctcttcattttactgcccggagtaccttccttctcagatgctgcgtaccggaaacaactttaccttcagctacacctttgaggacgttccttttcacagcagctacgctcacagccagagtttggaccgtctcatgaatcctctcatcgaccagtacctgtattacttgagcagaacaaacactccaagcggaaccactacgcagtccaggcttcagttttctcaagccggagcgagtgacattcgggaccagtctaggaactggcttcctggaccctgttaccgccagcagcgagtatcaaagacagctgcggacaacaacagtgattactcgtggactggagctaccaagtatcacctcaatggaagagactctctggtgaatccgggcacagccatggccagccacaaggacgatgaagaaaagtattttcctcagagcggggttctcatcttcggaaaacaagactcgggaaaaactaatgtggacattgaaaaggtcatgattacagacgaagaggaaatcaggaccaccaatcccgtggctacggagcagtatggttctgtatctaccaatctccagagcggcaacacacaagcagctacctcagatgtcaacacacaaggcgttcttccaggcatggtctggcaggacagagacgtgtacctgcagggacccatctgggcaaagattccacacacggacggacattttcacccttctcctcttatgggaggatttggactgaagcaccctcccccgcagattctcatcaagaataccccggtacctgcgaatccttctaccgccttcagcgcggcaaagtttgcttccttcatcacacagtactccacggggcaggtcagcgtggagatcgagtgggagctgcagaaagagaacagcgaacgctggaaccccgagatccagtatacctccaactacaacaagtctgttaatgtggactttactgtggacactaatggcgtgtattcagagcctcgccccattggcacaaggtacctgactcgtaatctgtaa

SEQ ID NO: 3275 - DNA, 2208 bp, synthetic construct
  misc_feature 1..2208: note = source = /note="Description of Artificial Sequence: Synthetic polynucleotide"
  source 1..2208: mol_type = other DNA
atggctgccgatggttatcttccagattggctcgaggacactctctctgaaggaataagacagtggtggaagctcaaacctggcccaccaccgccaaagcccgcagagcggcataaggacgacagcaggggtcttgtgcttcctgggtacaagtacctcggacccttcaacggactcgacaaaggagagccggtcaacgaggcagacgccgcggccctcgagcacgacaaggcctacgaccggcagctcgacagcggagacaacccgtacctcaagtacaaccacgccgacgcggagtttcaggagcgccttaaagaagatacgtcttttgggggcaacctcgcaagagcagtattccaggcgaaaaagagggttcttgaccctctgggcctggttgaggagcctgttaagacggctccgggaaaaaagaggccggtagagcactctcctgcggagccagattcctcctccggaactggaaagtcgggccaacagcctgcaagaaagagattgaattttggtcagactggagacgcagactccgtacctgacccccagcctctcggacagccaccagcagccccctctggtctgggaactaatacgatggcttcaggcagtggcgcaccaatggcagacaataacgagggcgccgacggagtgggtaattcctcgggaaattggcattgcgattccacatggatgggcgacagagtcatcaccaccagcacccgcacctgggctctgcccacctacaacaaccatctgtacaagcaaatttccagccagtctggagccagcaacgacaaccactactttggctacagcaccccttgggggtattttgacttcaacagattccactgccacttctccccacgtgactggcaaagactcatcaacaacaattggggattccggcccaaaagactcaacttcaagctctttaacattcaagtcaaggaggtcacgcagaatgacggtacgacgacgattgccaataaccttaccagcacggttcaggtgtttactgactcggagtaccagctcccgtacgtcctcggctcggcgcatcaaggatgcctcccgccgttcccagcagacgtcttcatggtgccacagtatggatacctcaccctgaacaacgggagtcaggcggtaggacgctcttcattttactgcccggagtaccttccttctcagatgctgcgtaccggaaacaactttaccttcagctacacctttgaggacgttccttttcacagcagctacgctcacagccagagtttggaccgtctcatgaatcctctcatcgaccagtacctgtattacttgagcagaacaaacactccaagcggaaccactacgcagtccaggcttcagttttctcaagccggagcgagtgacattcgggaccagtctaggaactggcttcctggaccctgttaccgccagcagcgagtatcaaagacagctgcggacaacaacaacagtgattactcgtggactggagctaccaagtatcacctcaatggaagagactctctggtgaatccgggcacagccatggccagccacaaggacgatgaagaaaagtattttcctcagagcggggttctcatcttcggaaaacaagactcgggaaaaactaatgtggacattgaaaaggtcatgattacagacgaagaggaaatcaggaccaccaatcccgtggctacggagcagtatggttctgtatctaccaatctccagagcggcaacacacaagcagctacctcagatgtcaacacacaaggcgttcttccaggcatggtctggcaggacagagacgtgtacctgcagggacccatctgggcaaagattccacacacggacggacattttcacccttctcctcttatgggaggatttggactgaagcaccctcccccgcagattctcatcaagaataccccggtacctgcgaatccttctaccgccttcagcgcggcaaagtttgcttccttcatcacacagtactccacggggcaggtcagcgtggagatcgagtgggagctgcagaaagagaacagcgaacgctggaaccccgagatccagtatacctccaactacaacaagtctgttaatgtggactttactgtggacactaatggcgtgtattcagagcctcgccccattggcacaaggtacctgactcgtaatctgtaa

SEQ ID NO: 3276 - DNA, 2208 bp, synthetic construct
  misc_feature 1..2208: note = source = /note="Description of Artificial Sequence: Synthetic polynucleotide"
  source 1..2208: mol_type = other DNA
atggctgccgatggttatcttccagattggctcgaggacactctctctgaaggaataagacagtggtggaagctcaaacctggcccaccaccgccaaagcccgcagagcggcataaggacgacagcaggggtcttgtgcttcctgggtacaagtacctcggacccttcaacggactcgacaaaggagagccggtcaacgaggcagacgccgcggccctcgagcacgacaaggcctacgaccggcagctcgacagcggagacaacccgtacctcaagtacaaccacgccgacgcggagtttcaggagcgccttaaagaagatacgtcttttgggggcaacctcgcaagagcagtattccaggcgaaaaagagggttcttgaacctctgggcctggttgaggagcctgttaagacggctccgggaaaaaagaggccggtagagcactctcctgcggagccagattcctcctccggaactggaaagtcgggccaacagcctgcaagaaagagattgaattttggtcagactggagacgcagactccgtacctgacccccagcctctcggacagccaccagcagccccctctggtctgggaactaatacgatggcttcaggcagtggcgcaccaatggcagacaataacgagggcgccgacggagtgggtaattcctcgggaaattggcattgcgattccacatggatgggcgacagagtcatcaccaccagcacccgcacctgggctctgcccacctacaacaaccatctgtacaagcaaatttccagccagtctggagccagcaacgacaaccactactttggctacagcaccccttgggggtattttgacttcaacagattccactgccacttctccccacgtgactggcaaagactcatcaacaacaattggggattccggcccaaaagactcaacttcaagctctttaacattcaagtcaaggaggtcacgcagaatgacggtacgacgacgattgccaataaccttaccagcacggttcaggtgtttactgactcggagtaccagctcccgtacgtcctcggctcggcgcatcaaggatgcctcccgccgttcccagcagacgtcttcatggtgccacagtatggatacctcaccctgaacaacgggagtcaggcggtaggacgctcttcattttactgcccggagtaccttccttctcagatgctgcgtaccggaaacaactttaccttcagctacacctttgaggacgttccttttcacagcagctacgctcacagccagagtttggaccgtctcatgaatcctctcatcgaccagtacctgtattacttgagcagaacaaacactccaagcggaaccactacgcagtccaggcttcagttttctcaagccggagcgagtgacattcgggaccagtctaggaactggcttcctggaccctgttaccgccagcagcgagtatcaaagacagctgcggacaacaacaacagtgattactcgtggactggagctaccaagtatcacctcaatggaagagactctctggtgaatccgggcacagccatggccagccacaaggacgatgaagaaaagtattttcctcagagcggggttctcatctttcggaaacaagactcgggaaaaactaatgtggacattgaaaaggtcatgattacagacgaagaggaaatcaggaccaccaatcccgtggctacggagcagtatggttctgtatctaccaatctccagagcggcaacacacaagcagctacctcagatgtcaacacacaaggcgttcttccaggcatggtctggcaggacagagacgtgtacctgcagggacccatctgggcaaagattccacacacggacggacattttcacccttctcctcttatgggaggatttggactgaagcaccctcccccgcagattctcatcaagaataccccggtacctgcgaatccttctaccgccttcagcgcggcaaagtttgcttccttcatcacacagtactccacggggcaggtcagcgtggagatcgagtgggagctgcagaaagagaacagcgaacgctggaaccccgagatccagtatacctccaactacaacaagtctgttaatgtggactttactgtggacactaatggcgtgtattcagagcctcgccccattggcacaaggtacctgactcgtaatctgtaa

SEQ ID NO: 3277 - DNA, 2208 bp, synthetic construct
  misc_feature 1..2208: note = source = /note="Description of Artificial Sequence: Synthetic polynucleotide"
  source 1..2208: mol_type = other DNA
atggctgccgatggttatcttccagattggctcgaggacactctctctgaaggaataagacagtggtggaagctcaaacctggcccaccaccgccaaagcccgcagagcggcataaggacgacagcaggggtcttgtgcttcctgggtacaagtacctcggacccttcaacggactcgacaaaggagagccggtcaacgaggcagacgccgcggccctcgagcacgacaaggcctacgaccggcagctcgacagcggagacaacccgtacctcaagtacaaccacgccgacgcggagtttcaggagcgccttaaagaagatacgtcttttgggggcaacctcgcaagagcagtattccaggcgaaaaagagggttcttgaacctctgggcctggttgaggagcctgttaagacggctccgggaaaaaagaggccggtagagcactctcctgcggagccagattcctcctccggaactggaaagtcgggccaacagcctgcaagaaagagattgaattttggtcagactggagacgcagactccgtacctgacccccagcctctcggacagccaccagcagccccctctggtctgggaactaatacgatggcttcaggcagtggcgcaccaatggcagacaataacgagggcgccgacggagtgggtaattcctcgggaaattggcattgcgattccacatggatgggcgacagagtcatcaccaccagcacccgcacctgggctctgcccacctacaacaaccatctgtacaagcaaatttccagccagtctggagccagcaacgacaaccactactttggctacagcaccccttgggggtattttgacttcaacagattccactgccacttctccccacgtgactggcaaagactcatcaacaacaattggggattccggcccaaaagactcaacttcaagctctttaacattcaagtcaaggaggtcacgcagaatgacggtacgacgacgattgccaataaccttaccagcacggttcaggtgtttactgactcggagtaccagctcccgtacgtcctcggctcggcgcatcaaggatgcctcccgccgttcccagcagacgtcctcatggtgccacagtatggatacctcaccctgaacaacgggagtcaggcggtaggacgctcttcattttactgcccggagtaccttccttctcagatgctgcgtaccggaaacaactttaccttcagctacacctttgaggacgttccttttcacagcagctacgctcacagccagagtttggaccgtctcatgaatcctctcatcgaccagtacctgtattacttgagcagaacaaacactccaagcggaaccactacgcagtccaggcttcagttttctcaagccggagcgagtgacattcgggaccagtctaggaactggcttcctggaccctgttaccgccagcagcgagtatcaaagacagctgcggacaacaacaacagtgattactcgtggactggagctaccaagtatcacctcaatggaagagactctctggtgaatccgggcacagccatggccagccacaaggacgatgaagaaaagtattttcctcagagcggggttctcatcttccggaaacaagactcgggaaaaactaatgtggacattgaaaaggtcatgattacagacgaagaggaaatcaggaccaccaatcccgtggctacggagcagtatggttctgtatctaccaatctccagagcggcaacacacaagcagctacctcagatgtcaacacacaaggcgttcttccaggcatggtctggcaggacagagacgtgtacctgcagggacccatctgggcaaagattccacacacggacggacattttcacccttctcctcttatgggaggatttggactgaagcaccctcccccgcagattctcatcaagaataccccggtacctgcgaatccttctaccgccttcagcgcggcaaagtttgcttccttcatcacacagtactccacggggcaggtcagcgtggagatcgagtgggagctgcagaaagagaacagcgaacgctggaaccccgagatccagtatacctccaactacaacaagtctgttaatgtggactttactgtggacactaatggcgtgtattcagagcctcgccccattggcacaaggtacctgactcgtaatctgtaa

SEQ ID NO: 3278 - DNA, 2208 bp, synthetic construct
  misc_feature 1..2208: note = source = /note="Description of Artificial Sequence: Synthetic polynucleotide"
  source 1..2208: mol_type = other DNA
atggctgccgatggttatcttccagattggctcgaggacactctctctgaaggaataagacagtggtggaagctcaaacctggcccaccaccgccaaagcccgcagagcggcataaggacgacagcaggggtcttgtgcttcctgggtacaagtacctcggacccttcaacggactcgacaaaggagagccggtcaacgaggcagacgccgcggccctcgagcacgacaaggcctacgaccggcagctcgacagcggagacaacccgtacctcaagtacaaccacgccgacgcggagtttcaggagcgccttaaagaagatacgtcttttgggggcaacctcgcaagagcagtattccaggcgaaaaagagggttcttgaacctctgggcctggttgaggagcctgttaagacggctccgggaaaaaagaggccggtagagcactctcctgcggagccagattcctcctccggaactggaaagtcgggccaacagcctgcaagaaagagattgaattttggtcagactggagacgcagactccgtacctgacccccagcctctcggacagccaccagcagccccctctggtctgggaactaatacgatggcttcaggcagtggcgcaccaatggcagacaataacgagggcgccgacggagtgggtaattcctcgggaaattggcattgcgattccacatggatgggcgacagagtcatcaccaccagcacccgcacctgggctctgcccacctacaacaaccatctgtacaagcaaatttccagccagtctggagccagcaacgacaaccactactttggctacagcaccccttgggggtattttgacttcaacagattccactgccacttctccccacgtgactggcaaagactcatcaacaacaattggggattccggcccaaaagactcaacttcaagctctttaacattcaagtcaaggaggtcacgcagaatgacggtacgacgacgattgccaataaccttaccagcacggttcaggtgtttactgactcggagtaccagctcccgtacgtcctcggctcggcgcatcaaggatgcctcccgccgttcccagcagacgtcctcatggtgccacagtatggatacctcaccctgaacaacgggagtcaggcggtaggacgctcttcattttactgcccggagtaccttccttctcagatgctgcgtaccggaaacaactttaccttcagctacacctttgaggacgttccttttcacagcagctacgctcacagccagagtttggaccgtctcatgaatcctctcatcgaccagtacctgtattacttgagcagaacaaacactccaagcggaaccactacgcagtccaggcttcagttttctcaagccggagcgagtgacattcgggaccagtctaggaactggcttcctggaccctgttaccgccagcagcgagtatcaaagacagctgcggacaacaacaacagtgattactcgtggactggagctaccaagtatcacctcaatggaagagactctctggtgaatccgggcacagccatggccagccacaaggacgatgaagaaaagtattttcctcagagcggggttctcatcttcggaaaacaagactcgggaaaaactaatgtggacattgaaaaggtcatgattacagacgaagaggaaatcaggaccaccaatcccgtggctacggagcagtatggttctgtatctaccaatctccagagcggcaacacacaagcagctacctcagatgtcaacacacaaggcgttcttccaggcatggtctggcaggacagagacgtgtacctgcagggacccatctgggcaaagattccacacacggacggacattttcacccttctcctcttatgggaggatttggactgaagcaccctcccccgcagattctcatcaagaataccccggtacctgcgaatccttctaccgccttcagcgcggcaaagtttgcttccttcatcacacagtactccacggggcaggtcagcgtggagatcgagtgggagctgcagaaagagaacagcgaacgctggaaccccgagatccagtatacctccaactacaacaagtctgttaatgtggactttactgtggacactaatggcgtgtattcagagcctcgccccattggcacaaggtacctgactcgtaatctgtaa

SEQ ID NO: 3279 - DNA, 2208 bp, synthetic construct
  misc_feature 1..2208: note = source = /note="Description of Artificial Sequence: Synthetic polynucleotide"
  source 1..2208: mol_type = other DNA
atggctgccgatggttatcttccagattggctcgaggacactctctctgaaggaataagacagtggtggaagctcaaacctggcccaccaccgccaaagcccgcagagcggcataaggacgacagcaggggtcttgtgcttcctgggtacaagtacctcggacccttcaacggactcgacaaaggagagccggtcaacgaggcagacgccgcggccctcgagcacgacaaggcctacgaccggcagctcgacagcggagacaacccgtacctcaagtacaaccacgccgacgcggagtttcaggagcgccttaaagaagatacgtcttttgggggcaacctcgcaagagcagtattccaggcgaaaaagagggttcttgaacctctgggcctggttgaggagcctgttaagacggctccgggaaaaaagaggccggtagagcactctcctgcggagccagattcctcctccggaactggaaagtcgggccaacagcctgcaagaaagagattgaattttggtcagactggagacgcagactccgtacctgacccccagcctctcggacagccaccagcagccccctctggtctgggaactaatacgatggcttcaggcagtggcgcaccaatggcagacaataacgagggcgccgacggagtgggtaattcctcgggaaattggcattgcgattccacatggatgggcgacagagtcatcaccaccagcacccgcacctgggctctgcccacctacaacaaccatctgtacaagcaaatttccagccagtctggagccagcaacgacaaccactactttggctacagcaccccttgggggtattttgacttcaacagattccactgccacttctccccacgtgactggcaaagactcatcaacaacaattggggattccggcccaaaagactcaacttcaagctctttaacattcaagtcaaggaggtcacgcagaatgacggtacgacgacgattgccaataaccttaccagcacggttcaggtgtttactgactcggagtaccagctcccgtacgtcctcggctcggcgcatcaaggatgcctcccgccgttcccagcagacgtcttcatggtgccacagtatggatacctcaccctgaacaacgggagtcaggcggtaggacgctcttcattttactgcccggagtaccttccttctcagatgctgcgtaccggaaacaactttaccttcagctacacctttgaggacgttccttttcacagcagctacgctcacagccagagtttggaccgtctcatgaatcctctcatcgaccagtacctgtattacttgagcagaacaaacactccaagcggaaccactacgcagtccaggcttcagttttctcaagccggagcgagtgacattcgggaccagtctaggaactggcttcctggaccctgttaccgccagcagcgagtatcaaagacagctgcggacaacaacaacagtgattactcgtggactggagctaccaagtatcacctcaatggaagagactctctggtgaatccgggcacagccatggccagccacaaggacgatgaagaaaagtattttcctcagagcggggttctcatcttcggaaaacaagactcgggaaaaactaatgtggacattgaaaaggtcatgattacagacgaagaggaaatcaggaccaccaatcccgtggctacggagcagtatggttctgtatctaccaatctccagagcggcaacacacaagcagctacctcagatgtcaacacacaaggcgttcttccaggcatggtctggcaggacagagacgtgtacctgcagggacccatctgggcaaagattccacacacggacggacattttcacccttctcctcttatgggaggatttggactgaagcaccctcccccgcagattctcatcaagaataccccggtacctgcgaatccttctaccgccttcagcgcggcaaagtttgcttccttcatcacacagtactccacggggcaggtcagcgtggagatcgagtgggagctgcagaaagagaacagcgaacgctggaaccccgagatccagtatacctccaactacaacaagtctgttaatgtggactttactgtggacactaatggcgtgtattcagagcctcgccccattggcacaaggtacctgactcgtaatctgtaa

SEQ ID NO: 3280 - DNA, 2208 bp, synthetic construct
  misc_feature 1..2208: note = source = /note="Description of Artificial Sequence: Synthetic polynucleotide"
  source 1..2208: mol_type = other DNA
atggctgccgatggttatcttccagattggctcgaggacactctctctgaaggaataagacagtggtggaagctcaaacctggcccaccaccgccaaagcccgcagagcggcataaggacgacagcaggggtcttgtgcttcctgggtacaagtacctcggacccttcaacggactcgacaaaggagagccggtcaacgaggcagacgccgcggccctcgagcacgacaaggcctacgaccggcagctcgacagcggagacaacccgtacctcaagtacaaccacgccgacgcggagtttcaggagcgccttaaagaagatacgtcttttgggggcaacctcgcaagagcagtattccaggcgaaaaagagggttcttgaacctctgggcctggttgaggagcctgttaagacggctccgggaaaaaagaggccggtagagcactctcctgcggagccagattcctcctccggaactggaaagtcgggccaacagcctgcaagaaagagattgaattttggtcagactggagacgcagactccgtacctgacccccagcctctcggacagccaccagcagccccctctggtctgggaactaatacgatggcttcaggcagtggcgcaccaatggcagacaataacgagggcgccgacggagtgggtaattcctcgggaaattggcattgcgattccacatggatgggcgacagagtcatcaccaccagcacccgcacctgggctctgcccacctacaacaaccatctgtacaagcaaatttccagccagtctggagccagcaacgacaaccactactttggctacagcaccccttgggggtattttgacttcaacagattccactgccacttctccccacgtgactggcaaagactcatcaacaacaattggggattccggcccaaaagactcaacttcaagctctttaacattcaagtcaaggaggtcacgcagaatgacggtacgacgacgattgccaataaccttaccagcacggttcaggtgtttactgactcggagtaccagctcccgtacgtcctcggctcggcgcatcaaggatgcctcccgccgttcccagcagacgtcctcatggtgccacagtatggatacctcaccctgaacaacgggagtcaggcggtaggacgctcttcattttactgcccggagtaccttccttctcagatgctgcgtaccggaaacaactttaccttcagctacacctttgaggacgttccttttcacagcagctacgctcacagccagagtttggaccgtctcatgaatcctctcatcgaccagtacctgtattacttgagcagaacaaacactccaagcggaaccactacgcagtccaggcttcagttttctcaagccggagcgagtgacattcgggaccagtctaggaactggcttcctggaccctgttaccgccagcagcgagtatcaaagacagctgcggacaacaacaacagtgattactcgtggactggagctaccaagtatcacctcaatggaagagactctctggtgaatccgggcacagccacggccagccacaaggacgatgaagaaaagtattttcctcagagcggggttctcatcttcggaaaacaagactcgggaaaaactaatgtggacattgaaaaggtcatgattacagacgaagaggaaatcaggaccaccaatcccgtggctacggagcagtatggttctgtatctaccaatctccagagcggcaacacacaagcagctacctcagatgtcaacacacaaggcgttcttccaggcatggtctggcaggacagagacgtgtacctgcagggacccatctgggcaaagattccacacacggacggacattttcacccttctcctcttatgggaggatttggactgaagcaccctcccccgcagattctcatcaagaataccccggtacctgcgaatccttctaccgccttcagcgcggcaaagtttgcttccttcatcacacagtactccacggggcaggtcagcgtggagatcgagtgggagctgcagaaagagaacagcgaacgctggaaccccgagatccagtatacctccaactacaacaagtctgttaatgtggactttactgtggacactaatggcgtgtattcagagcctcgccccattggcacaaggtacctgactcgtaatctgtaa

SEQ ID NO: 3281 - DNA, 2208 bp, synthetic construct
  misc_feature 1..2208: note = source = /note="Description of Artificial Sequence: Synthetic polynucleotide"
  source 1..2208: mol_type = other DNA
atggctgccgatggttatcttccagattggctcgaggacactctctctgaaggaataagacagtggtggaagctcaaacctggcccaccaccgccaaagcccgcagagcggcataaggacgacagcaggggtcttgtgcttcctgggtacaagtacctcggacccttcaacggactcgacaaaggagagccggtcaacgaggcagacgccgcggccctcgagcacgacaaggcctacgaccggcagctcgacagcggagacaacccgtacctcaagtacaaccacgccgacgcggagtttcaggagcgccttaaagaagatacgtcttttgggggcaacctcgcaagagcagtattccaggcgaaaaagagggttcttgaacctctgggcctggttgaggagcctgttaagacggctccgggaaaaaagaggccggtagagcactctcctgcggagccagattcctcctccggaactggaaagtcgggccaacagcctgcaagaaagagattgaattttggtcagactggagacgcagactccgtacctgacccccagcctctcggacagccaccagcagccccctctggtctgggaactaatacgatggcttcaggcagtggcgcaccaatggcagacaataacgagggcgccgacggagtgggtaattcctcgggaaattggcattgcgattccacatggatgggcgacagagtcatcaccaccagcacccgcacctgggctctgcccacctacaacaaccatctgtacaagcaaatttccagccagtctggagccagcaacgacaaccactactttggctacagcaccccttgggggtattttgacttcaacagattccactgccacttctccccacgtgactggcaaagactcatcaacaacaattggggattccggcccaaaagactcaacttcaagctctttaacattcaagtcaaggaggtcacgcagaatgacggtacgacgacgattgccaataaccttaccagcacggttcaggtgtttactgactcggagtaccagctcccgtacgtcctcggctcggcgcatcaaggatgcctcccgccgttcccagcagacgtcttcatggtgccacagtatggatacctcaccctgaacaacgggagtcaggcggtaggacgctcttcattttactgcccggagtaccttccttctcagatgctgcgtaccggaaacaactttaccttcagctacacctttgaggacgttccttttcacagcagctacgctcacagccagagtttggaccgtctcatgaatcctctcatcgaccagtacctgtattacttgagcagaacaaacactccaagcggaaccactacgcagtccaggcttcagttttctcaagccggagcgagtgacattcgggaccagtctaggaactggcttcctggaccctgttaccgccagcagcgagtatcaaagacagctgcggacaacaacaacagtgattactcgtggactggagctaccaagtatcacctcaatggaagagactctctggtgaatccgggcacagccatggccagccacaaggacgatggagaaaagtattttcctcagagcggggttctcatcttcggaaaacaagactcgggaaaaactaatgtggacattgaaaaggtcatgattacagacgaagaggaaatcaggaccaccaatcccgtggctacggagcagtatggttctgtatctaccaatctccagagcggcaacacacaagcagctacctcagatgtcaacacacaaggcgttcttccaggcatggtctggcaggacagagacgtgtacctgcagggacccatctgggcaaagattccacacacggacggacattttcacccttctcctcttatgggaggatttggactgaagcaccctcccccgcagattctcatcaagaataccccggtacctgcgaatccttctaccgccttcagcgcggcaaagtttgcttccttcatcacacagtactccacggggcaggtcagcgtggagatcgagtgggagctgcagaaagagaacagcgaacgctggaaccccgagatccagtatacctccaactacaacaagtctgttaatgtggaccttactgtggacactaatggcgtgtattcagagcctcgccccattggcacaaggtacctgactcgtaatctgtaa

SEQ ID NO: 3282 - DNA, 2208 bp, synthetic construct
  misc_feature 1..2208: note = source = /note="Description of Artificial Sequence: Synthetic polynucleotide"
  source 1..2208: mol_type = other DNA
atggctgccgatggttatcttccagattggctcgaggacactctctctgaaggaataagacagtggtggaagctcaaacctggcccaccaccgccaaagcccgcagagcggcataaggacgacagcaggggtcttgtgcttcctgggtacaagtacctcggacccttcaacggactcgacaaaggagagccggtcaacgaggcagacgccgcggccctcgagcacgacaaggcctacgaccggcagctcgacagcggagacaacccgtacctcaagtacaaccacgccgacgcggagtttcaggagcgccttaaagaagatacgtcttttgggggcaacctcgcaagagcagtattccaggcgaaaaagagggttcttgaacctctgggcctggttgaggagcctgttaagacggctccgggaaaaaaggggccggtagagcactctcctgcggagccagattcctcctccggaactggaaagtcgggccaacagcctgcaagaaagagattgaattttggtcagactggagacgcagactccgtacctgacccccagcctctcggacagccaccagcagccccctctggtctgggaactaatacgatggcttcaggcagtggcgcaccaatggcagacaataacgagggcgccgacggagtgggtaattcctcgggaaattggcattgcgattccacatggatgggcgacagagtcatcaccaccagcacccgcacctgggctctgcccacctacaacaaccatctgtacaagcaaatttccagccagtctggagccagcaacgacaaccactactttggctacagcaccccttgggggtattttgacttcaacagattccactgccacttctccccacgtgactggcaaagactcatcaacaacaattggggattccggcccaaaagactcaacttcaagctctttaacattcaagtcaaggaggtcacgcagaatgacggtacgacgacgattgccaataaccttaccagcacggttcaggtgtttactgactcggagtaccagctcccgtacgtcctcggctcggcgcatcaaggatgcctcccgccgttcccagcagacgtcttcatggtgccacagtatggatacctcaccctgaacaacgggagtcaggcggtaggacgctcttcattttactgcctggagtactttccttctcagatgctgcgtaccggaaacaactttaccttcagctacacctttgaggacgttccttttcacagcagctacgctcacagccagagtttggaccgtctcatgaatcctctcatcgaccagtacctgtattacttgagcagaacaaacactccaagcggaaccactacgcagtccaggcttcggttttctcaagccggagcgagtgacattcgggaccagtctaggaactggcttcctggaccctgttaccgccagcagcgagtatcaaagacagctgcggacaacaacaacagtgattactcgtggactggagctaccaagtatcacctcaatggaagagactctctggtgaatccgggcacagccatggccagccacaaggacgatgaagaaaagtattttcctcagagcggggttctcatcttcggaaaacaagactcgggaaaaactaatgtggacattgaaagggtcatgattacagacgaagaggaaatcaggaccaccaatcccgtggctacggagcagtatggttctgtatctaccaatctccagagcggcaacacacaagcagctacctcagatgtcaacacacaaggcgttcttccaggcatggtctggcaggacagagacgtgtacctgcagggacccatctgggcaaagattccacacacggacggacattttcacccttctcctcttatgggaggatttggactgaagcaccctcccccgcagattctcatcaagaataccccggtacctgcgaatccttctaccaccttcagcgcggcaaagtttgcttccttcatcacacagtactccacggggcaggtcagcgtggagatcgagtgggagctgcagaaagagaacagcaaacgctggaaccccgagatccagtatacctccaactacaacaagtctgttaatgtggactttactgtggacactaatggcgtgtattcagagcctcgccccattggcacaagatacctgactcgtaatctgtaa

SEQ ID NO: 3283 - DNA, 2208 bp, synthetic construct
  misc_feature 1..2208: note = source = /note="Description of Artificial Sequence: Synthetic polynucleotide"
  source 1..2208: mol_type = other DNA
atggctgccgatggttatcttccagattggctcgaggacactctctctgaaggaataagacagtggtggaagctcaaacctggcccaccaccgccaaagcccgcagagcggcataaggacgacagcaggggtcttgtgcttcctgggtacaagtacctcggacccttcaacggactcgacaaaggagagccggtcaacgaggcagacgccgcggccctcgagcacgacaaggcctacgaccggcagctcgacagcggagacaacccgtacctcaagtacaaccacgccgacgcggagtttcaggagcgccttaaagaagatacgtcttttgggggcaacctcgcaagagcagtattccaggcgaaaaagagggttcttgaacctctgggcctggttgaggagcctgttaagacggctccgggaaaaaagaggccggtagagcactctcctgcggggccagattcctcctccggaactggaaagtcgggccaacagcctgcaagaaagagattgaattttggtcagactggagacgcagactccgtacctgacccccagcctctcggacagccaccagcagccccctctggtctgggaactaatacgatggcttcaggcagtggcgcaccaatggcagacaataacgagggcgccgacggagtgggtaattcctcgggaaattggcattgcgattccacatggatgggcgacagagtcatcaccaccagcacccgcacctgggctctgcccacctacaacaaccatctgtacaagcaaatttccagccagtctggagccagcaacgacaaccactactttggctacagcaccccttgggggtattttgacttcaacagattccactgccacttctccccacgtgactggcaaagactcatcaacaacaattggggattccggcccaaaagactcaacttcgagctctttaacattcaagtcaaggaggtcacgcagaatgacggtacgacgacgattgccaataaccttaccagcacggttcaggtgtttactgactcggagtaccagctcccgtacgtcctcggctcggcgcatcaaggatgcctcccgccgttcccagcagacgtcttcatggtgccacagtatggatacctcaccctgaacaacgggagtcaggcggtaggacgctcttcattttactgcctggagtactttccttctcagatgctgcgtaccggaaacaactttaccttcagctacacctttgaggacgttccttttcacagcagctacgctcacagccagagtttggaccgtctcatgaatcctctcatcgaccagtacctgtattacttgagcagaacaaacactccaagcggaaccactacgcagtccaggcttcagttttctcaagccggagcgagtgacattcgggaccagtctaggaactggcttcctggaccctgttaccgccagcagcgagtatcaaagacagctgcggacaacaacaacagtgattactcgtggactggagctaccaagtatcacctcaatggaagagactctctggtgaatccgggcacagccatggccagccacaaggacgatgaagaaaagtattttcctcagagcggggttctcatcttcggaaaacaagactcgggaaaaactaatgtggacattgaaaaggtcatgattacagacgaagaggaaatcaggaccaccaatcccgtggctacggagcagtatggttctgtatctaccaatctccagagcggcaacacacaagcagctacctcagatgtcaacacacaaggcgttcttccaggcatggtctggcaggacagagacgtgtacctgcagggacccatctgggcaaagattccacacacggacggacactttcacccttctcctcttatgggaggatttggactgaagcaccctcccccgcagattctcatcaagagtaccccggtacctgcgaatccttctaccaccttcagcgcggcaaagtttgcttccttcatcacacagtactccacggggcaggtcagcgtggagatcgagtgggagctgcagaaagagaacagcaaacgctggaaccccgagatccagtatacctccaactacaacaagtctgttaatgtggactttactgtggacactaatggcgtgtattcagatcctcgccccattggcacaagatacctgactcgtaatctgtaa

SEQ ID NO: 3284 - DNA, 2208 bp, synthetic construct
  misc_feature 1..2208: note = source = /note="Description of Artificial Sequence: Synthetic polynucleotide"
  source 1..2208: mol_type = other DNA
atggctgccgatggttatcttccagattggctcgaggacactctctctgaaggaataagacagtggtggaagctcaaacctggcccaccaccaccaaggcccgcagagcggcatcaggacgacagcaggggtcttgtgcttcctgggtacaagtacctcggacccttcaacggactcgacaaaggagagccggtcaacgaggcagacgctgcggccctcgagcacgacaaggcctacgaccggcagctcgacagcggagacaacccgtacctcaagtacaaccacgccgacgcggagtttcaggagcgtcttaaagaagatacgtcttttgggggcaacctcggacgagcagtcttccaggcgaaaaagagggttcttgaacctctgggcctggttgaggaacctgttaagacggctccgggaaaaaagaggccggtagagcactctcctgcggagccagactcctcctcgggaaccggaaaagcgggccagcagcctgcaagaaagagattgaatttcggtcagactggagacgcagactccgtacctgacccccagcctctcggacagccaccagcagcccccacaagtttgggatctactacaatggctacaggcagtggcgcaccaatggcagacaataacgagggtgccgatggagtgggtaattcctcaggaaattggcattgcgattcccaatggctgggcgacagagtcatcaccaccagcacccgaacctgggccctgcccacctacaacaaccacctctacaagcaaatctccagccaatcaggagcatcgaacgacaaccactactttggctacagcaccccttgggggtattttgacttcaacagattccactgtcacttctccccacgtgactggcaaagactcatcaacaacaactggggattccgacccaagagactcaacttcaagctctttaacattcaagtcaaagaggtcacgcagaatgacggtacgacgacgattgccaataaccttaccagcacggttcaggtgtttactgactcggagtaccagctcccgtacgtcctcggctcggcgcatcaaggatgcctcccgccgtttccagcggacgtcttcatggtcccacagtatggatacctcaccctgaacaacgggagtcaggcggtaggacgctcttcattttactgcctggagtactttccttctcagatgctgcgtaccggaaacaactttaccttcagctacacctttgaggacgttccttttcacagcagctacgctcacagccagagtttggaccgtctcatgaatcctctcatcgaccagtacctgtattacttgagcagaacaaacactccaagcggaaccactacgcagtccaggcttcggttttctcaagccggagcgagtgacattcgggaccagtctaggaactggcttcctggaccctgttaccgccagcagcgagtatcaaagacagctgcggacaacaacaacagtgattactcgtggactggagctaccaagtatcacctcaatggaagagactctctggtgaatccgggcacagccatggccagccacaaggacgatgaagaaaagtattttcctcagagcggggttctcatcttcggaaaacaagactcgggaaaaactaatgtggacattgaaagggtcatgattacagacgaagaggaaatcaggaccaccaatcccgtggctacggagcagtatggttctgtatctaccaatctccagagcggcaacacacaagcagctacctcagatgtcaacacacaaggcgttcttccaggcatggtctggcaggacagagacgtgtacctgcagggacccatctgggcaaagattccacacacggacggacattttcacccttctcctcttatgggaggatttggactgaagcaccctcccccgcagattctcatcaagaataccccggtacctgcgaatccttctaccaccttcagcgcggcaaagtttgcttccttcatcacacagtactccacggggcaggtcagcgtggagatcgagtgggagctgcagaaagagaacagcaaacgctggaaccccgagatccagtatacctccaactacaacaagtctgttaatgtggactttactgtggacactaatggcgtgtattcagagcctcgccccattggcacaagatacctgactcgtaatctgtaa

SEQ ID NO: 3285 - DNA, 2208 bp, synthetic construct
  misc_feature 1..2208: note = source = /note="Description of Artificial Sequence: Synthetic polynucleotide"
  source 1..2208: mol_type = other DNA
atggctgccgatggttatcttccagattggctcgaggacactctctctgaaggaataagacagtggtggaagctcaaacctggcccaccaccaccaaggcccgcagagcggcatcaggacgacagcaggggtcttgtgcttcctgggtacaagtacctcggacccttcaacggactcgacaaaggagagccggtcaacgaggcagacgctgcggccctcgagcacgacaaggcctacgaccggcagctcgacagcggagacaacccgtacctcaagtacaaccacgccgacgcggagtttcaggagcgtcttaaagaagatacgtcttttgggggcaacctcggacgagcagtcttccaggcgaaaaagagggttcttgaacctctgggcctggttgaggaacctgttaagacggctccgggaaaaaagaggccggtagagcactctcctgcggagccagactcctcctcgggaaccggaaaagcgggccagcagcctgcaagaaagagattgaatttcggtcagactggagacgcagactccgtacctgacccccagcctctcggacagccaccagcagccccctctggtctgggaactaatacgatggcttcaggcagtggcgcaccaatggcagacaataacgagggcgccgacggagtgggtaattcctcgggaaattggcattgcgattccacatggatgggcgacagagtcatcaccaccagcacccgcacctgggctctgcccacctacaacaaccatctgtacaagcaaatttccagccagtctggagccagcaacgacaaccactactttggctacagcaccccttgggggtattttgacttcaacagattccactgccacttctccccacgtgactggcaaagactcatcaacaacaattggggattccggcccaaaagactcaacttcaagctctttaacattcaagtcaaggaggtcacgcagaatgacggtacgacgacgattgccaataaccttaccagcacggttcaggtgtttactgactcggagtaccagctcccgtacgtcctcggctcggcgcatcaaggatgcctcccgccgttcccagcagacgtcttcatggtgccacagtatggatacctcaccctgaacaacgggagtcaggcggtaggacgctcttcattttactgcctggagtactttccttctcagatgctgcgtaccggaaacaactttaccttcagctacacctttgaggacgttccttttcacagcagctacgctcacagccagagtttggaccgtctcatgaatcctctcatcgaccagtacctgtattacttgagcagaacaaacactccaagcggaaccactacgcagtccaggcttcggttttctcaagccggagcgagtgacattcgggaccagtctaggaactggcttcctggaccctgttaccgccagcagcgagtatcaaagacagctgcggacaacaacaacagtgattactcgtggactggagctaccaagtatcacctcaatggaagagactctctggtgaatccgggcacagccatggccagccacaaggacgatgaagaaaagtattttcctcagagcggggttctcatcttcggaaaacaagactcgggaaaaactaatgtggacattgaaagggtcatgattacagacgaagaggaaatcaggaccaccaatcccgtggctacggagcagtatggttctgtatctaccaatctccagagcggcaacacacaagcagctacctcagatgtcaacacacaaggcgttcttccaggcatggtctggcaggacagagacgtgtacctgcagggacccatctgggcaaagattccacacacggacggacattttcacccttctcctcttatgggaggatttggactgaagcaccctcccccgcagattctcatcaagaataccccggtacctgcgaatccttctaccaccttcagcgcggcaaagtttgcttccttcatcacacagtactccacggggcaggtcagcgtggagatcgagtgggagctgcagaaagagaacagcaaacgctggaaccccgagatccagtatacctccaactacaacaagtctgttaatgtggactttactgtggacactaatggcgtgtattcagagcctcgccccattggcacaagatacctgactcgtaatctgtaa

SEQ ID NO: 3286 - DNA, 2208 bp, synthetic construct
  misc_feature 1..2208: note = source = /note="Description of Artificial Sequence: Synthetic polynucleotide"
  source 1..2208: mol_type = other DNA
atggctgccgatggttatcttccagattggctcgaggacactctctctgaaggaataagacagtggtggaagctcaaacctggcccaccaccgccaaagcccgcagagcggcataaggacgacagcaggggtcttgtgcttcctgggtacaagtacctcggacccttcaacggactcgacaaaggagagccggtcaacgaggcagacgccgcggccctcgagcacgacaaggcctacgaccggcagctcgacagcggagacaacccgtacctcaagtacaaccacgccgacgcggagtttcaggagcgccttaaagaagatacgtcttttgggggcaacctcgcaagagcagtattccaggcgaaaaagagggttcttgaacctctgggcctggttgaggagcctgttaagacggctccgggaaaaaagaggccggtagagcactctcctgcggggccagattcctcctccggaactggaaagtcgggccaacagcctgcaagaaagagattgaattttggtcagactggagacgcagactccgtacctgacccccagcctctcggacagccaccagcagccccctctggtctgggaactaatacgatggcttcaggcagtggcgcaccaatggcagacaataacgagggcgccgacggagtgggtaattcctcgggaaattggcattgcgattccacatggatgggcgacagagtcatcaccaccagcacccgcacctgggctctgcccacctacaacaaccatctgtacaagcaaatttccagccagtctggagccagcaacgacaaccactactttggctacagcaccccttgggggtattttgacttcaacagattccactgccacttctccccacgtgactggcaaagactcatcaacaacaattggggattccggcccaaaagactcaacttcgagctctttaacattcaagtcaaggaggtcacgcagaatgacggtacgacgacgattgccaataaccttaccagcacggttcaggtgtttactgactcggagtaccagctcccgtacgtcctcggctcggcgcatcaaggatgcctcccgccgttcccagcagacgtcttcatggtgccacagtatggatacctcaccctgaacaacgggagtcaggcggtaggacgctcttcattttactgcctggagtactttccttctcagatgctgcgtaccggaaacaactttaccttcagctacacctttgaggacgttccttttcacagcagctacgctcacagccagagtttggaccgtctcatgaatcctctcatcgaccagtacctgtattacttgagcagaacaaacactccaagcggaaccactacgcagtccaggcttcagtttcctcaagccggagcgagtgacattcgggaccagtctaggaactggcttcctggaccctgttaccgccagcagcgagtatcaaagacagctgcggacaacaacaacagtgattactcgtggactggagctaccaagtatcacctcaatggaagagactctctggtgaatccgggcacagccatggccagccacaaggacgatgaagaaaagtattttcctcagagcggggttctcatcttcggaaaacaagactcgggaaaaactaatgtggacattgaaaaggtcatgattacagacgaagaggaaatcaggaccaccaatcccgtggctacggagcagtatggttctgtatctaccaatctccagagcggcaacacacaagcagctacctcagatgtcaacacacaaggcgttcttccaggcatggtctggcaggacagagacgtgtacctgcagggacccatctgggcaaagattccacacacggacggacactttcacccttctcctcttatgggaggatttggactgaagcaccctcccccgcagattctcatcaagagtaccccggtacctgcgaatccttctaccaccttcagcgcggcaaagtttgcttccttcatcacacagtactccacggggcaggtcagcgtggagatcgagtgggagctgcagaaagagaacagcaaacgctggaaccccgagatccagtatacctccaactacaacaagtctgttaatgtggactttactgtggacactaatggcgtgtattcagagcctcgccccattggcacaagatacctgactcgtaatctgtaa

SEQ ID NO: 3287 - DNA, 2208 bp, synthetic construct
  misc_feature 1..2208: note = source = /note="Description of Artificial Sequence: Synthetic polynucleotide"
  source 1..2208: mol_type = other DNA
atggctgccgatggttatcttccagattggctcgaggacactctctctgaaggaataagacagtggtggaagctcaaacctggcccaccaccaccaaggcccgcagagcggcatcaggacgacagcaggggtcttgtgcttcctgggtacaagtacctcggacccttcaacggactcgacaaaggagagccggtcaacgaggcagacgctgcggccctcgagcacgacaaggcctacgaccggcagctcgacagcggagacaacccgtacctcaagtacaaccacgccgacgcggagtttcaggagcgtcttaaagaagatacgtcttttgggggcaacctcggacgagcagtcttccaggcgaaaaagagggttcttgaacctctgggcctggttgaggaacctgttaagacggctccgggaaaaaagaggccggtagagcactctcctgcggagccagattcctcctccggaactggaaagtcgggccaacagcctgcaagaaagagattgaattttggtcagactggagacgcagactccgtacctgacccccagcctctcggacagccaccagcagccccctctggtctgggaactaatacgatggcttcaggcagtggcgcaccaatggcagacaataacgagggcgccgacggagtgggtaattcctcgggaaattggcattgcgattccacatggatgggcgacagagtcatcaccaccagcacccgcacctgggctctgcccacctacaacaaccatctgtacaagcaaatttccagccagtctggagccagcaacgacaaccactactttggctacagcaccccttgggggtattttgacttcaacagattccactgccacttctccccacgtgactggcaaagactcatcaacaacaattggggattccggcccaaaagactcaacttcaagctctttaacattcaagtcaaggaggtcacgcagaatgacggtacgacgacgattgccaataaccttaccagcacggttcaggtgtttactgactcggagtaccagctcccgtacgtcctcggctcggcgcatcaaggatgcctcccgccgttcccagcagacgtcttcatggtgccacagtatggatacctcaccctgaacaacgggagtcaggcggtaggacgctcttcattttactgcctggagtactttccttctcagatgctgcgtaccggaaacaactttaccttcagctacacctttgaggacgttccttttcacagcagctacgctcacagccagagtttggaccgtctcatgaatcctctcatcgaccagtacctgtattacttgagcagaacaaacactccaagcggaaccactacgcagtccaggcttcggttttctcaagccggagcgagtgacattcgggaccagtctaggaactggcttcctggaccctgttaccgccagcagcgagtatcaaagacagctgcggacaacaacaacagtgattactcgtggactggagctaccaagtatcacctcaatggaagagactctctggtgaatccgggcacagccatggccagccacaaggacgatgaagaaaagtattttcctcagagcggggttctcatcttcggaaaacaagactcgggaaaaactaatgtggacattgaaagggtcatgattacagacgaagaggaaatcaggaccaccaatcccgtggctacggagcagtatggttctgtatctaccaatctccagagcggcaacacacaagcagctacctcagatgtcaacacacaaggcgttcttccaggcatggtctggcaggacagagacgtgtacctgcagggacccatctgggcaaagattccacacacggacggacattttcacccttctcctcttatgggaggatttggactgaagcaccctcccccgcagattctcatcaagaataccccggtacctgcgaatccttctaccaccttcagcgcggcaaagtttgcttccttcatcacacagtactccacggggcaggtcagcgtggagatcgagtgggagctgcagaaagagaacagcaaacgctggaaccccgagatccagtatacctccaactacaacaagtctgttaatgtggactttactgtggacactaatggcgtgtattcagagcctcgccccattggcacaagatacctgactcgtaatctgtaa

SEQ ID NO: 3288 - DNA, 2208 bp, synthetic construct
  misc_feature 1..2208: note = source = /note="Description of Artificial Sequence: Synthetic polynucleotide"
  source 1..2208: mol_type = other DNA
atggctgccgatggttatcttccagattggctcgaggacactctctctgaaggaataagacagtggtggaagctcaaacctggcccaccaccgccaaagcccgcagagcggcataaggacgacagcaggggtcttgtgcttcctgggtacaagtacctcggacccttcaacggactcgacaaaggagagccggtcaacgaggcagacgccgcggccctcgagcacgacaaggcctacgaccggcagctcgacagcggagacaacccgtacctcaagtacaaccacgccgacgcggagtttcaggagcgccttaaagaagatacgtcttttgggggcaacctcgcaagagcagtattccaggcgaaaaagagggttcttgaacctctgggcctggttgaggagcctgttaagacggctccgggaaaaaagaggccggtagagcactctcctgcggagccagattcctcctccggaactggaaagtcgggccaacagcctgcaagaaagagattgaattttggtcagactggagacgcagactccgtacctgacccccagcctctcggacagccaccagcagccccctctggtctgggaactaatacgatggcttcaggcagtggcgcaccaatggcagacaataacgagggcgccgacggagtgggtaattcctcgggaaattggcattgcgattccacatggatgggcgacagagtcatcaccaccagcacccgcacctgggctctgcccacctacaacaaccatctgtacaagcaaatttccagccagtctggagccagcaacgacaaccactactttggctacagcaccccttgggggtattttgacttcaacagattccactgccacttctccccacgtgactggcaaagactcatcaacaacaattggggattccggcccaaaagactcaacttcaagctctttaacattcaagtcaaggaggtcacgcagaatgacggtacgacgacgattgccaataaccttaccagcacggttcaggtgtttactgactcggagtaccagctcccgtacgtcctcggctcggcgcatcaaggatgcctcccgccgttcccagcagacgtcttcatggtgccacagtatggatacctcaccctgaacaacgggagtcaggcggtaggacgctcttcattttactgcctggagtactttccttctcagatgctgcgtaccggaaacaactttaccttcagctacacctttgaggacgttccttttcacagcagctacgctcacagccagagtttggaccgtctcatgaatcctctcatcgaccagtacctgtattacttgagcagaacaaacactccaagcggaaccactacgcagtccaggcttcggttttctcaagccggagcgagtgacattcgggaccagtctaggaactggcttcctggaccctgttaccgccagcagcgagtatcaaagacagctgcggacaacaacaacagtgattactcgtggactggagctaccaagtatcacctcaatggaagagactctctggtgaatccgggcacagccatggccagccacaaggacgatgaagaaaagtattttcctcagagcggggttctcatcttcggaaaacaagactcgggaaaaactaatgtggacattgaaagggtcatgattacagacgaagaggaaatcaggaccaccaatcccgtggctacggagcagtatggttctgtatctaccaatctccagagcggcaacacacaagcagctacctcagatgtcaacacacaaggcgttcttccaggcatggtctggcaggacagagacgtgtacctgcagggacccatctgggcaaagattccacacacggacggacattttcacccttctcctcttatgggaggatttggactgaagcaccctcccccgcagattctcatcaagaataccccggtacctgcgaatccttctaccaccttcagcgcggcaaagtttgcttccttcatcacacagtactccacggggcaggtcagcgtggagatcgagtgggagctgcagaaagagaacagcaaacgctggaaccccgagatccagtatacctccaactacaacaagtctgttaatgtggactttactgtggacactaatggcgtgtattcagagcctcgccccattggcacaagatacctgactcgtaatctgtaa

SEQ ID NO: 3289 - DNA, 2208 bp, synthetic construct
  misc_feature 1..2208: note = source = /note="Description of Artificial Sequence: Synthetic polynucleotide"
  source 1..2208: mol_type = other DNA
atggctgccgatggttatcttccagattggctcgaggacactctctctgaaggaataagacagtggtggaagctcaaacctggcccaccaccgccaaagcccgcagagcggcataaggacgacagcaggggtcttgtgcttcctgggtacaagtacctcggacccttcaacggactcgacaaaggagagccggtcaacgaggcagacgccgcggccctcgagcacgacaaggcctacgaccggcagctcgacagcggagacaacccgtacctcaagtacaaccacgccgacgcggagtttcaggagcgccttaaagaagatacgtcttttgggggcaacctcgcaagagcagtattccaggcgaaaaagagggttcttgaacctctgggcctggttgaggagcctgttaagacggctccgggaaaaaagaggccggtagagcactctcctgcggagccagattcctcctccggaactggaaagtcgggccaacagcctgcaagaaagagattgaattttggtcagactggagacgcagactccgtacctgacccccagcctctcggacagccaccagcagccccctctggtctgggaactaatacgatggcttcaggcagtggcgcaccaatggcagacaataacgagggcgccgacggagtgggtaattcctcgggaaattggcattgcgattccacatggatgggcgacagagtcatcaccaccagcacccgcacctgggctctgcccacctacaacaaccatctgtacaagcaaatttccagccagtctggagccagcaacgacaaccactactttggctacagcaccccttgggggtattttgacttcaacagattccactgccacttctccccacgtgactggcaaagactcatcaacaacaattggggattccggcccaaaagactcaacttcaagctctttaacattcaagtcaaggaggtcacgcagaatgacggtacgacgacgattgccaataaccttaccagcacggttcaggtgtttactgactcggagtaccagctcccgtacgtcctcggctcggcgcatcaaggatgcctcccgccgttcccagcagacgtcttcatggtgccacagtatggatacctcaccctgaacaacgggagtcagacggtaggacgctcttcattttactgcctggagtactttccttctcagatgctgcgtaccggaaacaactttaccttcagctacacctttgaggacgttccttttcacagcagctacgctcacagccagagtttggaccgtctcatgaatcctctcatcgaccagtacctgtattacttgagcagaacaaacactccaagcggaaccactacgcagtccaggcttcggttttctcaagccggagcgagtgacattcgggaccagtctaggaactggcttcctggaccctgttaccgccagcagcgagtatcaaagacagctgcggacaacaacaacagtgattactcgtggactggagctaccaagtatcacctcaatggaagagactctctggtgaatccgggcacagccatggccagccacaaggacgatgaagaaaagtattttcctcagagcggggttctcatcttcggaaaacaagactcgggaaaaactaatgtggacattgaaagggtcatgattacagacgaagaggaaatcaggaccaccaatcccgtggctacggagcagtatggttctgtatctaccaatctccagagcggcaacacacaagcagctacctcagatgtcaacacacaaggcgttcttccaggcatggtctggcaggacagagacgtgtacctgcagggacccatctgggcaaagattccacacacggacggacattttcacccttctcctcttatgggaggatttggactgaagcaccctcccccgcagattctcatcaagaataccccggtacctgcgaatccttctaccaccttcagcgcggcaaagtttgcttccttcatcacacagtactccacggggcaggtcagcgtggagatcgagtgggagctgcagaaagagaacagcaaacgctggaaccccgagatccagtatacctccaactacaacaagtctgttaatgtggactttactgtggacactaatggcgtgtattcagagcctcgccccattggcacaagatacctgactcgtaatctgtaa

SEQ ID NO: 3290 - DNA, 2208 bp, synthetic construct
  misc_feature 1..2208: note = source = /note="Description of Artificial Sequence: Synthetic polynucleotide"
  source 1..2208: mol_type = other DNA
atggctgccgatggttatcttccagattggctcgaggacactctctctgaaggaataagacagtggtggaagctcaaacctggcccaccaccgccaaagcccgcagagcggcataaggacgacagcaggggtcttgtgcttcctgggtacaagtacctcggacccttcaacggactcgacaaaggagagccggtcaacgaggcagacgccgcggccctcgagcacgacaaggcctacgaccggcagctcgacagcggagacaacccgtacctcaagtacaaccacgccgacgcggagtttcaggagcgccttaaagaagatacgtcttttgggggcaacctcgcaagagcagtattccaggcgaaaaagagggttcttgaacctctgggcctggttgaggagcctgttaagacggctccgggaaaaaagaggccggtagagcactctcctgcggagccagattcctcctccggaactggaaagtcgggccaacagcctgcaagaaagagattgaattttggtcagactggagacgcagactccgtacctgacccccagcctctcggacagccaccagcagccccctctggtctgggaactaatacgatggcttcaggcagtggcgcaccaatggcagacaataacgagggcgccgacggagtgggtaattcctcgggaaattggcattgcgattccacatggatgggcgacagagtcatccccaccagcacccgcacctgggctctgcccacctacaacaaccatctgtacaagcaaatttccagccagtctggagccagcaacgacaaccactactttggctacagcaccccttgggggtattttgacttcaacagattccactgccacttctccccacgtgactggcaaagactcatcaacaacaattggggattccggcccaaaagactcaacttcaagctctttaacattcaagtcaaggaggtcacgcagaatgacggtacgacgacgattgccaataaccttaccagcacggttcaggtgtttactgactcggggtaccagctcccgtacgtcctcggctcggcgcatcaaggatgcctcccgccgttcccagcagacgtcttcatggtgccacagtatggatacctcaccctgaacaacgggagtcaggcggtaggacgctcttcattttactgcctggagtactttccttctcagatgctgcgtaccggaaacaactttaccttcagctacacctttgaggacgttccttttcacagcagctacgctcacagccagagtttggaccgtctcatgaatcctctcatcgaccagtacctgtattacttgagcagaacaaacactccaagcggaaccactacgcagtccaggcttcggttttctcaagccggagcgagtgacattcgggaccagtctaggaactggcttcctggaccctgttaccgccagcagcgagtatcaaagacagctgcggacaacaacaacagtgattactcgtggactggagctaccaagtatcacctcaatggaagagactctctggtgaatccgggcacagccatggccagccacaaggacgatgaagaaaagtattttcctcagagcggggttctcatcttcggaaaacaagactcgggaaaaactaatgtggacattgaaagggtcatgattacagacgaagaggaaatcaggaccaccaatcccgtggctacggagcagtatggttctgtatctaccaatctccagagcggcaacacacaagcagctacctcagatgtcaacacacaaggcgttcttccaggcatggtctggcaggacagagacgtgtacctgcagggacccatctgggcaaagattccacacacggacggacattttcacccttctcctcttatgggaggatttggactgaagcaccctcccccgcagattctcatcaagaataccccggtacctgcgaatccttctaccaccttcagcgcggcaaagtttgcttccttcatcacacagtactccacggggcaggtcagcgtggagatcgagtgggagctgcagaaagagaacagcaaacgctggaaccccgagatccagtatacctccaactacaacaagtctgttaatgtggactttactgtggacactaatggcgtgtattcagagcctcgccccattggcacaagatacctgactcgtaatctgtaa

SEQ ID NO: 3291 - DNA, 2208 bp, synthetic construct
  misc_feature 1..2208: note = source = /note="Description of Artificial Sequence: Synthetic polynucleotide"
  source 1..2208: mol_type = other DNA
atggctgccgatggttatcttccagattggctcgaggacactctctctgaaggaataagacagtggtggaagctcaaacctggcccaccaccgccaaagcccgcagagcggcataaggacgacagcaggggtcttgtgcttcctgggtacaagtacctcggacccttcaacggactcgacaaaggagagccggtcaacgaggcagacgccgcggccctcgagcacgacaaggcctacgaccggcagctcgacagcggagacaacccgtacctcaagtacaaccacgccgacgcggagtttcaggagcgccttaaagaagatacgtcttttgggggcaacctcgcaagagcagtattccaggcgaaaaagagggttcttgaacctctgggcctggttgaggagcctgttaagacggctccgggaaaaaagaggccggtagagcactctcctgcggagccagattcctcctccggaactggaaagtcgggccaacagcctgcaagaaagagattgaattttggtcagactggagacgcagactccgtacctgacccccagcctctcggacagccaccagcagccccctctggtctgggaactaatacgatggcttcaggcagtggcgcaccaatggcagacaataacgagggcgccgacggagtgggtaattcctcgggaaattggcattgcgattccacatggatgggcgacagagtcatcaccaccagcacccgcacctgggctctgcccacctacaacaaccatctgtacaagcaaatttccagccagtctggagccagcaacgacaaccactactttggctacagcaccccttgggggtattttgacttcaacagattccactgccacttctccccacgtgactggcaaagactcatcaacaacaattggggattccggcccaaaagactcaacttcaagctctttaacattcaagtcaaggaggtcacgcagaatgacggtacgacgacgattgccaataaccttaccagcacggttcaggtgtttactgactcggagtaccagctcccgtacgtcctcggctcggcgcatcaaggatgcctcccgccgttcccagcagacgtcttcatggtgccacagtatggatacctcaccctgaacaacgggagtcaggcggtaggacgctcttcattttactgcctggagtactttccttctcagatgctgcgtaccggaaacaactttaccttcagctacacctttgaggacgttccttttcacagcagctacgctcacagccagagtttggaccgtctcatgaatcctctcatcgaccagtacctgtattacttgagcagaacaaacactccaagcggaaccactacgcagtccaggcttcggttttctcaagccggagcgagtgacattcgggaccagtctaggaactggcttcctggaccctgttaccgccagcagcgagtatcaaagacagctgcggacaacaacaacagtgattactcgtggactggagctaccaagtatcacctcaatggaagagactctctggtgaatccgggcacagccatggccagccacaaggacgatgaagaaaagtattttcctcagagcggggttctcatcttcggaaaacaagactcgggaaaaactaatgtggacattgaaagggtcatgattacagacgaagaggaaatcaggaccaccaatcccgtggctacggagcagtatggttctgtatctaccaatctccagagcggcgacacacaagcagctacctcagatgtcaacacacaaggcgttcttccaggcatggtctggcaggacagagacgtgtacctgcagggacccatctgggcaaagattccacacacggacggacattttcacccttctcctcttatgggaggatttggactgaagcaccctcccccgcagattctcatcaagaataccccggtacctgcgaatccttctaccaccttcagcgcggcaaagtttgcttccttcatcacacagtactccacggggcaggtcagcgtggagatcgagtgggagctgcagaaagagaacagcaaacgctggaaccccgagatccagtatacctccaactacaacaagtctgttaatgtggactttactgtggacactaatggcgtgtattcagagcctcgccccattggcacaagatacctgactcgtaatctgtaa

SEQ ID NO: 3292 - DNA, 2205 bp, synthetic construct
  misc_feature 1..2205: note = source = /note="Description of Artificial Sequence: Synthetic polynucleotide"
  source 1..2205: mol_type = other DNA
atggctgccgatggttatcttccagattggctcgaggacactctctctgaaggaataagacagtggtggaagctcaaacctggcccaccaccgccaaagcccgcagagcggcataaggacgacagcaggggtcttgtgcttcctgggtacaagtacctcggacccttcaacggactcgacaaaggagagccggtcaacgaggcagacgccgcggccctcgagcacgacaaggcctacgaccggcagctcgacagcggagacaacccgtacctcaagtacaaccacgccgacgcggagtttcaggagcgccttaaagaagatacgtcttttgggggcaacctcgcaagagcagtattccaggcgaaaaagagggttcttgaacctctgggcctggttgaggagcctgttaagacggctccgggaaaaaagaggccggtagagcactctcctgcggagccagattcctcctccggaactggaaagtcgggccaacagcctgcaagaaagagattgaattttggtcagactggagacgcagactccgtacctgacccccagcctctcggacagccaccagcagccccctctggtctgggaactaatacgatggcttcaggcagtggcgcaccaatggcagacaataacgagggcgccgacggagtgggtaattcctcgggaaattggcattgcgattccacatggatgggcgacagagtcatcaccaccagcacccgcacctgggctctgcccacctacaacaaccatctgtacaagcaaatttccagccagtctggagccagcaacgacaaccactactttggctacagcaccccttgggggtattttgacttcaacagattccactgccacttctccccacgtgactggcaaagactcatcaacaacaattggggattccggcccaaaagactcaacttcaagctctttaacattcaagtcaaggaggtcacgcagaatgacggtacgacgacgattgccaataaccttaccagcacggttcaggtgtttactgactcggagtaccagctcccgtacgtcctcggctcggcgcatcaaggatgcctcccgccgttcccagcagacgtcttcatggtgccacagtatggatacctcaccctgaacaacgggagtcaggcggtaggacgctcttcattttactgcctggagtactttccttctcagatgctgcgtaccggaaacaactttaccttcagctacacctttgaggacgttccttttcacagcagctacgctcacagccagagtttggaccgtctcatgaatcctctcatcgaccagtacctgtattacttgagcagaacaaacactccaagcggaaccactacgcagtccaggcttcggttttctcaagccggagcgagtgacattcgggaccagtctaggaactggcttcctggaccctgttaccgccagcagcgagtatcaaagacagctgcggacaacaacagtgattactcgtggactggagctaccaagtatcacctcaatggaagagactctctggtgaatccgggcacagccatggccagccacaaggacgatgaagaaaagtattttcctcagagcggggttctcatcttcggaaaacaagactcgggaaaaactaatgtggacattgaaagggtcatgattacagacgaagaggaaatcaggaccaccaatcccgtggctacggagcagtatggttctgtatctaccaatctccagagcggcaacacacaagcagctacctcagatgtcaacacacaaggcgttcttccaggcatggtctggcaggacagagacgtgtacctgcagggacccatctgggcaaagattccacacacggacggacattttcacccttctcctcttatgggaggatttggactgaagcaccctcccccgcagattctcatcaagaataccccggtacctgcgaatccttctaccaccttcagcgcggcaaagtttgcttccttcatcacacagtactccacggggcaggtcagcgtggagatcgagtgggagctgcagaaagagaacagcaaacgctggaaccccgagatccagtatacctccaactacaacaagtctgttaatgtggactttactgtggacactaatggcgtgtattcagagcctcgccccattggcacaagatacctgactcgtaatctgtaa

SEQ ID NO: 3293 - DNA, 2208 bp, synthetic construct
  misc_feature 1..2208: note = source = /note="Description of Artificial Sequence: Synthetic polynucleotide"
  source 1..2208: mol_type = other DNA
atggctgccgatggttatcttccagattggctcgaggacactctctctgaaggaataagacagtggtggaagctcaaacctggcccaccaccgccaaagcccgcagagcggcataaggacgacagcaggggtcttgtgcttcctgggtacaagtacctcggacccttcaacggactcgacaaaggagagccggtcaacgaggcagacgccgcggccctcgagcacgacaaggcctacgaccggcagctcgacagcggagacaacccgtacctcaagtacaaccacgccgacgcggagtttcaggagcgccttaaagaagatacgtcttttgggggcaacctcgcaagagcagtattccaggcgaaaaagagggttcttgaacctctgggcctggttgaggagcctgttaagacggctccgggaaaaaagaggccggtagagcactctcctgcggagccagattcctcctccggaactggaaagtcgggccaacagcctgcaagaaagagattgaattttggtcagactggagacgcagactccgtacctgacccccagcctctcggacagccaccagcagccccctctggtctgggaactaatacgatggcttcaggcagtggcgcaccaatggcagacaataacgagggcgccgacggagtgggtaattcctcgggaaattggcattgcgattccacatggatgggcgacagagtcatcaccaccagcacccgcacctgggctctgcccacctacaacaaccatctgtacaagcaaatttccagccagtctggagccagcaacgacaaccactactttggctacagcaccccttgggggtattttgacttcaacagattccactgccacttctccccacgtgactggcaaagactcatcaacaacaattggggattccggcccaaaagactcaacttcaagctctttaacattcaagtcaaggaggtcacgcagaatgacggtacgacgacgattgccaataaccttaccagcacggttcaggtgtttactgactcggagtaccagctcccgtacgtcctcggctcggcgcatcaaggatgcctcccgccgttcccagcagacgtcttcatggtgccacagtatggatacctcaccctgaacaacgggagtcaggcggtaggacgctcttcattttactgcctggagtactttccttctcagatgctgcgtaccggaaacaactttaccttcagctacacctttgaggacgttccttttcacagtagctacgctcacagccagagttcggaccgtctcatgaatcctctcatcgaccagtacctgtattacttgagcagaacaaacactccaagcggaaccactacgcagtccaggcttcggttttctcaagccggagcgagtgacattcgggaccagtctaggaactggcttcctgggccctgttaccgccagcagcgagtatcaaagacagctgcggacaacaacaacagtgattactcgtggactggagctaccaagtatcacctcaatggaagagactctctggtgaatccgggcacagccatggccagccacaaggacgatgaagaaaagtattttcctcagagcggggttctcatcttcggaaaacaagactcgggaaaaactaatgtggacattgaaagggtcatgattacagacgaagaggaaatcaggaccaccaatcccgtggctacggagcagtatggttctgtatctaccaatctccagagcggcaacacacaagcagctacctcagatgtcaacacacaaggcgttcttccaggcatggtctggcaggacagagacgtgtacctgcagggacccatctgggcaaagattccacacacggacggacattttcgcccttctcctcttatgggaggatttggactgaagcaccctcccccgcagattctcatcaagaataccccggtacctgcgaatccttctaccaccttcagcgcggcaaagtttgcttccttcatcacacagtactccacggggcaggtcagcgtggagatcgagtgggagctgcagaaagagaacagcaaacgctggaaccccgagatccagtatacctccaactacaacaagtctgttaatgtggactttactgtggacactaatggcgtgtattcagagcctcgccccattggcacaagatacctgactcgtaatctgtaa

SEQ ID NO: 3294 - DNA, 2208 bp, synthetic construct
  misc_feature 1..2208: note = source = /note="Description of Artificial Sequence: Synthetic polynucleotide"
  source 1..2208: mol_type = other DNA
atggctgccgatggttatcttccagattggctcgaggacactctctctgaaggaataagacagtggtggaagctcaaacctggcccaccaccgccaaagcccgcagagcggcataaggacgacagcaggggtcttgtgcttcctgggtacaagtacctcggacccttcaacggactcgacaaaggagagccggtcaacgaggcagacgccgcggccctcgagcacgacaaggcctacgaccggcagctcgacagcggagacaacccgtacctcaagtacaaccacgccgacgcggagtttcaggagcgccttaaagaagatacgtcttttgggggcaacctcgcaagagcagtattccaggcgaaaaagagggttcttgaacctctgggcctggttgaggagcctgttaagacggctccgggaaaaaagaggccggtagagcactctcctgcggggccagattcctcctccggaactggaaagtcgggccaacagcctgcaagaaagagattgaattttggtcagactggagacgcagactccgtacctgacccccagcctctcggacagccaccagcagccccctctggtctgggaactaatacgatggcttcaggcagtggcgcaccaatggcagacaataacgagggcgccgacggagtgggtaattcctcgggaaattggcattgcgattccacatggatgggcgacagagtcatcaccaccagcacccgcacctgggctctgcccacctacaacaaccatctgtacaagcaaatttccagccagtctggagccagcaacgacaaccactactttggctacagcaccccttgggggtattttgacttcaacagattccactgccacttctccccacgtgactggcaaagactcatcaacaacaattggggtttccggcccaaaagactcaacttcgagctctttaacattcaagtcaaggaggtcacgcagaatgacggtacgacgacgattgccaataaccttaccagcacggttcaggtgtttactgactcggagtaccagctcccgtacgtcctcggctcggcgcatcaaggatgcctcccgccgttcccagcagacgtcttcatggtgccacagtatggatacctcaccctgaacaacgggagtcaggcggtaggacgctcttcattttactgcctggagtactttccttctcagatgctgcgtaccggaaacaactttaccttcagctacacctttgaggacgttccttttcacagcagctacgctcacagccagagtttggaccgtctcatgaatcctctcatcgaccagtacctgtattacttgagcagaacaaacactccaagcggaaccactacgcagtccaggcttcagttttctcaagccggagcgagtgacattcgggaccagtctaggaactggcttcctggaccctgttaccgccagcagcgagtatcaaagacagctgcggacaacaacaacagtgattactcgtggactggagctaccaagtatcacctcaatggaagagactctctggtgaatccgggcacagccatggccagccacaaggacgatgaagaaaagtattttcctcagagcggggttctcatcttcggaaaacaagactcgggaaaaactaatgtggacattgaaaaggtcatgattacagacgaagaggaaatcaggaccaccaatcccgtggctacggagcagtatggttctgtatctaccaatctccagagcggcaacacacaagcagctacctcagatgtcaacacacaaggcgttcttccaggcatggtctggcaggacagaggcgtgtacctgcagggacccatctgggcaaagattccacacacggacggacactttcacccttctcctcttatgggaggatttggactgaagcaccctcccccgcagattctcatcaagagtaccccggtacctgcgaatccttctaccaccttcagcgcggcaaagtttgcttccttcatcacacagtactccacggggcaggtcagcgtggagatcgagtgggagctgcagaaagagaacagcaaacgctggaaccccgagatccagtatacctccaactacaacaagtctgttaatgtggactttactgtggacactaatggcgtgtattcagatcctcgccccattggcacaagatacctgactcgtaatctgtaa

SEQ ID NO: 3295 - DNA, 2208 bp, synthetic construct
  misc_feature 1..2208: note = source = /note="Description of Artificial Sequence: Synthetic polynucleotide"
  source 1..2208: mol_type = other DNA
atggctgccgatggttatcttccagattggctcgaggacactctctctgaaggaataagacagtggtggaagctcaaacctggcccaccaccgccaaagcccgcagagcggcataaggacgacagcaggggtcttgtgcttcctgggtacaagtacctcggacccttcaacggactcgacaaaggagagccggtcaacgaggcagacgccgcggccctcgagcacgacaaggcctacgaccggcagctcgacagcggagacaacccgtacctcaagtacaaccacgccgacgcggagtttcaggagcgccttaaagaagatacgtcttttgggggcaacctcgcaagagcagtattccaggcgaaaaagagggttcttgaacctctgggcctggttgaggagcctgttaagacggctccgggaaaaaagaggccggtagagcactctcctgcggagccagattcctcctccggaactggaaagtcgggccaacagcctgcaagaaagagattgaattttggtcagactggagacgcagactccgtacctgacccccagcctctcggacagccaccagcagccccctctggtctgggaactaatacgatggcttcaggcagtggcgcaccaatggcagacaataacgagggcgccgacggagtgggtaattcctcgggaaattggcattgcgattccacatggatgggcgacagagtcatcaccaccagcacccgcacctgggctctgcccacctacaacaaccatctgtacaagcaaatttccagccagtctggagccagcaacgacaaccactactttggctacagcaccccttgggggtattttgacttcaacagattccactgccacttctccccacgtggctggcaaagactcatcaacaacaattggggattccggcccaaaagactcaacttcaagctctttaacattcaagtcaaggaggtcacgcagaatgacggtacgacgacgattgccaataaccttaccagcacggttcaggtgtttactgactcggagtaccagctcccgtacgtcctcggctcggcgcatcaaggatgcctcccgccgttcccagcagacgtcttcatggtgccacagtatggatacctcaccctgaacaacgggagtcaggcggtaggacgctcttcattttactgcctggagtactttccttctcagatgctgcgtaccggaagcaactttaccttcagctacacctttgaggacgttccttttcacagcagctacgctcacagccagagtttggaccgtctcatgaatcctctcatcgaccagtacctgtattacttgagcagaacaaacactccaagcggaaccactacgcagtccaggcttcggttttctcaagccggagcgagtgacattcgggaccagtctaggaactggcttcctgggccctgttaccgccagcagcgagtatcaaagacagctgcggacaacaacaacagtgattactcgtggactggagctaccaagtatcacctcaatggaagagactctctggtgaatccgggcacagccatggccagccacaaggacgatgaagaaaagtattttcctcagagcggggttctcatcttcggaaaacaagactcgggaaaaactaatgtggacattgaaagggtcatgattacagacgaagaggaaatcaggaccaccaatcccgtggctacggagcagtatggttctgtatctaccaatctccagagcggcaacacacaagcagctacctcagatgtcaacacacaaggcgttcttccaggcatggtctggcaggacagagacgtgtacctgcagggacccatctgggcaaagattccacacacggacggacattttcacccttctcctcttatgggaggatttggactgaagcaccctcccccgcagattctcatcaagaataccccggtacctgcgaatccttctaccaccttcagcgcggcaaagtttgcttccttcatcacacagtactccacggggcaggtcagcgtggagatcgagtgggagctgcagaaagagaacagcaaacgctggaaccccgagatccagtatacctccaactacaacaagtctgttaatgtggactttactgtggacactaatggcgtgtattcagagcctcgccccattggcacaagatacctgactcgtaatctgtaa

SEQ ID NO: 3296 - DNA, 2208 bp, synthetic construct
  misc_feature 1..2208: note = source = /note="Description of Artificial Sequence: Synthetic polynucleotide"
  source 1..2208: mol_type = other DNA
atggctgccgatggttatcttccagattggctcgaggacactctctctgaaggaataagacagtggtggaagctcaaacctggcccaccaccaccaaggcccgcagagcggcatcaggacgacagcaggggtcttgtgcttcctgggtacaagtacctcggacccttcaacggactcgacaaaggagagccggtcaacgaggcagacgctgcggccctcgagcacgacaaggcctacgaccggcagctcgacagcggagacaacccgtacctcaagtacaaccacgccgacgcggagtttcaggagcgtcttaaagaagatacgtcttttgggggcaacctcgcaagagcagtattccaggcgaaaaagagggttcttgaacctctgggcctggttgaggagcctgttaagacggctccgggaaaaaagaggccggtagagcactctcctgcggagccagattcctcctccggaactggaaagtcgggccaacagcctgcaagaaagagattgaattttggtcagactggagacgcagactccgtacctgacccccagcctctcggacagccaccagcagccccctctggtctgggaactaatacgatggcttcaggcagtggcgcaccaatggcagacaataacgagggcgccgacggagtgggtaattcctcgggaaattggcattgcgattccacatggatgggcgacagagtcatcaccaccagcacccgcacctgggctctgcccacctacaacaaccatctgtacaagcaaatttccagccagtctggagccagcaacgacaaccactactttggctacagcaccccttgggggtattttgacttcaacagattccactgccacttctccccacgtgactggcaaagactcatcaacaacaattggggattccggcccaaaagactcaacttcaagctctttaacattcaagtcaaggaggtcacgcagaatgacggtacgacgacgattgccaataaccttaccagcacggttcaggtgtttactgactcggagtaccagctcccgtacgtcctcggctcggcgcatcaaggatgcctcccgccgttcccagcagacgtcttcatggtgccacagtatggatacctcaccctgaacaacgggagtcaggcggtaggacgctcttcattttactgcctggagtactttccttctcagatgctgcgtaccggaaacaactttaccttcagctacacctttgaggacgttccttttcacagcagctacgctcacagccagagtttggaccgtctcatgaatcctctcatcgaccagtacctgtattacttgagcagaacaaacactccaagcggaaccactacgcagtccaggcttcggttttctcaagccggagcgagtgacattcgggaccagtctaggaactggcttcctggaccctgttaccgccagcagcgagtatcaaagacagctgcggacaacaacaacagtgattactcgtggactggagctaccaagtatcacctcaatggaagagactctctggtgaatccgggcacagccatggccagccacaaggacgatgaagaaaagtattttcctcagagcggggttctcatcttcggaaaacaagactcgggaaaaactaatgtggacattgaaagggtcatgattacagacgaagaggaaatcaggaccaccaatcccgtggctacggagcagtatggttctgtatctaccaatctccagagcggcaacacacaagcagctacctcagatgtcaacacacaaggcgttcttccaggcatggtctggcaggacagagacgtgtacctgcagggacccatctgggcaaagattccacacacggacggacattttcacccttctcctcttatgggaggatttggactgaagcaccctcccccgcagattctcatcaagaataccccggtacctgcgaatccttctaccaccttcagcgcggcaaagtttgcttccttcatcacacagtactccacggggcaggtcagcgtggagatcgagtgggagctgcagaaagagaacagcaaacgctggaaccccgagatccagtatacctccaactacaacaagtctgttaatgtggactttactgtggacactaatggcgtgtattcagagcctcgccccattggcacaagatacctgactcgtaatctgtaa

SEQ ID NO: 3297 - DNA, 2208 bp, synthetic construct
  misc_feature 1..2208: note = source = /note="Description of Artificial Sequence: Synthetic polynucleotide"
  source 1..2208: mol_type = other DNA
atggctgccgatggttatcttccagattggctcgaggacactctctctgaaggaataagacagtggtggaagctcaaacctggcccaccaccgccaaagcccgcagagcggcataaggacgacagcaggggtcttgtgcttcctgggtacaagtacctcggacccttcaacggactcgacaaaggagagccggtcaacgaggcagacgccgcggccctcgagcacgacaaggcctacgaccggcagctcgacagcggagacaacccgtacctcaagtacaaccacgccgacgcggagtttcaggagcgccttaaagaagatacgtcttttgggggcaacctcgcaagagcagtattccaggcgaaaaagagggttcttgaacctctgggcctggttgaggagcctgttaagacggctccgggaaaaaagaggccggtagagcactctcctgcggagccagattcctcctccggaactggaaagtcgggccaacagcctgcaagaaagagattgaattttggtcagactggagacgcagactccgtacctgacccccagcctctcggacagccaccagcagccccctctggtctgggaactaatacgatggcttcaggcagtggcgcaccaatggcagacaataacgagggcgccgacggagtgggtaattcctcgggaaattggcattgcgattccacatggatgggcgacagagtcatcaccaccagcacccgcacctgggctctgcccacctacaacaaccatctgtacaagcaaatttccagccagtctggagccagcaacgacaaccactactttggctacagcaccccttgggggtattttgacttcaacagattccactgccacttctccccacgtgactggcaaagactcatcaacaacaattggggattccggcccaaaagactcaacttcaagctctttaacattcaagtcaaggaggtcacgcagaatgacggtacgacgacgattgccaataaccttaccagcacggttcaggtgtttactgactcggagtaccagctcccgtacgtccccggctcggcgcatcaaggatgcctcccgccgttcccagcagacgtcttcatggtgccacagtatggatacctcaccctgaacaacgggagtcaggcggtaggacgctcttcattttactgcctggagtactttccttctcagatgctgcgtaccggaaacaactttaccttcagctacacctttgaggacgttccttttcacagcagctacgctcacagccagagtttggaccgtctcatgaatcctctcatcgaccagtacctgtattacttgagcagaacaaacactccaagcggaaccactacgcagtccaggcttcggttttctcaagccggagcgagtgacattcgggaccagtctaggaactggcttcctggaccctgttaccgccagcagcgagtatcaaagacggctgcggacaacaacaacagtgattactcgtggactggagctaccaagtatcacctcaatggaagagactctctggtgaatccgggcacagccatggccagccacaaggacgatgaagaaaagtattttcctcagagcggggttctcatcttcggaaaacaagactcgggaaaaactaatgtggacattgaaagggtcatgattacagacgaagaggaaatcaggaccaccaatcccgtggctacggagcagtatggttctgtatctaccaatctccagagcggcaacacacaagcagctacctcagatgtcaacacacaaggcgttcttccaggcatggtctggcaggacagagacgtgtacctgcagggacccatctgggcaaagattccacacacggacggacattttcacccttctcctcttatgggaggatttggactgaagcaccctcccccgcagattctcatcaagaataccccggtacctgcgaatccttctaccaccttcagcgcggcaaagtttgcttccttcatcacacagtactccacggggcaggtcagcgtggagatcgagtgggagctgcagaaagagaacagcaaacgctggaaccccgagatccagtatacctccaactacaacaagtctgttaatgtggactttactgtggacactaatggcgtgtattcagagcctcgccccattggcacaagatacctgactcgtaatctgtaa

SEQ ID NO: 3298 - DNA, 2208 bp, synthetic construct
  misc_feature 1..2208: note = source = /note="Description of Artificial Sequence: Synthetic polynucleotide"
  source 1..2208: mol_type = other DNA
atggctgccgatggttatcttccagattggctcgaggacactctctctgaaggaataagacagtggtggaagctcaaacctggcccaccaccgccaaagcccgcagagcggcataaggacgacagcaggggtcttgtgcttcctgggtacaagtacctcggacccttcaacggactcgacaaaggagagccggtcaacgaggcagacgccgcggccctcgagcacgacaaggcctacgaccggcagctcgacagcggagacaacccgtacctcaagtacaaccacgccgacgcggagtttcaggagcgccttaaagaagatacgtcttttgggggcaacctcgcaagagcagtattccaggcgaaaaagagggttcttgaacctctgggcctggttgaggagcctgttaagacggctccgggaaaaaagaggccggtagagcactctcctgcggagccagattcctcctccggaactggaaagtcgggccaacagcctgcaagaaagagattgaattttggtcagactggagacgcagactccgtacctgacccccagcctctcggacagccaccagcagccccctctggtctgggaactaatacgatggcttcaggcagtggcgcaccaatggcagacaataacgagggcgccgacggagtgggtaattcctcgggaaattggcattgcgattccacatggatgggcgacagagtcatcaccaccagcacccgcacctgggctctgcccacctacgacaaccatctgtacaagcaaatttccagccagtctggagccagcaacgacaaccactactttggctacagcaccccttgggggtattttgacttcaacagattccactgccacttctccccacgtgactggcaaagactcatcaacaacaattggggattccggcccaaaagactcaacttcaagctctttaacattcaagtcaaggaggtcacgcagaatgacggtacgacgacgattgccaataaccttaccagcacggttcaggtgtttactgactcggagtaccagctcccgtacgtcctcggctcggcgcatcaaggatgcctcccgccgttcccagcagacgtcttcatggtgccacagtatggatacctcaccctgaacaacgggagtcaggcggtaggacgctcttcattttactgcctggagtactttccttctcagatgctgcgtaccggaaacaactttaccttcagctacacctttgaggacgttccttttcacagcagctacgctcacagccagagtttggaccgtctcatgaatcctctcatcgaccagtacctgtattacttgagcagaacaaacacttcaagcggaaccactacgcagtccaggcttcggttttctcaagccggagcgagtgacattcgggaccagtctaggaactggcttcctggaccctgttaccgccagcagcgagtatcaaagacagctgcggacaacaacaacagtgattactcgtggactggagctaccaagtatcacctcaatggaagagactctctggtgaatccgggcacagccatggccagccacaaggacgatgaagaaaagtattttcctcagagcggggttctcatcttcggaaaacaagactcgggaaaaactaatgtggacattgaaagggtcatgattacagacgaagaggaaatcaggaccaccaatcccgtggctacggagcagtatggttctgtatctaccaatctccagagcggcaacacacaagcagctacctcagatgtcaacacacaaggcgttcttccaggcatggtctggcaggacagagacgtgtacctgcagggacccatctgggcaaagattccacacacggacggacattttcacccttctcctcttatgggaggatttggactgaagcaccctcccccgcagattctcatcaagaataccccggtacctgcgaatccttctaccaccttcagcgcggcaaagtttgcttccttcatcacacagtactccacggggcaggtcagcgtggagatcgagtgggagctgcagaaagagaacagcaaacgctggaaccccgagatccagtatacctccaactacaacaagtctgttaatgtggactttactgtggacactaatggcgtgtattcagagcctcgccccattggcacaagatacctgactcgtaatctgtaa

SEQ ID NO: 3299 - DNA, 2208 bp, synthetic construct
  misc_feature 1..2208: note = source = /note="Description of Artificial Sequence: Synthetic polynucleotide"
  source 1..2208: mol_type = other DNA
atggctgccgatggttatcttccagattggctcgaggacactctctctgaaggaataagacagtggtggaagctcaaacctggcccaccaccaccaaggcccgcagagcggcatcaggacgacagcaggggtcttgtgcttcctgggtacaagtacctcggacccttcaacggactcgacaaaggagagccggtcaacgaggcagacgctgcggccctcgagcacgacaaggcctacgaccggcagctcgacagcggagacaacccgtacctcaagtacaaccacgccgacgcggagtttcaggagcgtcttaaagaagatacgtcttttgggggcaacctcggacgagcagtcttccaggcgaaaaagagggttcttgaacctctgggcctggttgaggaacctgttaagacggctccgggaaaaaagaggccggtagagcactctcctgcggagccagactcctcctcgggaaccggaaaagcgggccagcagcctgcaagaaagagattgaatttcggtcagactggagacgcagactccgtacctgacccccagcctctcggacagccaccagcagcccccacaagtttgggatctactacaatggctacaggcagtggcgcaccaatggcagacaataacgagggtgccgatggagtgggtaattcctcaggaaattggcattgcgattcccaatggctgggcgacagagtcatcaccaccagcacccgaacctgggccctgcccacctacaacaaccacctctacaagcaaatctccagccaatcaggagcatcgaacgacaaccactactttggctacagcaccccttgggggtattttgacttcaacagattccactgtcacttctccccacgtgactggcaaagactcatcaacaacaactggggattccgacccaagagactcaacttcaagctctttaacattcaagtcaaagaggtcacgcagaatgacggtacgacgacgattgccaataaccttaccagcacggttcaggtgtttactgactcggagtaccagctcccgtacgtcctcggctcggcgcatcaaggatgcctcccgccgtttccagcggacgtcttcatggtcccacagtatggatacctcaccctgaacaacgggagtcaggcggtaggacgctcttccttttactgcctggagtactttccttctcagatgctgcgtaccggaaacaactttaccttcagctacacctttgaggacgttccttttcacagcagctacgctcacagccagagtttggaccgtctcatgaatcctctcatcgaccagtacctgtattacttgagcagaacaaacactccaagcggaaccactacgcagtccaggcttcagttttctcaagccggagcgagtgacattcgggaccagtctaggaactggcttcctggaccctgttaccgccagcagcgagtatcaaagacagctgcggacaacaacaacagtgattactcgtggactggagctaccaagtatcacctcaatggaagagactctctggtgaatccgggcacagccatggccagccacaaggacgatgaagaaaagtattttcctcagagcggggttctcatcttcggaaaacaagactcgggaaaaactaatgtggacattgaaaaggtcatgattacagacgaagaggaaatcaggaccaccaatcccgtggctacggagcagtatggttctgtatctaccaatctccagagcggcaacacacaagcagctacctcagatgtcaacacacaaggcgttcttccaggcatggtctggcaggacagagacgtgtacctgcagggacccatctgggcaaagattccacacacggacggacactttcacccttctcctcttatgggaggatttggactgaagcaccctcccccgcagattctcatcaagagtaccccggtacctgcgaatccttctaccaccttcagcgcggcaaagtttgcttccttcatcacacagtactccacggggcaggtcagcgtggagatcgagtgggagctgcagaaagagaacagcaaacgctggaaccccgagatccagtatacctccaactacaacaagtctgttaatgtggactttactgtggacactaatggcgtgtattcagagcctcgccccattggcacaagatacctgactcgtaatctgtaa

SEQ ID NO: 3300 - DNA, 2208 bp, synthetic construct
  misc_feature 1..2208: note = source = /note="Description of Artificial Sequence: Synthetic polynucleotide"
  source 1..2208: mol_type = other DNA
atggctgccgatggttatcttccagattggctcgaggacactctctctgaaggaataagacagtggtggaagctcaaacctggcccaccaccgccaaagcccgcagagcggcataaggacgacagcaggggtcttgtgcttcctgggtacaagtacctcggacccttcaacggactcgacaaaggagagccggtcaacgaggcagacgccgcggccctcgagcacgacaaggcctacgaccggcagctcgacagcggagacaacccgtacctcaagtacaaccacgccgacgcggagtttcaggagcgccttaaagaagatacgtcttttgggggcaacctcgcaagagcagtattccaggcgaaaaagagggttcttgaacctctgggcctggttgaggagcctgttaagacggctccgggaaaaaagaggccggtagagcactctcctgcggagccagattcctcctccggaactggaaagtcgggccaacagcctgcaagaaagagattgaattttggtcagactggagacgcagactccgtacctgacccccagcctctcggacagccaccagcagccccctctggtctgggaactaatacgatggcttcaggcagtggcgcaccaatggcagacaataacgagggcgccgacggagtgggtaattcctcgggaaattggcattgcgattccacatggatgggcgacagagtcatcaccaccagcacccgcacctgggctctgcccacctacaacaaccatctgtacaagcaaatttccagccagtctggagccagcaacgacaaccactactttggctacagcaccccttgggggtattttgacttcaacagattccactgccacttctccccacgtgactggcaaagactcatcaacaacaattggggattccggcccaaaagactcaacttcaagctctttaacattcaagtcaaggaggtcacgcagaatgacggtacgacgacgattgccaataaccttaccagcacggttcaggtgtttactgactcggagtaccagctcccgtacgtcctcggctcggcgcatcaaggatgcctcccgccgttcccagcagacgtcttcatggtgccacagtatggatacctcaccctgaacaacgggagtcaggcggtaggacgctcttcattttactgcctggagtactttccttctcagatgctgcgtaccggaaacaactttaccttcagctacacctttgaggacgttccttttcacagcagctacgctcacagccagagttcggaccgtctcatgaatcctctcatcgaccagtacctgtattacttgagcagaacaaacactccaagcggaaccactacgcagtccaggcttcggttttctcaagccggagcgagtgacattcgggaccagtctaggaactggcttcctggaccctgttaccgccagcagcgagtatcaaagacagctgcggacaacaacaacagtgattactcgtggactggagctaccaagtatcacctcaatggaagagactctctggtgaatccgggcacagccatggccagccacaaggacgatgaagaaaagtattttcctcagagcggggttctcatcttcggaaaacaagactcgggaaaaactaatgtggacattgaaagggtcatgattacagacgaagaggaaatcaggaccaccaatcccgtggctacggagcagtatggttctgtatctaccaatctccagagcggcaacacacaagcagctacctcagatgtcaacacacaaggcgttcttccaggcatggtctggcaggacagagacgtgtacctgcagggacccatctgggcaaagattccacacacggacggacattttcacccttctcctcttatgggaggatttggactgaagcaccctcccccgcagattctcatcaagaataccccggtacctgcgaatccttctaccaccttcagcgcggcaaagcttgcttccttcatcacacagtactccacggggcaggtcagcgtggagatcgagtgggagctgcagaaagagaacagcaaacgctggaaccccgagatccagtatacctccaactacaacaagtctgttaatgtggactttactgtggacactaatggcgtgtattcagagcctcgccccattggcacaagatacctgactcgtaatctgtaa

SEQ ID NO: 3301 - DNA, 2208 bp, synthetic construct
  misc_feature 1..2208: note = source = /note="Description of Artificial Sequence: Synthetic polynucleotide"
  source 1..2208: mol_type = other DNA
atggctgccgatggttatcttccagattggctcgaggacactctctctgaaggaataagacagtggtggaagctcaaacctggcccaccaccgccaaagcccgcagagcggcataaggacgacagcaggggtcttgtgcttcctgggtacaagtacctcggacccttcaacggactcgacaaaggagagccggtcaacgaggcagacgccgcggccctcgagcacgacaaggcctacgaccggcagctcgacagcggagacaacccgtacctcaagtacaaccacgccgacgcggagtttcaggagcgccttaaagaagatacgtcttttgggggcaacctcgcaagagcagtattccaggcgaaaaagagggttcttgaacctctgggcctggttgaggagcctgttaagacggctccgggaaaaaagaggccggtagagcactctcctgcggagccagattcctcctccggaactggaaagtcgggccaacagcctgcaagaaagagattgaattttggtcagactggagacgcagactccgtacctgacccccagcctctcggacagccaccagcagccccctctggtctgggaactaatacgatggcttcaggcagtggcgcaccaatggcagacaataacgagggcgccgacggagtgggtaattcctcgggaaattggcattgcgattccacatggatgggcgacagagtcatcaccaccagcacccgcacctgggctctgcccacctacaacaaccatctgtacaagcaaatttccagccagtctggagccagcaacgacaaccactactttggctacagcaccccttgggggtattttgacttcaacagattccactgccacttctccccacgtgactggcaaagactcatcaacaacaattggggattccggcccaaaagactcaacttcaagctctttaacattcaagtcaaggaggtcacgcagaatgacggtacgacgacgattgccaataaccttaccagcacggttcaggtgtttactgactcggagtaccagctcccgtacgtcctcggctcggcgcatcaaggatgcctcccgccgttcccagcagacgtcttcatggtgccacagtatggatacctcaccctgaacaacgggagtcaggcggtaggacgctcttcattttactgcctggagtactttccttctcagatgctgcgtaccggaaacaactttaccttcagctacacctttgaggacgttccttttcacagcagctacgctcacagccagagtttggaccgtctcatgaatcctctcatcgaccagtacctgtattacttgagcagaacaaacactccaagcggaaccactacgcagtccaggcttcggttttctcaagccggagcgagtgacattcgggaccagtctaggaactggcttcctggaccctgttaccgccagcagcgagtatcaaagacagctgcggacaacaacaacagtgattactcgtggactggagctaccaagtatcacctcaatggaagagactctctggtgaatccgggcacagccatggccagccacaaggacgatgaagaaaagtattttcctcagagcggggttctcatcttcggaaaacaagactcgggaaaaactaatgtggacattgaaagggtcatgattacagacgaagaggaaatcaggaccaccaatcccgtggctacggagcagtatggttctgtatctaccaatctccagagcggcaacacacaagcagctacctcagatgtcaacacacaaggcgttcttccaggcatggtctggcaggacagagacgtgtacctgcagggacccatctgggcaaagattccacacacggacggacattttcacccttctcctcttatgggaggatttggactgaagcaccctcccccgcagattctcatcaagaataccccggtacctgcgaatccttctaccaccttcagcgcggcaaagtttgcttccttcatcacacagtactccacggggcaggtcagcgtggagatcgagtgggagctgcagaaggagaacagcaaacgctggaaccccgagatccagtacacttccaactacaacaaatctgttaatgtggactttactgtggacgctaatggtgtgtattcagagcctcgccccattggcaccagatacctgactcgtaatctgtaa

SEQ ID NO: 3302 - DNA, 2208 bp, synthetic construct
  misc_feature 1..2208: note = source = /note="Description of Artificial Sequence: Synthetic polynucleotide"
  source 1..2208: mol_type = other DNA
atggctgccgatggttatcttccagattggctcgaggacactctctctgaaggaataagacagtggtggaagctcaaacctggcccaccaccgccaaagcccgcagagcggcataaggacgacagcaggggtcttgtgcttcctgggtacaagtacctcggacccttcaacggactcgacaaaggagagccggtcaacgaggcagacgccgcggccctcgagcacgacaaggcctacgaccggcagctcgacagcggagacaacccgtacctcaagtacaaccacgccgacgcggagtttcaggagcgccttaaagaagatacgtcttttgggggcaacctcgcaagagcagtattccaggcgaaaaagagggttcttgaacctctgggcctggttgaggagcctgttaagacggctccgggaaaaaagaggccggtagagcactctcctgcggggccagattcctcctccggaactggaaagtcgggccaacagcctgcaagaaagagattgaattttggtcagactggagacgcagactccgtacctgacccccagcctctcggacagccaccagcagccccctctggtctgggaactaatacgatggcttcaggcagtggcgcaccaatggcagacaataacgagggcgccgacggagtgggtaattcctcgggaaattggcattgcgattccacatggatgggcgacagagtcatcaccaccagcacccgcacctgggctctgcccacctacaacaaccatctgtacaagcaaatttccagccagtctggagccagcaacgacaaccactactttggctacagcaccccttgggggtattttgacttcaacagattccactgccacttctccccacgtgactggcaaagactcatcaacaacaattggggattccggcccaaaagactcaacttcgagctctttaacattcaagtcaaggaggtcacgcagaatgacggtacgacgacgattgccaataaccttaccagcacggttcaggtgtttactgactcggagtaccagctcccgtacgtcctcggctcggcgcatcaaggatgcctcccgccgttcccagcagacgtcttcatggtgccacagtatggatacctcaccctgaacaacgggagtcaggcggtaggacgctcttcattttactgcctggagtactttccttctcagatgctgcgtaccggaaacaactttaccttcagctacacctttgaggacgttccttttcacagcagctacgctcacagccagagtttggaccgtctcatgaatcctctcatcgaccagtacctgtattacttgagcagaacaaacactccaagcggaaccactacgcagtccaggcttcagttttctcaagccggagcgagtgacattcgggaccagtctaggaactggcttcctggaccctgttaccgccagcagcgagtatcaaagacagctgcggacaacaacaacagtgattactcgtggactggagctaccaagtatcacctcaatggaagagactctctggtgaatccgggcacagccatggccagccacaaggacgatgaagaaaagtattttcctcagagcggggttctcatcttcggaaaacaagactcgggaaaaactaatgtggacattgaaaaggtcatgattacagacgaagaggaaatcaggaccaccaatcccgtggctacggagcagtatggttctgtatctaccaatctccagagcggcaacacacaagcagctacctcagatgtcaacacacaaggcgttcttccaggcatggtctggcaggacagagacgtgtacctgcagggacccatctgggcaaagattccacacacggacggacactttcacccttctcctcttatgggaggatttggactgaagcaccctcccccgcagattctcatcaagagtaccccggtacctgcgaatccttctaccaccttcagcgcggcaaagtttgcttccttcatcacacagtactccacggggcaggtcagcgtggagatcgagtgggagctgcagaaagagaacagcaaacgctggaaccccgagatccagtatacctccaactgcaacaagtctgttaatgtggactttactgtggacactaatggcgtgtattcagatcctcgccccattggcacaagatacctgactcgtaatctgtaa

SEQ ID NO: 3303 - DNA, 2208 bp, synthetic construct
  misc_feature 1..2208: note = source = /note="Description of Artificial Sequence: Synthetic polynucleotide"
  source 1..2208: mol_type = other DNA
atggctgccgatggttatcttccagattggctcgaggacactctctctgaaggaataagacagtggtggaagctcaaacctggcccaccaccgccaaagcccgcagagcggcataaggacgacagcaggggtcttgtgcttcctgggtacaagtacctcggacccttcaacggactcgacaaaggagagccggtcaacgaggcagacgccgcggccctcgagcacgacaaggcctacgaccggcagctcgacagcggagacaacccgtacctcaagtacaaccacgccgacgcggagcttcaggagcgccttaaagaagatacgtcttttgggggcaacctcgcaagagcagtattccaggcgaaaaagagggttcttgaacctctgggcctggttgaggagcctgttaagacggctccgggaaaaaagaggccggtagagcactctcctgcggagccagattcctcctccggaactggaaagtcgggccaacagcctgcaagaaagagattgaattttggtcagactggagacgcagactccgtacctgacccccagcctctcggacagccaccagcagccccctctggtctgggaactaatacgatggcttcaggcagtggcgcaccaatggcagacaataacgagggcgccgacggagtgggtaattcctcgggaaattggcattgcgattccacatggatgggcgacagagtcatcaccaccagcacccgcacctgggctctgcccacctacaacaaccatctgtacaagcaaatttccagccagtctggagccagcaacgacaaccactactttggctacagcaccccttgggggtattttgacttcaacagattccactgccacttctccccacgtgactggcaaagactcatcaacaacaattggggattccggcccaaaagactcaacttcaagctctttaacattcaagtcaaggaggtcacgcagaatgacggtacgacgacgattgccaataaccttaccagcacggttcaggtgtatactgactcggagtaccagctcccgtacgtcctcggctcggcgcatcaaggatgcctcccgccgttcccagcagacgtcttcatggtgccacagtatggatacctcaccctgaacaacgggagtcaggcggtaggacgctcttcattttactgcctggagtactttccttctcagatgctgcgtaccggaaacaactttaccttcagctacacctttgaggacgttccttttcacagcagctacgctcacagccagagtttggaccgtctcatgaatcctctcatcgaccagtacctgtattacttgagcagaacaaacactccaagcggaaccactacgcagtccaggcttcggttttctcaagccggagcgagtgacattcgggaccagtctaggaactggcttcctggaccctgttaccgccagcagcgagtatcaaagacagctgcggacaacaacaacagtgattactcgtggactggagctaccaagtatcacctcaatggaagagactctctggtgaatccgggcacagccatggccagccacaaggacgatgaagaaaagtattttcctcagagcggggttctcatcttcggaaaacaagactcgggaaaaactaatgtggacattgaaagggtcatgattacagacgaagaggaaatcaggaccaccaatcccgtggctacggagcagtatggttctgtatctaccaatctccagagcggcaacacacaagcagctacctcagatgtcaacacacaaggcgttcttccaggcatggtctggcaggacagagacgtgtacctgcagggacccatctgggcaaagattccacacacggacggacattttcacccttctcctcttatgggaggatttggactgaagcaccctcccccgcagattctcatcaagaataccccggtacctgcgaatccttctaccaccttcagcgcggcaaagtttgcttccttcatcacacagtactccacggggcaggtcagcgtggagatcgagtgggagctgcagaaagagaacagcaaacgctggaaccccgagatccagtatacctccaactacaacaagtctgttaatgtggactttactgtggacactaatggcgtgtattcagagcctcgccccattggcacaagatacctgactcgtaatctgtaa

SEQ ID NO: 3304 - DNA, 2208 bp, synthetic construct
  misc_feature 1..2208: note = source = /note="Description of Artificial Sequence: Synthetic polynucleotide"
  source 1..2208: mol_type = other DNA
atggctgccgatggttatcttccagattggctcgaggacactctctctgaaggaataagacagtggtggaagctcaaacctggcccaccaccgccaaagcccgcagagcggcataaggacgacagcaggggtcttgtgcttcctgggtacaagtacctcggacccttcaacggactcgacaaaggagagccggtcaacgaggcagacgccgcggccctcgagcacgacaaggcctacgaccggcagctcgacagcggagacaacccgtacctcaagtacaaccacgccgacgcggagtttcaggagcgccttaaagaagatacgtcttttgggggcaacctcgcaagagcagtattccaggcgaaaaagagggttcttgaacctctgggcctggttgaggagcctgttaagacggctccgggaaaaaagaggccggtagagcactctcctgcggagccagattcctcctccggaactggaaagtcgggccaacagcctgtaagaaagagattgaattttggtcagactggagacgcagactccgtacctgacccccagcctctcggacagccaccagcagccccctctggtctgggaactaatacgatggcttcaggcagtggcgcaccaatggcagacaataacgagggcgccgacggagtgggtaattcctcgggaaattggcattgcgattccacatggatgggcgacagagtcatcaccaccagcacccgcacctgggctctgcccacctacaacaaccatctgtacaagcaaatttccagccagtctggagccagcaacgacaaccactactttggctacagcaccccttgggggtattttgacttcaacagattccactgccacttctccccacgtgactggcaaagactcatcaacaacaattggggattccggcccaaaagactcaacttcaagctctttaacattcaagtcaaggaggtcacgcagaatgacggtacgacgacgattgccaataaccttaccagcacggttcaggtgtttactgactcggagtaccagctcccgtacgtcctcggctcggcgcatcaaggatgcctcccgccgttcccagcagacgtcttcatggtgccacagtatggatacctcaccctgaacaacgggagtcaggcggtaggacgctcttcattttactgcctggagtactttccttctcagatgctgcgtaccggaagcaactttaccttcagctacacctttgaggacgttccttttcacagcagctacgctcacagccagagtttggaccgtctcatgaatcctctcatcgaccagtacctgtattacttgagcagaacaaacactccaagcggaaccactacgcagtccaggcttcggttttctcaagccggagcgagtgacattcgggaccagtctaggaactggcttcctgggccctgttaccgccagcagcgagtatcaaagacagctgcggacaacaacaacagtgattactcgtggactggagctaccaagtatcacctcaatggaagagactctctggtgaatccgggcacagccatggccagccacaaggacgatgaagaaaagtattttcctcagagcggggttctcatcttcggaaaacaagactcgggaaaaactaatgtggacattgaaagggtcatgattacagacgaagaggaaatcaggaccaccaatcccgtggctacggagcagtatggttctgtatctaccaatctccagagcggcaacacacaagcagctacctcagatgtcaacacacaaggcgttcttccaggcatggtctggcaggacagagacgtgtacctgcagggacccatctgggcaaagattccacacacggacggacattttcacccttctcctcttatgggaggatttggactgaagcaccctcccccgcagattctcatcaagaataccccggtacctgcgaatccttctaccaccttcagcgcggcaaagtttgcttccttcatcacacagtactccacggggcaggtcagcgtggagatcgagtgggagctgcagaaagagaacagcaaacgctggaaccccgagatccagtatacctccaactacaacaagtctgttaatgtggactttactgtggacactaatggcgtgtattcagagcctcgccccattggcacaagatacctgactcgtaatctgtaa

SEQ ID NO: 3305 - DNA, 2208 bp, synthetic construct
  misc_feature 1..2208: note = source = /note="Description of Artificial Sequence: Synthetic polynucleotide"
  source 1..2208: mol_type = other DNA
atggctgccgatggttatcttccagattggctcgaggacactctctctgaaggaataagacagtggtggaagctcaaacccggcccaccaccaccaaggcccgcagagcggcatcaggacgacagcaggggtcttgtgcttcctgggtacaagtacctcggacccttcaacggactcgacaaaggagagccggtcaacgaggcagacgctgcggccctcgagcacgacaaggcctacgaccggcagctcgacagcggagacaacccgtacctcaagtacaaccacgccgacgcggagtttcaggagcgtcttaaagaagatacgtcttttgggggcaacctcggacgagcagtcttccaggcgaaaaagagggttcttgaacctctgggcctggttgaggagcctgttaagacggctccgggaaaaaagaggccggtagagcactctcctgcggggccagattcctcctccggaactggaaagtcgggccaacagcctgcaagaaagagattgaattttggtcagactggagacgcagactccgtacctgacccccagcctctcggacagccaccagcagccccctctggtctgggaactaatacgatggcttcaggcagtggcgcaccaatggcagacaataacgagggcgccgacggagtgggtaattcctcgggaaattggcattgcgattccacatggatgggcgacagagtcatcaccaccagcacccgcacctgggctctgcccacctacaacaaccatctgtacaagcaaatttccagccagtctggagccagcaacgacaaccactactttggctacagcaccccttgggggtattttgacttcaacagattccactgccacttctccccacgtgactggcaaagactcatcaacaacaattggggattccggcccaaaagactcaacttcgagctctttaacattcaagtcaaggaggtcacgcagaatgacggtacgacgacgattgccaataaccttaccagcacggttcaggtgtttactgactcggagtaccagctcccgtacgtcctcggctcggcgcatcaaggatgcctcccgccgttcccagcagacgtcttcatggtgccacagtatggatacctcaccctgaacaacgggagtcaggcggtaggacgctcttcattttactgcctggagtactttccttctcagatgctgcgtaccggaaacaactttaccttcagctacacctttgaggacgttccttttcacagcagctacgctcacagccagagtttggaccgtctcatgaatcctctcatcgaccagtacctgtattacttgagcagaacaaacactccaagcggaaccactacgcagtccaggcttcagttttctcaagccggagcgagtgacattcgggaccagtctaggaactggcttcctggaccctgttaccgccagcagcgagtatcaaagacagctgcggacaacaacaacagtgattactcgtggactggagctaccaagtatcacctcaatggaagagactctctggtgaatccgggcacagccatggccagccacaaggacgatgaagaaaagtattttcctcagagcggggttctcatcttcggaaaacaagactcgggaaaaactaatgtggacattgaaaaggtcatgattacagacgaagaggaaatcaggaccaccaatcccgtggctacggagcagtatggttctgtatctaccaatctccagagcggcaacacacaagcagctacctcagatgtcaacacacaaggcgttcttccaggcatggtctggcaggacagagacgtgtacctgcagggacccatctgggcaaagattccacacacggacggacactttcacccttctcctcttatgggaggatttggactgaagcaccctcccccgcagattctcatcaagagtaccccggtacctgcgaatccttctaccaccttcagcgcggcaaagtttgcttccttcatcacacagtactccacggggcaggtcagcgtggagatcgagtgggagctgcagaaagagaacagcaaacgctggaaccccgagatccagtatacctccaactacaacaagtctgttaatgtggactttactgtggacactaatggcgtgtattcagagcctcgccccattggcacaagatacctgactcgtaatctgtaa

SEQ ID NO: 3306 - DNA, 2208 bp, synthetic construct
  misc_feature 1..2208: note = source = /note="Description of Artificial Sequence: Synthetic polynucleotide"
  source 1..2208: mol_type = other DNA
atggctgccgatggttatcttccagattggctcgaggacactctctctgaaggaataagacagtggtggaagctcaaacctggcccaccaccgccaaagcccgcagagcggcataaggacgacagcaggggtcttgtgcttcctgggtacaagtacctcggacccttcaacggactcgacaaaggagagccggtcaacgaggcagacgccgcggccctcgagcacgacaaggcctacgaccggcagctcgacagcggagacaacccgtacctcaagtacaaccacgccgacgcggagtttcaggagcgccttaaagaagatacgtcttttgggggcaacctcgcaagagcagtattccaggcgaaaaagagggttcttgaacctctgggcctggttgaggagcctgttaagacggctccgggaaaaaagaggccggtagagcactctcctgcggagccagattcctcctccggaactggaaagtcgggccaacagcctgcaagaaagagattgaattttggtcagactggagacgcagactccgtacctgacccccagcctctcggacagccaccagcagccccctctggtctgggaactaatacgatggcttcaggcagtggcgcaccaatggcagacaataacgagggcgccgacggagtgggtaattcctcgggaaattggcattgcgattccacatggatgggcgacagagtcatcaccaccagcacccgcacctgggctctgcccacctacaacaaccatctgtacaagcaaatttccagccagtctggagccagcaacgacaaccactactttggctacagcaccccttgggggtattttgacttcaacagattccacggccacttctccccacgtgactggcaaagactcatcaacaacaattggggattccggcccaaaagactcaacttcaagctctttaacattcaagtcaaggaggtcacgcagaatgacggtacgacgacgattgccaataaccttaccagcacggttcaggtgtttactgactcggagtaccagctcccgtacgtcctcggctcggcgcatcaaggatgcctcccgccgttcccagcagacgtcttcatggtgccacagtatggatacctcaccctgaacaacgggagtcaggcggtaggacgctcttcattttactgcctggagtactttccttctcagatgctgcgtaccggaaacaactttaccttcagctacacctttgaggacgttccttttcacagcagctacgctcacagccagagtttggaccgtctcatgaatcctctcatcgaccagtacctgtattacttgagcagaacaaacactccaagcggaaccactacgcagtccaggcttcggttttctcaagccggagcgagtgacattcgggaccagtctaggaactggcttcctggaccctgttaccgccagcagcgagtatcaaagacagctgcggacaacaacaacagtgattactcgtggactggagctaccaagtatcacctcaatggaagagactctctggtgaatccgggcacagccatggccagccacaaggacgatgaagaaaagtattttcctcagagcggggttctcatcttcggaaaacaagactcgggaaaaactaatgtggacattgaaagggtcatgattacagacgaagaggaaatcaggaccaccaatcccgtggctacggagcagtatggttctgtatctaccaatctccagagcggcaacacacaagcagctacctcagatgtcaacacacaaggcgttcttccaggcatggtctggcaggacagagacgtgtacctgcagggacccatctgggcaaagattccacacacggacggacattttcacccttctcctcttatgggaggatttggactgaagcaccctcccccgcagattctcatcaagaataccccggtacctgcgaatccttctaccaccttcagcgcggcaaagtttgcttccttcatcacacagtactccacggggcaggtcagcgtggagatcgagtgggagctgcagaaagagaacagcaaacgctggaaccccgagatccagtatacctccaactacaacaagtctgttaatgtggactttactgtggacactaatggcgtgtattcagagcctcgccccattggcacaagatacctgactcgtaatctgtaa

SEQ ID NO: 3307 - DNA, 2208 bp, synthetic construct
  misc_feature 1..2208: note = source = /note="Description of Artificial Sequence: Synthetic polynucleotide"
  source 1..2208: mol_type = other DNA
atggctgccgatggttatcttccagattggctcgaggacactctctctgaaggaataagacagtggtggaagctcaaacctggcccaccaccgccaaagcccgcagagcggcataaggacgacagcaggggtcttgtgcttcctgggtacaagtacctcggacccttcaacggactcgacaaaggagagccggtcaacgaggcagacgccgcggccctcgagcacgacaaggcctacgaccggcagctcgacagcggagacaacccgtacctcaagtacaaccacgccgacgcggagtttcaggagcgccttaaagaagatacgtcttttgggggcaacctcgcaagagcagtattccaggcgaaaaagagggttcttgaacctctgggcctggttgaggagcctgttaagacggctccgggaaaaaagaggccggtagagcactctcctgcggagccagattcctcctccggaactggaaagtcgggccaacagcctgcaagaaagagattgaattttggtcagactggagacgcagactccgtacctgacccccagcctctcggacagccaccagcagccccctctggtctgggaactaatacgatggcttcaggcagtggcgcaccaatggcagacaataacgagggcgccgacggagtgggtaattcctcgggaaattggcattgcgattccacatggatgggcgacagagtcatcaccaccagcacccgcacctgggctctgcccacctacaacaaccatctgtacaagcaaatttccagccagtctggagccagcaacgacaaccactactttggctacagcaccccttgggggtattttgacttcaacagattccactgccacttctccccacgtgactggcaaagactcatcaacaacaattggggattccggcccaaaagactcaacttcaagctctttaacattcaagtcaaggaggtcacgcagaatgacggtacgacgacgattgccaataaccttaccagcacggttcaggtgtttactgactcggagtaccagctcccgtacgtcctcggctcggcgcatcaaggatgcctcccgccgttcccagcagacgtcttcatggtgccacagtatggatacctcaccctgaacaacgggagtcaggcggtaggacgctcttcattttactgcctggagtactttccttctcagatgctgcgtaccggaaacaactttaccttcagctacacctttgaggacgttccttttcacagtagctacgctcacagccagagtttggaccgtctcatgaatcctctcatcgaccagtacctgtattacttgagcagaacaaacactccaagcggaaccactacgcagtccaggcttcggttttctcaagccggagcgagtgacattcgggaccagtctaggaactggcttcctgggccctgttaccgccagcagcgagtatcaaagacagctgcggacaacaacaacagtgattactcgtggactggagctaccaagtatcacctcaatggaagagactctctggtgaatccgggcacagccatggccagccacaaggacgatgaagaaaagtattttcctcagagcggggttctcatcttcggaaaacaagactcgggaaaaactaatgtggacattgaaagggtcatgattacagacgaagaggaaatcaggaccaccaatcccgtggctacggagcagtatggttctgtatctaccaatctccagagcggcaacacacaagcagctacctcagatgtcaacacacaaggcgttcttccaggcatggtctggcaggacagagacgtgtacctgcagggacccatctgggcaaagattccacacacggacggacattttcgcccttctcctcttatgggaggatttggactgaagcaccctcccccgcagattctcatcaagaataccccggtacctgcgaatccttctaccaccttcagcgcggcaaagtttgcttccttcatcacacagtactccacggggcaggtcagcgtggagatcgagtgggagctgcagaaagagaacagcaaacgctggaaccccgagatccagtatacctccaactacaacaagtctgttaatgtggactttactgtggacactaatggcgtgtattcagagcctcgccccattggcacaagatacctgactcgtaatctgtaa

SEQ ID NO: 3308 - DNA, 2208 bp, synthetic construct
  misc_feature 1..2208: note = source = /note="Description of Artificial Sequence: Synthetic polynucleotide"
  source 1..2208: mol_type = other DNA
atggctgccgatggttatcttccagattggctcgaggacactctctctgaaggaataagacagtggtggaagctcaaacctggcccaccaccaccaaagcccgcagagcggcataaggacgacagcaggggtcttgtgcttcctgggtacaagtacctcggacccttcaacggactcgacaagggagagccggtcaacgaggcagacgccgcggccctcgagcacgacaaagcctacgaccggcagctcgacagcggagacaacccgtacctcaagtacaaccacgccgacgcggagtttcaggagcgccttaaagaagatacgtcttttgggggcaacctcggacgagcagtcttccaggcgaaaaagagggctcttgaacctctgggcctggttgaggaacctgttaagacggctccgggaaaaaagaggccggtagagcactctcctgtggagccagactcctcctcgggaaccggaaaggcgggccagcagcctgcaagaaaaagattgaattttggtcagactggagacgcagactcggtacctgacccccagcctctcggacagccaccagcagccccctctggtctgggaactaatacgatggctacaggcagtggcgcaccaatggcagacaataacgagggcgccgacggagtgggtaattcctcgggaaattggcattgcgattccacatggatgggcgacagagtcatcaccaccagcacccgaacctgggccctgcccacctacaacaaccacctctacaaacaaatttccagccaatcaggagcctcgaacgacaatcactactttggctacagcaccccttgggggtattttgacttcaacagattccactgccacttttcaccacgtgactggcaaagactcatcaacaacaactggggattccgacccaagagactcaacttcaagctctttaacattcaagtcaaagaggtcacgcagaatgacggtacgacgacgattgccaataaccttaccagcacggttcaggtgtttactgactcggagtaccagctcccgtacgtcctcggctcggcgcatcaaggatgcctcccgccgttcccagcagacgtcttcatggtgccacagtatggatacctcaccctgaacaacgggagtcaggcagtaggacgctcttcattttactgcctggagtactttccttctcagatgctgcgtaccggaaacaactttaccttcagctacacttttgaggacgttcctttccacagcagctacgctcacagccagagtctggaccgtctcatgaatcctctcatcgaccagtacctgtattacttgagcagaacaaacactccaagtggaaccaccacgcagtcaaggcttcagttttctcaggccggagcgagtgacattcgggaccagtctaggaactggcttcctggaccctgttaccgccagcagcgagtatcaaagacatctgcggataacaacaacagtgaatactcgtggactggagctaccaagtaccacctcaatggcagagactctctggtgaatccgggcccggccatggcaagccacaaggacgatgaagaaaagttttttcctcagagcggggttctcatctttgggaagcaaggctcagagaaaacaaatgtggacattgaaaaggtcatgattacagacgaagaggaaatcaggacaaccaatcccgtggctacggagcagtatggttctgtatctaccaacctccagagaggcaacagacaagcagctaccgcagatgtcaacacacaaggcgttcttccaggcatggtctggcaggacagagatgtgtaccttcaggggcccatctgggcaaagattccacacacggacggacattttcacccctctcccctcatgggtggattcggacttaaacaccctcctccacagattctcatcaagaacaccccggtacctgcgaatccttcgaccaccttcagtgcggcaaagtttgcttccttcatcacacagtactccacgggacaggtcagcgtggagatcgagtgggagctgcagaaggaaaacagcaaacgctggaatcccgaaattcagtacacttccaactacaacaagtctgttaatgtggactttactgtggacactaatggcgtgtattcagagcctcgccccattggcaccagatacctgactcgtaatctgtaa

SEQ ID NO: 3309 - DNA, 2208 bp, synthetic construct
  misc_feature 1..2208: note = source = /note="Description of Artificial Sequence: Synthetic polynucleotide"
  source 1..2208: mol_type = other DNA
atggctgccgatggttatcttccagattggctcgaggacactctctctgaaggaataagacagtggtggaagctcaaacctggcccaccaccaccaaagcccgcagagcggcataaggacgacagcaggggtcttgtgcttcctgggtacaagtacctcggacccttcaacggactcgacaagggagagccggtcaacgaggcagacgccgcggccctcgagcacgacaaagcctacgaccggcagctcgacagcggagacaacccgtacctcaagtacaaccacgccgacgcggagtttcaggagcgccttaaagaagatacgtcttttgggggcaacctcggacgagcagtcttccaggcgaaaaagagggtccttgaacctctgggcctggttgaggaacctgttaagacggctccgggaaaaaagaggccggtagagcactctcctgtggagccagactcctcctcgggaaccggaaaggcgggccagcagcctgcaagaaaaagattgaattttggtcagactggagacgcagactcagtacctgacccccagcctctcggacagccaccagcagccccctctggtctgggaactaatacgatggctacaggcagtggcgcaccaatggcagacaataacgagggcgccgacggagtgggtaattcctcgggaaattggcattgcgattccacatggatgggcgacagagtcatcaccaccagcacccgaacctgggccctgcccacctacaacaaccacctctacaaacaaatttccagccaatcaggagcctcgaacgacaatcactactttggctacagcaccccttgggggtattttgacttcaacagattccactgccacttttcaccacgtgactggcaaagactcatcaacaacaactggggattccgacccaagagactcaacttcaagctctttaacattcaagtcaaagaggtcacgcagaatgacggtacgacgacgattgccaataaccttaccagcacggttcaggtgtttactgactcggagtaccagctcccgtacgtcctcggctcggcgcatcaaggatgcctcccgccgttcccagcagacgtcttcatggtgccacagtatggatacctcaccctgaacaacgggagtcaggcagtaggacgctcttcattttactgcctggagtactttccttctcagatgctgcgtaccggaaacaactttaccttcagctacacttttgaggacgttcctttccacagcagctacgctcacagccagagtctggaccgtctcatgaatcctctcatcgaccagtacctgtattacttgagcagaacaaacactccaagtggaaccaccacgcagtcaaggcttcagttttctcaggccggagcgagtgacattcgggaccagtctaggaactggcttcctggaccctgttaccgccagcagcgagtatcaaagacatctgcggataacaacaacagtgaatactcgtggactggagctaccaagtaccacctcaatggcagagactctctggtgaatccgggcccggccatggcaagccacaaggacgatgaagaaaagttttttcctcagagcggggttctcatctttgggaagcaaggctcagagaaaacaaatgtggacattgaaaaggtcatgattacagacgaagaggaaatcaggacaaccaatcccgtggctacggagcagtatggttctgtatctaccaacctccagagaggcaacagacaagcagctaccgcagatgtcaacacgcaaggcgttcttccaggcacggtctggcaggacagagatgtgtaccttcaggggcccatctgggcaaagattccacacacggacggacattttcacccctctcccctcatgggtggattcggacttaaacaccctcctccacagattctcatcaagaacaccccggtacctgcgaatccttcgaccaccttcagtgcggcaaagtttgcttccttcatcacacagtactccacgggacaggtcagcgtggagatcgagtgggagctgcagaaggaaaacagcaaacgctggaatcccgaaattcagtacacttccaactacaacaagtctgttaatgtggactttactgtggacactaatggcgtgtattcagagcctcgccccattggcaccagatacctgactcgtaatctgtaa

SEQ ID NO: 3310 - DNA, 2208 bp, synthetic construct
  misc_feature 1..2208: note = source = /note="Description of Artificial Sequence: Synthetic polynucleotide"
  source 1..2208: mol_type = other DNA
atggctgccgatggttatcttccagattggctcgaggacactctctctgaaggaataagacagtggtggaagctcaaacctggcccaccaccaccaaagcccgcagagcggcataaggacgacagcaggggtcttgtgcttcctgggtacaagtacctcggacccttcaacggactcgacaagggagagccggtcaacgaggcagacgccgcggccctcgagcacgacaaagcctacaaccggcagctcgacagcggagacaacccgtacctcaagtacaaccacgccgacgcggagtttcaggagcgccttaaagaagatacgtcttttgggggcaacctcggacgagcagtcttccaggcgaaaaagagggttcttgaacctctgggcctggttgaggaacctgttaagacggctccgggaaaaaagaggccggtagagcactctcctgtggagccagactcctcctcgggaaccggaaaggcgggccagcagcctgcaagaaaaagattgaattttggtcagactggagacgcagactcagtacctgacccccagcctctcggacagccaccagcagccccctctggtctgggaactaatacgatggctacaggcagtggcgcaccaatggcagacaataacgagggcgccgacggagtgggtaattcctcgggaaattggcattgcgattccacatggatgggcgacagagtcatcaccaccagcacccgaacctgggccctgcccacctacaacaaccacctctacaaacaaatttccagccaatcaggagcctcgaacgacaatcactactttggctacagcaccccttgggggtattttgacttcaacagattccactgccacttttcaccacgtgactggcaaagactcatcaacaacaactggggattccgacccaagagactcaacttcaagctctttaacattcaagtcaaagaggtcacgcagaatgacggtacgacgacgattgccaataaccttaccagcacggttcaggtgtttactgactcggagtaccagctcccgtacgtcctcggctcggcgcatcaaggatgcctcccgccgttcccagcagacgtcttcatggtgccacagtatggatacctcaccctgaacaacgggagtcaggcagtaggacgctcttcattttactgcctggagtactttccttctcagatgctgcgtaccggaaacaactttaccttcagctacacttttgaggacgttcctttccacagcagctacgctcacagccagagtctggaccgtctcatgaatcctctcatcgaccagtacctgtattacttgagcagaacaaacactccaagtggaaccaccacgcagtcaaggcttcagttttctcaggccggagcgagtgacattcgggaccagtctaggaactggcttcctggaccctgttaccgccagcagcgagtatcaaagacatctgcggataacaacaacagtgaatactcgtggactggagctaccaagtaccacctcaatggcagggactctctggtgaatccgggcccggccatggcaagccacaaggacgatgaagaaaagttttttcctcagagcggggttctcatctttgggaagcaaggctcagagaaaacaaatgtggacattgaaaaggtcatgattacagacgaagaggaaatcaggacaaccaatcccgtggctacggagcagtatggttctgtatctaccaacctccagagaggcaacagacaagcagctaccgcagatgtcaacacacaaggcgttcttccaggcatggtctggcaggacagagatgtgtaccttcaggggcccatctgggcaaagattccacacacggacggacattttcacccctctcccctcatgggtggattcggacttaaacaccctcctccacagattctcatcaagaacaccccggtacctgcgaatccttcgaccaccttcagtgcggcaaagtttgcttccttcatcacacagtactccacgggacaggtcagcgtggagatcgagtgggagctgcagaaggaaaacagcaaacgcgggaatcccgaaattcagtacacttccaactacaacaagtctgttaatgtggactttactgtggacactaatggcgtgtattcagagcctcgccccattggcaccagatacctgactcgtaatctgtaa

SEQ ID NO: 3311 - DNA, 2208 bp, synthetic construct
  misc_feature 1..2208: note = source = /note="Description of Artificial Sequence: Synthetic polynucleotide"
  source 1..2208: mol_type = other DNA
atggctgccgatggttatcttccagattggctcgaggacactctctctgaaggaataagacagtggtggaagctcaaacctggcccaccaccaccaaagcccgcagagcggcataaggacgacagcaggggtcttgtgcttcctgggtacaagtacctcggacccttcaacggactcgacaagggagagccggtcaacgaggcagacgccgcggccctcgagcacgacaaagcctacgaccggcagctcgacagcggagacaacccgtacctcaagtacaaccacgccgacgcggagtttcaggagcgccttaaagaagatacgtcttttgggggcaacctcggacgagcagtcttccaggcgaaaaagagggttcttgaacctctgggcctggttgaggaacctgttaagacggctccgggaaaaaagaggccggtagagcactctcctgtggagccagactcctcctcgggaaccggaaaggcgggccagcagcctgcaagaaaaagattgaattttggtcagactggagacgcagactcagtacctgacccccagcctctcggacagccaccagcagccccctctggtctgggaactaatacgatggctacaggcagtggcgcaccaatggcagacaataacgagggcgccgacggagtgggtaattcctcgggaaattggcattgcgattccacatggatgggcgacagagtcatcaccaccagcacccgaacctgggccctgcccacctacaacaaccacctctacaaacaaatttccagccaatcaggagcctcgaacgacaatcactactttggctacagcaccccttgggggtattttgacttcaacagattccactgccacttttcaccacgtgactggcaaagactcatcaacaacaactggggattccgacccaagagactcaacttcaagctctttaacattcaagtcaaagaggtcacgcagaatgacggtacgacgacgattgccaataaccttaccagcacggttcaggtgtttactgactcggagtaccagctcccgtacgtcctcggctcggcgcatcaaggatgcctcccgccgttcccagcagacgtcttcatggtgccacagtatggatacctcaccctgaacaacgggagtcaggcagtaggacgctcttcattttactgcctggagtactttccttctcagatgctgcgtaccggaaacaactttaccttcagctacacttttgaggacgttcctttccacagcagctacgctcacagccagagtctggaccgtctcatgaatcctctcatcgaccagtacctgtattacttgagcagaacaaacactccaagtggaaccaccacgcagtcaaggcttcagttttctcaggccggagcgagtgacattcgggaccagtctaggaactggcttcctggaccctgttaccgccagcagcgagtatcaaagacatctgcggataacaacaacagtgaatacccgtggactggagctaccaagtaccacctcaatggcagagactctctggtgaatccgggcccggccatggcaagccacaaggacgatgaagaaaagttttttcctcagagcggggttctcatctttgggaagcaaggctcagagaaaacaaatgtggacattgaaaaggtcatgattacagacgaagaggaaatcaggacaaccaatcccgtggctacggagcagtatggttctgtatctaccaacctccagagaggcaacagacaagcagctaccgcagatgtcaacacacaaggcgttcttccaggcacggtctggcaggacagagatgtgtaccttcaggggcccatctgggcaaagattccacacacggacggacattttcacccctctcccctcatgggtggattcggacttaaacaccctcctccacagattctcatcaagaacaccccggtacctgcgaatccttcgaccaccttcagtgcggcaaagtttgcttccttcatcacacagtactccacgggacaggtcagcgtggagatcgagtgggagctgcagaaggaaaacagcaaacgctggaatcccgaaattcagtacacttccaactacaacaagtctgttaatgtggactttactgtggacactaatggcgtgtattcagagcctcgccccattggcaccagatacctgactcgtaatctgtaa

SEQ ID NO: 3312 - DNA, 2208 bp, synthetic construct
  misc_feature 1..2208: note = source = /note="Description of Artificial Sequence: Synthetic polynucleotide"
  source 1..2208: mol_type = other DNA
atggctgccgatggttatcttccagattggctcgaggacactctctctgaaggaataagacagtggtggaagctcaaacctggcccaccaccaccaaagcccgcagagcggcataaggacgacagcaggggtcttgtgcttcctgggtacaagtacctcggacccttcaacggactcgacaagggagagccggtcaacgaggcagacgccgcggccctcgagcacgacaaagcctacgaccggcagctcgacagcggagacaacccgtacctcaagtacaaccacgccgacgcggagtttcaggagcgccttaaagaagatacgtcttttgggggcaacctcggacgagcagtcttccaggcgaaaaagagggttcttgaacctctgggcctggttgaggaacctgttaagacggctccgggaaaaaagaggccggtagagcactctcctgtggagccagactcctcctcgggaaccggaaaggcgggccagcagcctgcaagaaaaagattgaattttggtcagactggagacgcagactcagtacctgacccccagcctctcggacagccaccagcagccccctctggtctgggaactaatacgatggctacaggcagtggcgcaccaatggcagacaataacgagggcgccgacggagtgggtaattcctcgggaaattggcattgcgattccacatggatgggcgacagagtcatcaccaccagcacccgaacctgggccctgcccacctacaacaaccacctctacaaacaaatttccagccaatcaggagcctcgaacgacaatcactactttggctacagcaccccttgggggtattttgacttcaacagattccactgccacttttcaccacgtgactggcaaagactcatcaacaacaactggggattccgacccaagagactcaacttcaagctctttaacattcaagtcaaagaggtcacgcagaatgacggtacgacgacgattgccaataaccttaccagcacggttcaggtgtttactgactcggagtaccagctcccgtacgtcctcggctcggcgcatcaaggatgcctcccgccgttcccagcagacgtcttcatggtgccacagtatggatacctcaccctgaacaacgggagtcaggcagtaggacgctcttcattttactgcctggagtactttccttctcagatgctgcgtaccggaaacaactttaccttcagctacacttttgaggacgttcctttccacagcagctacgctcacagccagagtctggaccgtctcatgaatcctctcatcgaccagtacctgtattacttgagcagaacaaacactccaagtggaaccaccacgcagtcaaggcttcagttttctcaggccggagcgagtgacattcgggaccagtctaggaactggcttcctggaccctgttaccgccagcagcgagtatcaaagacatctgcggataacaacaacagtgaatactcgtggactggagctaccaagtaccacctcaatggcagagactctctggtgaatccgggcccggccatggcaagccacaaggacgatgaagaaaagttttttcctcagagcggggttctcatctttgggaagcaaggctcagagaaaacaaatgtgggcattgaaaaggtcatgattacagacgaagaggaaatcaggacaaccaatcccgtggctacggagcagtatggttctgtatctaccaacctccagagaggcaacagacaagcagctaccgcagatgtcaacacacaaggcgttcttccaggcacggtctggcaggacagagatgtgtaccttcaggggcccatctgggcaaagattccacacacggacggacattttcacccctctcccctcatgggtggattcggacttaaacaccctcctccacagattctcatcaagaacaccccggtacctgcgaatccttcgaccaccttcagtgcggcaaagtttgcttccttcatcacacagtactccacgggacaggtcagcgtggagatcgagtgggagctgcagaaggaaaacagcaaacgctggaatcccgaaattcagtacacttccaactacaacaagtctgttaatgtggactttactgtggacactaatggcgtgtattcagagcctcgccccattggcaccagatacctgactcgtaatctgtaa

SEQ ID NO: 3313 - DNA, 2208 bp, synthetic construct
  misc_feature 1..2208: note = source = /note="Description of Artificial Sequence: Synthetic polynucleotide"
  source 1..2208: mol_type = other DNA
atggctgccgatggttatcttccagattggctcgaggacactctctctgaaggaataagacagtggtggaagctcaaacctggcccaccaccaccaaagcccgcagggcggcataaggacgacagcaggggtcttgtgcttcctgggtacaagtacctcggacccttcaacggactcgacaagggagagccggtcaacgaggcagacgccgcggccctcgagcacgacaaagcctacgaccggcagctcgacagcggagacaacccgtacctcaagtacaaccacgccgacgcggagtttcaggagcgccttaaagaagatacgtcttttgggggcaacctcggacgagcagtcttccaggcgaaaaagagggctcttgaacctctgggcctggttgaggaacctgttaagacggctccgggaaaaaagaggccggtagagcactctcctgtggagccagactcctcctcgggaaccggaaaggcgggccagcagcctgcaagaaaaagattgaattttggtcagactggagacgcagactcagtacctgacccccagcctctcggacagccaccagcagccccctctggtctgggaactaatacgatggctacaggcagtggcgcaccaatggcagacaataacgagggcgccgacggagtgggtaattcctcgggaaattggcattgcgattccacatggatgggcgacagagtcatcaccaccagcacccgaacctgggccctgcccacctacaacaaccacctctacaaacaaatttccagccaatcaggagcctcgaacgacaatcactactttggctacagcaccccttgggggtattttgacttcaacagattccactgccacttttcaccacgtgactggcaaagactcatcaacaacaactggggattccgacccaagagactcaacttcaagctctttaacattcaagtcaaagaggtcacgcagaatgacggtacgacgacgattgccaataaccttaccagcacggttcaggtgtttactgactcggagtaccagctcccgtacgtcctcggctcggcgcatcaaggatgcctcccgccgttcccagcagacgtcttcatggtgccacagtatggatacctcaccctgaacaacgggagtcaggcagtaggacgctcttcattttactgcctggagtactttccttctcagatgctgcgtaccggaaacaactttaccttcagctacacttttgaggacgttcctttccacagcagctacgctcacagccagagtctggaccgtctcatgaatcctctcatcgaccagtacctgtattacttgagcagaacaaacactccaagtggaaccaccacgcagtcaaggcttcagttttctcaggccggagcgagtgacattcgggaccagtctaggaactggcttcctggaccctgttaccgccagcagcgagtatcaaagacatctgcggataacaacaacagtgaatactcgtggactggagctaccaagtaccacctcaatggcagagactctctggtgaatccgggcccggccatggcaagccacaaggacgatgaagaaaagttttttcctcagagcggggttctcatctttgggaagcaaggctcagagaaaacaaatgtggacattgaaaaggtcatgattacagacgaagaggaaatcaggacaaccaatcccgtggctacggagcagtatggttctgtatctaccaacctccagagaggcaacagacaagcagctaccgcagatgtcaacacacaaggcgttcttccaggcatggtctggcaggacagagatgtgtaccttcaggggcccatctgggcaaagattccacacacggacggacattttcacccctctcccctcatgggtggattcggacttaaacaccctcctccacagattctcatcaagaacaccccggtacctgcgaatccttcgaccaccttcagtgcggcaaagtttgcttccttcatcacacagtactccacgggacaggtcagcgtggagatcgagtgggagctgcagaaggaaaacagcaaacgctggaatcccgaaattcagtacacttccaactacaacaagtctgttaatgtggactttactgtggacactaatggcgtgtattcagagcctcgccccattggcaccagatacctgactcgtaatctgtaa

SEQ ID NO: 3314 - DNA, 2208 bp, synthetic construct
  misc_feature 1..2208: note = source = /note="Description of Artificial Sequence: Synthetic polynucleotide"
  source 1..2208: mol_type = other DNA
atggctgccgatggttatcttccagattggctcgaggacactctctctgaaggaataagacagtggtggaagctcaaacctggcccaccaccaccaaagcccgcagagcggcataaggacgacagcaggggtcttgtgcttcctgggtacaagtacctcggacccttcaacggactcgacaagggagagccggtcaacgaggcagacgccgcggccctcgagcacgacaaagcctacgaccggcagctcgacagcggagacaacccgtacctcaagtacaaccacgccgacgcggagtttcaggagcgccttaaagaagatacgtcttttgggggcaacctcggacgagcagtcttccaggcgaaaaagagggttcttgaacctctgggcctggttgaggaacctgttaagacggctccgggaaaaaagaggccggtagagcactctcctgtggagccagactcctcctcgggaaccggaaaggcgggccagcagcctgcaagaaaaagattgaattttggtcagactggagacgcagactcagtacctgacccccagcctctcggacagccaccagcagccccctctggtctgggaactaatacgatggctacaggcagtggcgcaccaatggcagacaataacgagggcgccgacggagtgggtaattcctcgggaaattggcattgcgattccacatggatgggcgacagagtcatcaccaccagcacccgaacctgggccctgcccacctacaacaaccacctctacaaacaaatttccagccaatcaggagcctcgaacgacaatcactactttggctacagcaccccttgggggtattttgacttcaacagattccactgccacttttcaccacgtgactggcaaagactcatcaacaacaactggggattccgacccaagagactcaacttcaagctctttaacattcaagtcaaagaggtcacgcagaatgacggtacgacgacgattgccaataaccttaccagcacggttcaggtgtttactgactcggagtaccagctcccgtacgtcctcggctcggcgcatcaaggatgcctcccgccgttcccagcagacgtcttcatggtgccacagtatggatacctcaccctgaacaacgggagtcaggcagtaggacgctcttcattttactgcctggagtactttccttctcagatgctgcgtaccggaaacaactttaccttcagctacacttttgaggacgttcctttccacagcagctacgctcacagccagagtctggaccgtctcatgaatcctctcatcgaccagtacctgtattacttgagcagaacaaacactccaagtggaaccaccacgcagtcaaggcctcagttttctcaggccggagcgagtgacattcgggaccagtctaggaactggcttcctggaccctgttaccgccagcagcgagtatcaaagacatctgcggataacaacaacagtgaatactcgtggactggagctaccaagtaccacctcaatggcagagactctctggtgaatccgggcccggccatggcaagccacaaggacgatgaagaaaagttttttcctcagagcggggttctcatctttgggaagcaaggctcagagaaaacaaatgtggacattgaaaaggtcatgattacagacgaagaggaaatcaggacaaccaatcccgtggctacggagcagtatggttctgtatctaccaacctccagagaggcaacagacaagcagctaccgcagatgtcaacacacaaggcgttcttccaggcacggtctggcaggacagagatgtgtaccttcaggggcccatctgggcaaagattccacacacggacggacattttcacccctctcccctcatgggtggattcggacttaaacaccctcctccacagattctcatcaagaacaccccggtacctgcgaatccttcgaccaccttcagtgcggcaaagtttgcttccttcatcacacagtactccacgggacaggtcagcgtggagatcgagtgggagctgcagaaggaaaacagcaaacgctggaatcccgaaattcagtacacttccaactacaacaagtctgttaatgtggactttactgtggacactaatggcgtgtattcagagcctcgccccattggcaccagatacctgactcgtaatctgtaa

SEQ ID NO: 3315 - DNA, 2208 bp, synthetic construct; identical to SEQ ID NO: 21
  misc_feature 1..2208: note = source = /note="Description of Artificial Sequence: Synthetic polynucleotide"
  source 1..2208: mol_type = other DNA

SEQ ID NO: 3316 - DNA, 2208 bp, synthetic construct
  misc_feature 1..2208: note = source = /note="Description of Artificial Sequence: Synthetic polynucleotide"
  source 1..2208: mol_type = other DNA
atggctgccgatggttatcttccagattggctcgaggacactctctctgaaggaataagacagtggtggaagctcaaacctggcccaccaccaccaaagcccgcagagcggcataaggacgacagcaggggtcttgtgcttcctgggtacaagtacctcggacccttcaacggactcgacaagggagagccggtcaacgaggcagacgccgcggccctcgagcacgacaaagcctacaaccggcaactcgacagcggagacaacccgtacctcaagtacaaccacgccgacgcggagtttcaggagcgccttaaagaagatacgtcttttgggggcaacctcggacgagcagtcttccaggcgaaaaagagggttcttgaacctctgggcctggttgaggaacctgttaagacggctccgggaaaaaagaggccggtagagcactctcctgtggagccagactcctcctcgggaaccggaaaggcgggccagcagcctgcaagaaaaagattgaattttggtcagactggagacgcagactcagtacctgacccccagcctctcggacagccaccagcagccccctctggtctgggaactaatacgatggctacaggcagtggcgcaccaatggcagacaataacgagggcgccgacggagtgggtaattcctcgggaaattggcattgcgattccacatggatgggcgacagagtcatcaccaccagcacccgaacctgggccctgcccacctacaacaaccacctctacaaacaaatttccagccaatcaggagcctcgaacgacaatcactactttggctacagcaccccttgggggtattttgacttcaacagattccactgccacttttcaccacgtgactggcaaagactcatcaacaacaactggggattccgacccaagagactcaacttcaagctctttaacattcaagtcaaagaggtcacgcagaatgacggtacgacgacgattgccaataaccttaccagcacggttcaggtgtttactgactcggagtaccagctcccgtacgtcctcggctcggcgcatcaaggatgcctcccgccgttcccagcagacgtcttcatggtgccacagtatggatacctcaccctgaacaacgggagtcaggcagtaggacgctcttcattttactgcctggagtactttccttctcagatgctgcgtaccggaaacaactttaccttcagctacacttttgaggacgttcctttccacagcagctacgctcacagccagagtctggaccgtctcatgaatcctctcatcgaccagtacctgtattacttgagcagaacaaacactccaagtggaaccaccacgcagtcaaggcttcagttttctcaggccggagcgagtgacattcgggaccagtctaggaactggcttcctggaccctgttaccgccagcagcgagtatcaaagacatctgcggataacaacaacagtgaatactcgtggactggagctaccaagtaccacctcaatggcagggactctctggtgaatccgggcccggccatggcaagccacaaggacgatgaagaaaagttttttcctcagagcggggttctcatctttgggaagcaaggctcagagaaaacaaatgtggacattgaaaaggtcatgattacagacgaagaggaaatcaggacaaccaatcccgtggctacggagcagtatggttctgtatctaccaacctccagagaggcaacagacaagcagctaccgcagatgtcaacacacaaggcgttcttccaggcatggtctggcaggacagagatgtgtaccttcaggggcccatctgggcaaagattccacacacggacggacattttcacccctctcccctcatgggtggattcggacttaaacaccctcctccacagattctcatcaagaacaccccggtacctgcgaatccttcgaccaccttcagtgcggcaaagtttgcttccttcatcacacagtactccacgggacaggtcagcgtggagatcgagtgggagctgcagaaggaaaacagcaaacgctggaatcccgaaattcagtacacttccaactacaacaagtctgttaatgtggactttactgtggacactaatggcgtgtattcagagcctcgccccattggcaccagatacctgactcgtaatctgtaa

SEQ ID NO: 3317 - DNA, 2208 bp, synthetic construct
  misc_feature 1..2208: note = source = /note="Description of Artificial Sequence: Synthetic polynucleotide"
  source 1..2208: mol_type = other DNA
atggctgccgatggttatcttccagattggctcgaggacactctctctgaaggaataagacagtggtggaagctcaaacctggcccaccaccaccaaagcccgcagagcggcataaggacgacagcaggggtcttgtgcttcctgggtacaagtacctcggacccttcaacggactcgacaagggagagccggtcaacgaggcagacgccgcggccctcgagcacgacaaagcctacgaccggcagctcgacagcggagacaacccgtacctcaagtacaaccacgccgacgcggagtttcaggagcgccttaaagaagatacgtcttttgggggcaacctcggacgagcagtcttccaggcgaaaaagagggttcttgaacctctgggcctggttgaggaacctgttaagacggctccgggaaaaaagaggccggtagagcactctcctgtggagccagactcctcctcgggaaccggaaaggcgggccagcagcctgcaagaaaaagattgaattttggtcagactggagacgcagactcagtacctgacccccagcctctcggacagccaccagcagccccctctggtctgggaactaatacgatggctacaggcagtggcgcaccaatggcagacaataacgagggcgccgacggagtgggtaattcctcgggaaattggcattgcgattccacatggatgggcgacagagtcatcaccaccagcacccgaacctgggccctgcccacctacaacaaccacctctacaaacaaatttccagccaatcaggagcctcgaacgacaatcactactttggctacagcaccccttgggggtattttgacttcaacagattccactgccacttttcaccacgtgactggcaaagactcatcaacaacaactggggattccgacccaagagactcaacttcaagctctttaacattcaagtcaaagaggtcacgcagaatgacggtacgacgacgattgccaataaccttaccagcacggttcgggtgtttactgactcggagtaccagctcccgtacgtcctcggctcggcgcatcaaggatgcctcccgccgttcccagcagacgtcttcatggtgccacagtatggatacctcaccctgaacaacgggagtcaggcagtaggacgctcttcattttactgcctggagtactttccttctcagatgctgcgtaccggaaacaactttaccttcagctacacttttgaggacgttcctttccacagcagctacgctcacagccagagtctggaccgtctcatgaatcctctcatcgaccagtacctgtattacttgagcagaacaaacactccaagtggaaccaccacgcagtcaaggcttcagttttctcaggccggagcgagtgacattcgggaccagtctaggaactggcttcctggaccctgttaccgccagcagcgagtatcaaagacatctgcggataacaacaacagtgaatactcgtggactggagctaccaagtaccacctcaatggcagagactctctggtgaatccgggcccggccatggcaagccacaaggacgatgaagaaaagttttttcctcagagcggggttctcatctttgggaagcaaggctcagagaaaacaaatgtggacattgaaaaggtcatgattacagacgaagaggaaatcaggacaaccaatcccgtggctacggagcagtatggttctgtatctaccaacctccagagaggcaacagacaagcagctaccgcagatgtcaacacacaaggcgttcttccaggcacggtctggcaggacagagatgtgtaccttcaggggcccatctgggcaaagattccacacacggacggacattttcacccctctcccctcatgggtggattcggacttaaacaccctcctccacagattctcatcaagaacaccccggtacctgcgaatccttcgaccaccttcagtgcggcaaagtttgcttccttcatcacacagtactccacgggacaggtcagcgtggagatcgagtgggagctgcagaaggaaaacagcaaacgctggaatcccgaaattcagtacacttccaactacaacaagtctgttaatgtggactttactgtggacactaatggcgtgtattcagagcctcgccccattggcaccagatacctgactcgtaatctgtaa

SEQ ID NO: 3318 - DNA, 2208 bp, synthetic construct
  misc_feature 1..2208: note = source = /note="Description of Artificial Sequence: Synthetic polynucleotide"
  source 1..2208: mol_type = other DNA
atggctgccgatggttatcttccagattggctcgaggacactctctctgaaggaataagacagtggtggaagctcaaacctggcccaccaccaccaaagcccgcagagcggcataaggacgacagcaggggtcttgtgcttcctgggtacaagtacctcggacccttcaacggactcgacaagggagagccggtcaacgaggcagacgccgcggccctcgagcacgacaaagcctacgaccggcagctcgacagcggagacaacccgtacctcaagtacaaccacgccgacgcggagtttcaggagcgccttaaagaagatacgtcttttgggggcaacctcggacgagcagtcttccaggcgaaaaagagggttcttgaacctctgggcctggttgaggaacctgttaagacggctccgggaaaaaagaggccggtagagcactctcctgtggagccagactcctcctcgggaaccggaaaggcgggccagcagcctgcaagaaaaagattgaattttggtcagactggagacgcagactcagtacctgacccccagcctctcggacagccaccagcagccccctctggtctgggaactaatacgatggctacaggcagtggcgcaccaatggcagacaataacgagggcgccgacggagtgggtaattcctcgggaaattggcattgcgattccacatggatgggcgacagagtcatcaccaccagcacccgaacctgggccctgcccacctacaacaaccacctctacaaacaaatttccagccaatcaggagcctcgaacgacaatcactactttggctacagcaccccttgggggtattttgacttcaacagattccactgccacttttcaccacgtgactggcaaagactcatcaacaacaactggggattccgacccaagagactcaacttcaagctctttaacattcaagtcaaagaggtcacgcagaatgacggtacgacgacgattgccaataaccttaccagcacggttcaggtgtttactgactcggagtaccagctcccgtacgtcctcggctcggcgcatcaaggatgcctcccgccgttcccagcagacgtcttcatggtgccacagtatggatacctcaccctgaacaacgggagtcaggcagtaggacgctcttcattttactgcctggagtactttccttctcagatgctgcgtaccggaaacaactttaccttcagctacacttttgaggacgctcctttccacagcagctacgctcacagccagagtctggaccgtctcatgaatcctctcatcgaccagtacctgtattacttgagcagaacaaacactccaagtggaaccaccacgcagtcaaggcttcagttttctcaggccggagcgagtgacattcgggaccagtctaggaactggcttcctggaccctgttaccgccagcagcgagtatcaaagacatctgcggataacaacaacagtgaatactcgtggactggagctaccaagtaccacctcaatggcagagactctctggtgaatccgggcccggccatggcaagccacaaggacgatgaagaaaagttttttcctcagagcggggttctcatctttgggaagcaaggctcagagaaaacaaatgtggacattgaaaaggtcatgattacagacgaagaggaaatcaggacaaccaatcccgtggctacggagcagtatggttctgtatctaccaacctccagagaggcaacagacaagcagctaccgcagatgtcaacacacaaggcgttcttccaggcacggtctggcaggacagagatgtgtaccttcaggggcccatctgggcaaagattccacacacggacggacattttcacccctctcccctcatgggtggattcggacttaaacaccctcctccacagattctcatcaagaacaccccggtacctgcgaatccttcgaccaccttcagtgcggcaaagtttgcttccttcatcacacagtactccacgggacaggtcagcgtggagatcgagtgggagctgcagaaggaaaacagcaaacgctggaatcccgaaattcagtacacttccaactacaacaagtctgttaatgtggactttactgtggacactaatggcgtgtattcagagcctcgccccattggcaccagatacctgactcgtaatctgtaa

SEQ ID NO: 3319 - DNA, 2205 bp, synthetic construct
  misc_feature 1..2205: note = source = /note="Description of Artificial Sequence: Synthetic polynucleotide"
  source 1..2205: mol_type = other DNA
atggctgccgatggttatcttccagattggctcgaggacactctctctgaaggaataagacagtggtggaagctcaaacctggcccaccaccaaagcccgcagagcggcataaggacgacagcaggggtcttgtgcttcctgggtacaagtacctcggacccttcaacggactcgacaagggagagccggtcaacgaggcagacgccgcggccctcgagcacgacaaagcctacgaccggcagctcgacagcggagacaacccgtacctcaagtacaaccacgccgacgcggagtttcaggagcgccttaaagaagatacgtcttttgggggcaacctcggacgagcagtcttccaggcgaaaaagagggttcttgaacctctgggcctggttgaggaacctgttaagacggctccgggaaaaaagaggccggtagagcactctcctgtggagccagactcctcctcgggaaccggaaaggcgggccagcagcctgcaagaaaaagattgaattttggtcagactggagacgcagactcagtacctgacccccagcctctcggacagccaccagcagccccctctggtctgggaactaatacgatggctacaggcagtggcgcaccaatggcagacaataacgagggcgccgacggagtgggtaattcctcgggaaattggcattgcgattccacatggatgggcgacagagtcatcaccaccagcacccgaacctgggccctgcccacctacaacaaccacctctacaaacaaatttccagccaatcaggagcctcgaacgacaatcactactttggctacagcaccccttgggggtattttgacttcaacagattccactgccacttttcaccacgtgactggcaaagactcatcaacaacaactggggattccgacccaagagactcaacttcaagctctttaacattcaagtcaaagaggtcacgcagaatgacggtacgacgacgattgccaataaccttaccagcacggttcaggtgtttactgactcggagtaccagctcccgtacgtcctcggctcggcgcatcaaggatgcctcccgccgttcccagcagacgtcttcatggtgccacagtatggatacctcaccctgaacaacgggagtcaggcagtaggacgctcttcattttactgcctggagtactttccttctcagatgctgcgtaccggaaacaactttaccttcagctacacttttgaggacgttcctttccacagcagctacgctcacagccagagtctggaccgtctcatgaatcctctcatcgaccagtacctgtattacttgagcagaacaaacactccaagtggaaccaccacgcagtcaaggcttcagttttctcaggccggagcgagtgacattcgggaccagtctaggaactggcttcctggaccctgttaccgccagcagcgagtatcaaagacatctgcggataacaacaacagtgaatactcgtggactggagctaccaagtaccacctcaatggcagagactctctggtgaatccgggcccggccatggcaagccacaaggacgatgaagaaaagttttttcctcagagcggggttctcatctttgggaagcaaggctcagagaaaacaaatgtggacattgaaaaggtcatgattacagacgaagaggaaatcaggacaaccaatcccgtggctacggagcagtatggttctgtatctaccaacctccagagaggcaacagacaagcagctaccgcagatgtcaacacacaaggcgttcttccaggcacggtctggcaggacagagatgtgtaccttcaggggcccatctgggcaaagattccacacacggacggacattttcacccctctcccctcatgggtggattcggacttaaacaccctcctccacagattctcatcaagaacaccccggtacctgcgaatccttcgaccaccttcagtgcggcaaagtttgcttccttcatcacacagtactccacgggacaggtcagcgtggagatcgagtgggagctgcagaaggaaaacagcaaacgctggaatcccgaaattcagtacacttccaactacaacaagtctgttaatgtggactttactgtggacactaatggcgtgtattcagagcctcgccccattggcaccagatacctgactcgtaatctgtaa

SEQ ID NO: 3320 - DNA, 2208 bp, synthetic construct
  misc_feature 1..2208: note = source = /note="Description of Artificial Sequence: Synthetic polynucleotide"
  source 1..2208: mol_type = other DNA
atggctgccgatggttatcttccagattggctcgaggacactctctctgaaggaataagacagtggtggaagctcaaacctggcccaccaccaccaaagcccgcagagcggcataaggacgacagcaggggtcttgtgcttcctgggtacaagtacctcggacccttcaacggactcgacaagggagagccggtcaacgaggcagacgccgcggccctcgagcacgacaaagcctacgaccggcagctcgacagcggagacaacccgtacctcaagtacaaccacgccgacgcggagtttcaggagcgccttaaagaagatacgtcttttgggggcaacctcggacgagcagtcttccaggcgaaaaagagggctcttgaacctctgggcctggttgaggaacctgttaagacggctccgggaaaaaagaggccggtagagcactctcctgtggagccagactcctcctcgggaaccggaaaggcgggccagcagcctgcaagaaaaagattgaattttggtcagactggagacgcagactcagtacctgacccccagcctctcggacagccaccagcagccccctctggtctgggaactaatacgatggctacaggcagtggcgcaccaatggcagacaataacgagggcgccgacggagtgggtaattcctcgggaaattggcattgcgattccacatggatgggcgacagagtcatcaccaccagcacccgaacctgggccctgcccacctacaacaaccacctctacaaacaaatttccagccaatcaggagcctcgaacgacaatcactactttggctacagcaccccttgggggtattttgacttcaacagattccactgccacttttcaccacgtgactggcaaagactcatcaacaacaactggggattccgacccaagagactcaacttcaagctctttaacattcaagtcaaagaggtcacgcagaatgacggtacgacgacgattgccaataaccttaccagcacggttcaggtgtttactgactcggagtaccagctcccgtacgtcctcggctcggcgcatcaaggatgcctcccgccgttcccagcagacgtcttcatggtgccacagtatggatacctcaccctgaacaacgggagtcaggcagtaggacgctcttcattttactgcctggagtactttccttctcagatgctgcgtaccggaaacaactttaccttcagctacacttttgaggacgttcctttccacagcagctacgctcacagccagagtctggaccgtctcatgaatcctctcatcgaccagtacctgtattacttgagcagaacaaacactccaagtggaaccaccacgcagtcaaggcttcggttttctcaggccggagcgagtgacattcgggaccagtctaggaactggcttcctggaccctgttaccgccagcagcgagtatcaaagacatctgcggataacaacaacagtgaatactcgtggactggagctaccaagtaccacctcaatggcagagactctctggtgaatccgggcccggccatggcaagccacaaggacgatgaagaaaagttttttcctcagagcggggttctcatctttgggaagcaaggctcagagaaaacaaatgtggacattgaaaaggtcatgattacagacgaagaggaaatcaggacaaccaatcccgtggctacggagcagtatggttctgtatctaccaacctccagagaggcaacagacaagcagctaccgcagatgtcaacacacaaggcgttcttccaggcatggtctggcaggacagagatgtgtaccttcaggggcccatctgggcaaagattccacacacggacggacattttcacccctctcccctcatgggtggattcggacttaaacaccctcctccacagattctcatcaagaacaccccggtacctgcgaatccttcgaccaccttcagtgcggcaaagtttgcttccttcatcacacagtactccacgggacaggtcagcgtggagatcgagtgggagctgcagaaggaaaacagcaaacgctggaatcccgaaattcagtacacttccaactacaacaagtctgttaatgtggactttactgtggacactaatggcgtgtattcagagcctcgccccattggcaccagatacctgactcgtaatctgtaa

SEQ ID NO: 3321 - DNA, 2208 bp, synthetic construct
  misc_feature 1..2208: note = source = /note="Description of Artificial Sequence: Synthetic polynucleotide"
  source 1..2208: mol_type = other DNA
atggctgccgatggttatcttccagattggctcgaggacactctctctgaaggaataagacagtggtggaagctcaaacctggcccaccaccaccaaagcccgcagagcggcataaggacgacagcaggggtcttgtgcttcctgggtacaagtacctcggacccttcaacggactcgacaagggagagccggtcaacgaggcagacgccgcggccctcgagcacgacaaagcctacgaccggcagctcgacagcggagacaacccgtacctcaagtacaaccacgccgacgcggagtttcaggagcgccttaaagaagatacgtcttttgggggcaacctcggacgagcagtcttccaggcgaaaaagagggttcttgaacctctgggcctggttgaggaacctgttaagacggctccgggaaaaaagaggccggtagagcactctcctgtggagccagactcctcctcgggaaccggaaaggcgggccagcggcctgcaagaaaaagattgaattttggtcagactggagacgcagactcagtacctgacccccagcctctcggacagccaccagcagccccctctggtctgggaactaatacgatggctacaggcagtggcgcaccaatggcagacaataacgagggcgccgacggagtgggtaattcctcgggaaattggcattgcgattccacatggatgggcgacagagtcatcaccaccagcacccgaacctgggccctgcccacctacaacaaccacctctacaaacaaatttccagccaatcaggagcctcgaacgacaatcactactttggctacagcaccccttgggggtattttgacttcaacagattccactgccacttttcaccacgtgactggcaaagactcatcaacaacaactggggattccgacccaagagactcaacttcaagctctttaacattcaagtcaaagaggtcacgcagaatgacggtacgacgacgattgccaataaccttaccagcacggttcaggtgtttactgactcggagtaccagctcccgtacgtcctcggctcggcgcatcaaggatgcctcccgccgttcccagcagacgtcttcatggtgccacagtatggatacctcaccctgaacaacgggagtcaggcagtaggacgctcttcattttactgcctggagtactttccttctcagatgctgcgtaccggaaacaactttaccttcagctacacttttgaggacgttcctttccacagcagctacgctcacagccagagtctggaccgtctcatgaatcctctcatcgaccagtacctgtattacttgagcagaacaaacactccaagtggaaccaccacgcagtcaaggcttcagttttctcaggccggagcgagtgacattcgggaccagtctaggaactggcttcctggaccctgttaccgccagcagcgagtatcaaagacatctgcggataacaacaacagtgaatactcgtggactggagctaccaagtaccacctcaatggcagagactctctggtgaatccgggcccggccatggcaagccacaaggacgatgaagaaaagttttttcctcagagcggggttctcatctttgggaagcaaggctcagagaaaacaaatgtggacattgaaaaggtcatgattacagacgaagaggaaatcaggacaaccaatcccgtggctacggagcagtatggttctgtatctaccaacctccagagaggcaacagacaagcagctaccgcagatgtcaacacacaaggcgttcttccaggcacggtctggcaggacagagatgtgtaccttcaggggcccatctgggcaaagattccacacacggacggacattttcacccctctcccctcatgggtggattcggacttaaacaccctcctccacagattctcatcaagaacaccccggtacctgcgaatccttcgaccaccttcagtgcggcaaagtttgcttccttcatcacacagtactccacgggacaggtcagcgtggagatcgagtgggagctgcagaaggaaaacagcaaacgctggaatcccgaaattcagtacacttccaactacaacaagtctgttaatgtggactttactgtggacactaatggcgtgtattcagagcctcgccccattggcaccagatacctgactcgtaatctgtaa

SEQ ID NO: 3322 - DNA, 2208 bp, synthetic construct
  misc_feature 1..2208: note = source = /note="Description of Artificial Sequence: Synthetic polynucleotide"
  source 1..2208: mol_type = other DNA
atggctgccgatggttatcttccagattggctcgaggacactctctctgaaggaataagacagtggtggaagctcaaacctggcccaccaccaccaaagcccgcagagcggcataaggacgacagcaggggtcttgtgcttcctgggtacaagtacctcggacccttcaacggactcgacaagggagagccggtcaacgaggcagacgccgcggccctcgagcacgacaaagcctacgaccggcagctcgacagcggagacaacccgtacctcaagtacaaccacgccgacgcggagtttcaggagcgccttaaagaagatacgtcttttgggggcaacctcggacgagcagtcttccaggcgaaaaagagggttcttgaacctctgggcctggttgaggaacctgttaagacggctccgggaaaaaagaggccggtagagcactctcctgtggagccagactcctcctcgggaaccggaaaggcgggccagcagcctgcaagaaaaagattgaattttggtcagactggagacgcagactcagtacctgacccccagcctctcggacagccaccagcagccccctctggtctgggaactaatacgatggctacaggcagtggcgcaccaatggcagacaataacgagggcgccgacggagtgggtaattcctcgggaaattggcattgcgattccacatggatgggcgacagagtcatcaccaccagcacccgaacctgggccctgcccacctacaacaaccacctctacaaacaaatttccagccaatcaggagcctcgaacgacaatcactactttggctacagcaccccttgggggtattttgacttcaacagattccactgccacttttcaccacgtgactggcaaagactcatcaacaacaactggggattccgacccaagagactcaacttcaagctctttaacattcaagtcaaagaggtcacgcagaatgacggtacgacgacgattgccaataaccttaccagcacggttcaggtgtttactgactcggagtaccagctcccgtacgtcctcggctcggcgcatcaaggatgcctcccgccgttcccagcagacgtcttcatggtgccacagtatggatacctcaccctgaacaacgggagtcaggcagtaggacgctcttcattttactgcctggagtactttccttctcagatgctgcgtaccggaaacaactttaccttcagctacacttttgaggacgttcctttccacagcagctacgctcacagccagagtctggaccgtctcatgaatcctctcatcgaccagtacctgtattacttgagcagaacaaacactccaagtggaaccaccacgcagtcaaggcttcagttttctcaggccggagcgagtgacattcgggaccagtctaggaactggcttcctggaccctgttaccgccagcagcgagtatcaaagacatctgcggataacaacaacagtgaatactcgtggactggagctaccaagtaccacctcaatggcagagactctctggtgaatccgggcccggccatggcaagccacaaggacgatgaagaaaagttttttcctcagagcggggttctcatctttgggaagcaaggctcagagaaaacaaatgtggacattgaaaaggtcatgattacagacgaagaggaaatcaggacaaccaatcccgtggctacggagcagtatggttctgtatctaccaacctccagagaggcaacagacaagcagctaccgcagatgtcaacacacaaggcgttcttccaggcatggtctggcaggacagagatgtgtaccttcaggggcccatctgggcaaagattccacacacggacggacattttcacccctctcccctcatgggtggattcggacttaaacaccctcctccacagattctcatcaagaacaccccggtacctgcgaatccttcgaccaccttcagtgcggcaaagtttgcttccttcatcacacagtactccacgggacaggtcagcgtggagatcgagtgggagctgcagaaggaaaacagcaaccgctggaatcccgaaattcagtacacttccaactacaacaagtctgttaatgtggactttactgtggacactaatggcgtgtattcagagcctcgccccattggcaccagatacctgactcgtaatctgtaa

SEQ ID NO: 3323 - DNA, 2208 bp, synthetic construct
  misc_feature 1..2208: note = source = /note="Description of Artificial Sequence: Synthetic polynucleotide"
  source 1..2208: mol_type = other DNA
atggctgccgatggttatcttccagattggctcgaggacactctctctgaaggaataagacagtggtggaagctcaaacctggcccaccaccaccaaagcccgcagagcggcataaggacgacagcaggggtcttgtgcttcctgggtacaagtacctcggacccttcaacggactcgacaagggagagccggtcaacgaggcagacgccgcggccctcgagcacgacaaagcctacgaccggcagctcgacagcggagacaacccgtacctcaagtacaaccacgccgacgcggagtttcaggagcgccttaaagaagatacgtcttttgggggcaacctcggacgagcagtcttccaggcgaaaaagagggttcttgaacctctgggcctggttgaggaacctgttaagacggctccgggaaaaaagaggccggtagagcactctcctgtggagccagactcctcctcgggaaccggaaaggcgggccagcagcctgcaagaaaaagattgaattttggtcagactggagacgcagactcagtacctgacccccagcctctcggacagccaccagcagccccctctggtctgggaactaatacgatggctacaggcagtggcgcaccaatggcagacaataacgagggcgccgacggagtgggtaattcctcgggaaattggcattgcgattccacatggatgggcgacagagtcatcaccaccagcacccgaacctgggccctgcccacctacaacaaccacctctacaaacaaatttccagccaatcaggagcctcgaacgacaatcactactttggctacagcaccccttgggggtattttgacttcaacagattccactgccacttttcaccacgtgactggcaaagactcatcaacaacaactggggattccgacccaagagactcaacttcaagctctttaacattcaagtcaaagaggtcacgcagaatgacggtacgacgacgattgccaataaccttaccagcacggttcaggtgtttactgactcggagtaccagctcccgtacgtcctcggctcggcgcatcaaggatgcctcccgccgttcccagcagacgtcttcatggtgccacagtatggatacctcaccctgaacaacgggagtcaggcagtaggacgctcttcattttactgcctggagtactttccttctcagatgctgcgtaccggaaacaactttaccttcagctacacttttgaggacgttcctttccacagcagctacgctcacagccagagtctggaccgtctcatgaatcctctcatcgaccagtacctgtattacttgagcagaacaaacactccaagtggaaccaccacgcagtcaaggcttcagttttctcaggccggagcgagtgacattcgggaccagtctaggaactggcttcctggaccctgttaccgccagcagcgagtatcaaagacatctgcggataacaacaacagtgaatactcgtggactggagctaccaagtaccacctcaatggcagagactctctggtgaatccgggcccggccatggcaagccacaaggacgatgaagaaaagttttttcctcagagcggggttctcatctttgggaagcaaggctcagagaaaacaaatgtggacattgaaaaggtcatgattacagacgaagaggaaatcaggacaaccaatcccgtggctacggagcagtatggttctgtatctaccaacctccagagaggcaacagacaagcagctaccgcagatgtcaacacacaaggcgttcttccaggcacggtctggcaggacagagatgtgtaccttcaggggcccatctgggcaaagattccacacacggacggacattttcacccctctcccctcatgggtggattcggacttaaacaccctcctccacagattctcatcaagaacaccccggtacctgcgaatccttcgaccaccttcagtgcggcaaagtttgcttccttcatcacacagtactccacgggacaggtcggcgtggagatcgagtgggagctgcagaaggaaaacagcaaacgctggaatcccgaaattcagtacacttccaactacaacaagtctgttaatgtggactttactgtggacactaatggcgtgtattcagagcctcgccccattggcaccagatacctgactcgtaatctgtaa

SEQ ID NO: 3324 - DNA, 2208 bp, synthetic construct
  misc_feature 1..2208: note = source = /note="Description of Artificial Sequence: Synthetic polynucleotide"
  source 1..2208: mol_type = other DNA
atggctgccgatggttatcttccagattggctcgaggacactctctctgaaggaataagacagtggtggaagctcaaacctggcccaccaccaccaaagcccgcagagcggcataaggacgacagcaggggtcttgtgcttcctgggtacaagtacctcggacccttcaacggactcgacaagggagagccggtcaacgaggcagacgccgcggccctcgagcacgacaaagcctacgaccggcagctcgacagcggagacaacccgtacctcaagtacaaccacgccgacgcggagtttcaggagcgccttaaagaagatacgtcttttgggggcaacctcggacgagcagtcttccaggcgaaaaagagggttcttgaacctctgggcctggttgaggaacctgttaagacggctccgggaaaaaagaggccggtagagcactctcctgtggagccagactcctcctcgggaaccggaaaggcgggccagcagcctgcaagaaaaagattgaattttggtcagactggagacgcagactcagtacctgacccccagcctctcggacagccaccagcagccccctctggtctgggaactaatacgatggctacaggcagtggcgcaccaatggcagacaataacgagggcgccgacggagtgggtaattcctcgggaaattggcattgcgattccacatggatgggcgacagagtcatcaccaccagcacccgaacctgggccctgcccacctacaacaaccacctctacaaacaaatttccagccaatcaggagcctcgaacgacaatcactactttggctacagcaccccttgggggtattttgacttcaacagattccactgccacttttcaccacgtgactggcaaagactcatcaacaacaactggggattccgacccaagagactcaacttcaagctctttaacattcaagtcaaagaggtcacgcagaatgacggtacgacgacgattgccaataaccttaccagcacggttcaggtgtttactgactcggagtaccagctcccgtacgtcctcggctcggcgcatcaaggatgcctcccgccgttcccagcagacgtcttcatggtgccacagtatggatacctcaccctgaacaacgggagtcaggcagtaggacgctcttcattttactgcctggagtactttccttctcagatgctgcgtaccggaaacaactttaccttcagctacacttttgaggacgttcctttccacagcagctacgctcacagccagagtctggaccgtctcatgaatcctctcatcgaccagtacctgtattacttgagcagaacaaacactccaagtggaaccaccacgcagtcaaggcttcagttttctcaggccggagcgagtgacattcgggaccagtctaggaactggcttcctggaccctgttaccgccagcagcgagtatcaaagacatctgcggataacaacaacagtgaatactcgtggactggagctaccaagtaccacctcaatggcagagactctctggtgaatccgggcccggccatggcaagccacaaggacgatgaagaaaagttttttcctcagagcggggttctcatctttgggaagcaaggctcagagaaaacaaatgtggacattgaaaaggtcatgattacagacgaagaggaaatcagggcaaccaatcccgtggctacggagcagtgtggttctgtatctaccaacctccagagaggcaacagacaagcagctaccgcagatgtcaacacacaaggcgttcttccaggcacggtctggcaggacagagatgtgtaccttcaggggcccatctgggcaaagattccacacacggacggacattttcacccctctcccctcatgggtggattcggacttaaacaccctcctccacagattctcatcaagaacaccccggtacctgcgaatccttcgaccaccttcagtgcggcaaagtttgcttccttcatcacacagtactccacgggacaggtcagcgtggagatcgagtgggagctgcagaaggaaaacagcaaacgctggaatcccgaaattcagtacacttccaactacaacaagtctgttaatgtggactttactgtggacactaatggcgtgtattcagagcctcgccccattggcaccagatacctgactcgtaatctgtaa

SEQ ID NO: 3325 - DNA, 2208 bp, synthetic construct
  misc_feature 1..2208: note = source = /note="Description of Artificial Sequence: Synthetic polynucleotide"
  source 1..2208: mol_type = other DNA
atggctgccgatggttatcttccagattggctcgaggacactctctctgaaggaataagacagtggtggaagctcaaacctggcccaccaccaccaaagcccgcagagcggcataaggacgacagcaggggtcttgtgcttcctgggtacaagtacctcggacccttcaacggactcgacaagggagagccggtcaacgaggcagacgccgcggccctcgagcacgacaaagcctacgaccggcagctcgacagcggagacaacccgtacctcaagtacaaccacgccgacgcggagtttcaggagcgccttaaagaagatacgtcttttgggggcaacctcggacgagcagtcttccaggcgaaaaagagggctcttgaacctctgggcctggttgaggaacctgttaagacggctccgggaaaaaagaggccggtagagcactctcctgtggagccagactcctcctcgggaaccggaaaggcgggccagcagcctgcaagaaaaagattgaattttggtcagactggagacgcagactcagtacctgacccccagcctctcggacagccaccagcagccccctctggtctgggaactaatacgatggctacaggcagtggcgcaccaatggcagacaataacgagggcgccgacggagtgggtaattcctcgggaaattggcattgcgattccacatggatgggcgacagagtcatcaccaccagcacccgaacctgggccctgcccacctacaacaaccacctctacaaacaaatttccagccaatcaggagcctcgaacgacaatcactactttggctacagcaccccttgggggtattttgacttcaacagattccactgccacttttcaccacgtgactggcaaagactcatcaacaacaactggggattccgacccaagagactcaacttcaagctctttaacattcaagtcaaagaggtcacgcagaatgacggtacgacgacgattgccaataaccttaccagcacggttcaggtgtttactgactcggagtaccagctcccgtacgtcctcggctcggcgcatcaaggatgcctcccgccgttcccagcagacgtcttcgtggtgccacagtatggatacctcaccctgaacaacgggagtcaggcagtaggacgctcttcattttactgcctggagtactttccttctcagatgctgcgtaccggaaacaactttaccttcagctacacttttgaggacgttcctttccacagcagctacgctcacagccagagtctggaccgtctcatgaatcctctcatcgaccagtacctgtattacttgagcagaacaaacactccaagtggaaccaccacgcagtcaaggcttcagttttctcaggccggagcgagtgacattcgggaccagtctaggaactggcttcctggaccctgttaccgccagcagcgagtatcaaagacatctgcggataacaacaacagtgaatactcgtggactggagctaccaagtaccacctcaatggcagagactctctggtgaatccgggcccggccatggcaagccacaaggacgatgaagaaaagttttttcctcagagcggggttctcatctttgggaagcaaggctcagagaaaacaaatgtggacattgaaaaggtcatgattacagacgaagaggaaatcaggacaaccaatcccgtggctacggagcagtatggttctgtatctaccaacctccagagaggcaacagacaagcagctaccgcagatgtcaacacacaaggcgttcttccaggcatggtctggcaggacagagatgtgtaccttcaggggcccatctgggcaaagattccacacacggacggacattttcacccctctcccctcatgggtggattcggacttaaacaccctcctccacagattctcatcaagaacaccccggtacctgcgaatccttcgaccaccttcagtgcggcaaagtttgcttccttcatcacacagtactccacgggacaggtcagcgtggagatcgagtgggagctgcagaaggaaaacagcaaacgctggaatcccgaaattcagtacacttccaactacaacaagtctgttaatgtggactttactgtggacactaatggcgtgtattcagagcctcgccccattggcaccagatacctgactcgtaatctgtaa

SEQ ID NO: 3326 - DNA, 2208 bp, synthetic construct
  misc_feature 1..2208: note = source = /note="Description of Artificial Sequence: Synthetic polynucleotide"
  source 1..2208: mol_type = other DNA
atggctgccgatggttatcttccagattggctcgaggacactctctctgaaggaataagacagtggtggaagctcaaacctggcccaccaccaccaaagcccgcagagcggcataaggacgacagcaggggtcttgtgcttcctgggtacaagtacctcggacccttcaacggactcgacaagggagagccggtcaacgaggcagacgccgcggccctcgagcacgacaaagcctacgaccggcagctcgacagcggagacaacccgtacctcaagtacaaccacgccgacgcggagtttcaggagcgccttaaagaagatacgtcttttgggggcaacctcggacgagcagtcttccaggcgaaaaagagggttcttgaacctctgggcctggttgaggaacctgttaagacggctccgggaaaaaagaggccggtagagcactctcctgtggagccagactcctcctcgggaaccggaaaggcgggccagcagcctgcaagaaaaagattgaattttggtcagactggagacgcagactcagtacctgacccccagcctctcggacagccaccagcagccccctctggtctgggaactaatacgatggctacaggcagtggcgcaccaatggcagacaataacgagggcgccgacggagtgggtaattcctcgggaaattggcattgcgattccacatggatgggcgacagagtcatcaccaccagcacccgaacctgggccctgcccacctacaacaaccacctctacaaacaaatttccagccaatcaggagcctcgaacgacaatcactactttggctacagcaccccttgggggtattttgacttcaacagattccactgccacttttcaccacgtgactggcaaagactcatcaacaacaactggggattccgacccaagagactcaacttcaagctctttaacattcaagtcaaagaggtcacgcagaatgacggtacgacgacgattgccaataaccttaccagcacggttcaggtgtttactgactcggagtaccagctcccgtacgtcctcggctcggcgcatcaaggatgcctcccgccgttcccagcagacgtcttcatggtgccacagtatggatacctcaccctgaacaacgggagtcaggcagtaggacgctcttcattttactgcctggagtactttccttctcagatgctgcgtaccggaaacaactttaccttcagctacacttttgaggacgttcctttccacagcagctacgctcacagccagagtctggaccgtctcatgaatcctctcatcgaccagtacctgtattacttgagcagaacaaacactccaagtggaaccaccacgcagtcaaggcttcagttttctcaggccggagcgagtgacattcgggaccagtctaggaactggcttcctggaccctgttaccgccagcagcgagtatcaaagacatctgcggataacaacaacagtgaatactcgtggactggagctaccaagtaccacctcaatggcagagactctctggtgaatccgggcccggccatggcaagccacaaggacgatgaagaaaagttttttcctcagagcggggttctcatctttgggaagcaaggctcagagaaaacaaatgtggacattgaaaaggtcatgattacagacgaagaggaaatcaggacaaccaatcccgtggctacggagcagtatggttctgtatctaccaacctccagagaggcaacagacaagcagctaccgcagatgtcaacacacaaggcgttcttccaggcacggtctggcaggacagagatgtgtaccttcaggggcccatctgggcaaagattccacacacggacggacattttcacccctctcccctcgtgggtggattcggacttaaacaccctcctccacagattctcatcaagaacaccccggtacctgcgaatccttcgaccaccttcagtgcggcaaagtttgcttccttcatcacacagtactccacgggacaggtcagcgtggagatcgagtgggagctgcagaaggaaaacagcaaacgctggaatcccgaaattcagtacacttccaactacaacaagtctgttaatgtggactttactgtggacactaatggcgtgtattcagagcctcgccccattggcaccagatacctgactcgtaatctgtaa

SEQ ID NO: 3327 - DNA, 2208 bp, synthetic construct
  misc_feature 1..2208: note = source = /note="Description of Artificial Sequence: Synthetic polynucleotide"
  source 1..2208: mol_type = other DNA
atggctgccgatggttatcttccagattggctcgaggacactctctctgaaggaataagacagtggtggaagctcaaacctggcccaccaccaccaaagcccgcagagcggcataaggacgacagcaggggtcttgtgcttcctgggtacaagtacctcggacccttcaacggactcgacaagggagagccggtcaacgaggcagacgccgcggccctcgagcacgacaaagcctacgaccggcagctcgacagcggagacaacccgtacctcaagtacaaccacgccgacgcggagtttcaggagcgccttaaagaagatacgtcttttgggggcaacctcggacgagcagtcttccaggcgaaaaagagggttcttgaacctctgggcctggttgaggaacctgttaagacggctccgggaaaaaagaggccggtagagcactctcctgtggagccagactcctcctcgggaaccggaaaggcgggccagcagcctgcaagaaaaagattgaattttggtcagactggagacgcagactcagtacctgacccccagcctctcggacagccaccagcagccccctctggtctgggaactaatacgatggctacaggcagtggcgcaccaatggcagacaataacgagggcgccgacggagtgggtaattcctcgggaaattggcattgcgattccacatggatgggcgacagagtcatcaccaccagcacccgaacctgggccctgcccacctacaacaaccacctctacaaacaaatttccagccaatcaggagcctcgaacgacaatcactactttggctacagcaccccttgggggtattttgacttcaacagattccactgccacttttcaccacgtgactggcaaagactcatcaacaacaactggggattccgacccaagagactcaacttcaagctctttaacattcaagtcaaagaggtcacgcagaatgacggtacgacgacgattgccaataaccttaccagcacggttcaggtgtttactgactcggagtaccagctcccgtacgtcctcggctcggcgcatcaaggatgcctcccgccgttcccagcagacgtcttcatggtgccacagtatggatacctcaccctgaacaacgggagtcaggcagtaggacgctcttcattttactgcctggagtactttccttctcagatgctgcgtaccggaaacaactttaccttcagctacacttttgaggacgttcctttccacagcagctacgctcacagccagagtctggaccgtctcatgaatcctctcatcgaccagtacctgtattacttgagcagaacaaacactccaagtggaaccaccacgcagtcaaggcttcagttttctcaggccggagcgagtgacattcgggaccagtctaggaactggcttcctggaccctgttaccgccagcagcgagtatcaaagacatctgcggataacaacaacagtgaatactcgtggactggagctaccaagtaccacctcaatggcagagactctctggtgaatccgggcccggccatggcaagccacaaggacgatgaagaaaagttttttcctcagagcggggttctcatctttgggaagcaaggctcagagaaaacaaatgtggacattgaaaaggtcatgattacagacgaagaggaaatcaggacaaccaatcccgtggctacggagcagtatggttctgtatctaccaacctccagagaggcaacagacaagcagctaccgcagatgtcaacacacaaggcgttcttccaggcacggtctggcaggacagagatgtgtaccttcaggggcccatctgggcaaagattccacacacggacggacattttcacccctctcccctcatgggtggattcggacttaaacaccctcctccacagattctcatcaagaacaccccggtacctgcgaatccttcgaccaccctcagtgcggcaaagtttgcttccttcatcacacagtactccacgggacaggtcagcgtggagatcgagtgggagctgcagaaggaaaacagcaaacgctggaatcccgaaattcagtacacttccaactacaacaagtctgttaatgtggactttactgtggacactaatggcgtgtattcagagcctcgccccattggcaccagatacctgactcgtaatctgtaa

SEQ ID NO: 3328 - DNA, 2208 bp, synthetic construct
  misc_feature 1..2208: note = source = /note="Description of Artificial Sequence: Synthetic polynucleotide"
  source 1..2208: mol_type = other DNA
atggctgccgatggttatcttccagattggctcgaggacactctctctgaaggaataagacagtggtggaagctcaaacctggcccaccaccaccaaagcccgcagagcggcataaggacgacagcaggggtcttgtgcttcctgggtacaagtacctcggacccttcaacggactcgacaagggagagccggtcaacgaggcagacgccgcggccctcgagcacgacaaagcctacgaccggcagctcgacagcggagacaacccgtacctcaagtacaaccacgccgacgcggagtttcaggagcgccttaaagaagatacgtcttttgggggcaacctcggacgagcagtcttccaggcgaaaaagagggttcttgaacctctgggcctggttgaggaacctgttaagacggctccgggaaaaaagaggccggtagagcactctcctgtggagccagactcctcctcgggaaccggaaaggcgggccagcagcctgcaagaaaaagattgaattttggtcagactggagacgcagactcagtacctgacccccagcctctcggacagccaccagcagccccctctggtctgggaactaatacgatggctacaggcagtggcgcaccaatggcagacaataacgagggcgccgacggagtgggtaattcctcgggaaattggcattgcgattccacatggatgggcgacagagtcatcaccaccagcacccgaacctgggccctgcccacctacaacaaccacctctacaaacaaatttccagccaatcaggagcctcgaacgacaatcactactttggctacagcaccccttgggggtattttgacttcaacagattccactgccacttttcaccacgtgactggcaaagactcatcaacaacaactggggattccgacccaagagactcaacttcaagctctttaacattcaagtcaaagaggtcacgcagaatgacggtacgacgacgattgccaataaccttaccagcacggttcaggtgtttactgactcggagtaccagctcccgtacgtcctcggctcggcgcatcaaggatgcctcccgccgttcccagcagacgtcttcatggtgccacagtatggatacctcaccctgaacaacgggagtcaggcagtagggcgctcttcattttactgcctggagtactttccttctcagatgctgcgtaccggaaacaactttaccttcagctacacttttgaggacgttcctttccacagcagctacgctcacagccagagtctggaccgtctcatgaatcctctcatcgaccagtacctgtattacttgagcagaacaaacactccaagtggaaccaccacgcagtcaaggcttcagttttctcaggccggagcgagtgacattcgggaccagtctaggaactggcttcctggaccctgttaccgccagcagcgagtatcaaagacatctgcggataacaacaacagtgaatactcgtggactggagctaccaagtaccacctcaatggcagagactctctggtgaatccgggcccggccatggcaagccacaaggacgatgaagaaaagttttttcctcagagcggggttctcatctttgggaagcaaggctcagagaaaacaaatgtggacattgaaaaggtcatgattacagacgaaggggaaatcaggacaaccaatcccgtggctacggagcagtatggttctgtatctaccaacctccagagaggcaacagacaagcagctaccgcagatgtcaacacacaaggcgttcttccaggcacggtctggcaggacagagatgtgtaccttcaggggcccatctgggcaaagattccacacacggacggacattttcacccctctcccctcatgggtggattcggacttaaacaccctcctccacagattctcatcaagaacaccccggtacctgcgaatccttcgaccaccttcagtgcggcaaagtttgcttccttcatcacacagtactccacgggacaggtcagcgtggagatcgagtgggagctgcagaaggaaaacagcaaacgctggaatcccgaaattcagtacacttccaactacaacaagtctgttaatgtggactttactgtggacactaatggcgtgtattcagagcctcgccccattggcaccagatacctgactcgtaatctgtaa

SEQ ID NO: 3329 - DNA, 2208 bp, synthetic construct
  misc_feature 1..2208: note = source = /note="Description of Artificial Sequence: Synthetic polynucleotide"
  source 1..2208: mol_type = other DNA
atggctgccgatggttatcttccagattggctcgaggacactctctctgaaggaataagacagtggtggaagctcaaacctggcccaccaccaccaaagcccgcagagcggcataaggacgacagcaggggtcttgtgcttcctgggtacaagtacctcggacccttcaacggactcgacaagggagagccggtcaacgaggcagacgccgcggccctcgagcacgacaaagcctacgaccggcagctcgacagcggagacaacccgtacctcaagtacaaccacgccgacgcggagtttcaggagcgccttaaagaagatacgtcttttgggggcaacctcggacgagcagtcttccaggcgaaaaagagggctcttgaacctctgggcctggttgaggaacctgttaagacggctccgggaaaaaagaggccggtagagcactctcctgtggagccagactcctcctcgggaaccggaaaggcgggccagcagcctgcaagaaaaagattgaattttggtcagactggagacgcagactcagtacctgacccccagcctctcggacagccaccagcagccccctctggtctgggaactaatacgatggctacaggcagtggcgcaccaatggcagacaataacgagggcgccgacggagtgggtaattcctcgggaaattggcattgcgattccacatggatgggcgacagagtcatcaccaccagcacccgaacctgggccctgcccacctacaacaaccacctctacaaacaaatttccagccaatcaggagcctcgaacgacaatcactactttggctacagcaccccttgggggtattttgacttcaacagattccactgccacttttcaccacgtgactggcaaagactcatcaacaacaactggggattccgacccaagagactcaacttcaagctctttaacattcaagtcaaagaggtcacgcagaatgacggtacgacgacgattgccaataaccttaccagcacggttcaggtgtttactgactcggagtaccagctcccgtacgtcctcggctcggcgcatcaaggatgcctcccgccgttcccagcagacgtcttcatggtgccacagtatggatacctcaccctgaacaacgggagtcaggcagtaggacgctcttcattttactgcctggagtactttccttctcagatgctgcgtaccggaaacaactttaccttcagctacacttttgaggacgttcctttccacagcagctacgctcacagccagagtctggaccgtctcatgaatcctctcatcgaccagtacctgtattacttgagcagaacaaacactccaagtggaaccaccacgcagtcaaggcttcagttttctcaggccggagcgagtgacattcgggaccagtctaggaactggcttcctggaccctgttaccgccagcagcgagtatcaaagacatctgcggataacaacaacagtgaatactcgtggactggagctaccaagtaccacctcaatggcagagactctctggtgaatccgggcccggccatggcaagccacaaggacgatgaagaaaagttttttcctcagagcggggttctcatctttgggaagcaaggctcagagaaaacaaatgtggacattgaaaaggtcatgattacagacgaagaggaaatcaggacaaccaatcccgtggctacggagcagtatggttctgtatctaccaacctccagagaggcaacagacaagcagctaccgcagatgtcaacacacaaggcgttcttccaggcatggtctggcaggacagagatgtgtaccttcaggggcccatctgggcaaagattccacacacggacggacattttcacccctctcccctcatgggtggattcggacttaaacaccctcctccacagattctcatcaaaaacaccccggtacctgcgaatccttcgaccaccttcagtgcggcaaagtttgcttccttcatcacacagtactccgcgggacaggtcagcgtggagatcgagtgggagctgcagaaggaaaacagcaaacgctggaatcccgaaattcagtacacttccaactacaacaagtctgttaatgtggactttactgtggacactaatggcgtgtattcagagcctcgccccattggcaccagatacctgactcgtaatctgtaa

SEQ ID NO: 3330 - DNA, 2208 bp, synthetic construct
  misc_feature 1..2208: note = source = /note="Description of Artificial Sequence: Synthetic polynucleotide"
  source 1..2208: mol_type = other DNA
atggctgccgatggttatcttccagattggctcgaggacactctctctgaaggaataagacagtggtggaagctcaaacctggcccaccaccaccaaagcccgcagagcggcataaggacgacagcaggggtcttgtgcttcctgggtacaagtacctcggacccttcaacggactcgacaagggagagccggtcaacgaggcagacgccgcggccctcgagcacgacaaagcctacgaccggcagctcgacagcggagacaacccgtacctcaagtacaaccacgccgacgcggagtttcaggagcgccttaaagaagatacgtcttttgggggcaacctcggacgagcagtcttccaggcgaaaaagagggttcttgaacctctgggcctggttgaggaacctgttaagacggctccgggaaaaaagaggccggtagagcactctcctgtggagccagactcctcctcgggaaccggaaaggcgggccagcagcctgcaagaaaaagattgaattttggtcagactggagacgcagactcagtacctgacccccagcctctcggacagccaccagcagccccctctggtctgggaactaatacgatggctacaggcagtggcgcaccaatggcagacaataacgagggcgccgacggagtgggtaattcctcgggaaattggcattgcgattccacatggatgggcgacagagtcatcaccaccagcacccgaacctgggccctgcccacctacaacaaccacctctacaaacaaatttccagccaatcaggagcctcgaacgacaatcactactttggctacagcaccccttgggggtattttgacttcaacagattccactgccacttttcaccacgtgactggcaaagactcatcaacaacaactggggattccgacccaagagactcaacttcaagctctttaacattcaagtcaaagaggtcacgcagaatgacggtacgacgacgattgccaataaccttaccagcacggttcaggtgtttactgactcggagtaccagctcccgtacgtcctcggctcggcgcatcaaggatgcctcccgccgttcccagcagacgtcttcatggtgccacagtatggatacctcaccctgaacaacgggagtcaggcagtaggacgctcttcattttactgcctggagtactttccttctcagatgctgcgtaccggaaacaactttaccttcagctacacttttgaggacgttcctttccacagcagctacgctcacagccagagtctggaccgtctcatgaatcctctcatcgaccagtacctgtattacttgagcagaacaaacactccaagtggaaccaccacgcagtcaaggcttcagttttctcaggccggagcgagtgacattcgggaccagtctaggaactggcttcctggaccctgttaccgccagcagcgagtatcaaagacatctgcggataacaacaacagtgaatactcgtggactggagctaccgagtaccacctcaatggcagagactctctggtgaatccgggcccggccatggcaagccacaaggacgatgaagaaaagttttttcctcagagcggggttctcatctttgggaagcaaggctcagagaaaacaaatgtggacattgaaaaggtcatgattacagacgaagaggaaatcaggacaaccaatcccgtggctacggagcagtatggttctgtatctaccaacctccagagaggcaacagacaagcagctaccgcagatgtcaacacacaaggcgttcttccaggcacggtctggcaggacagagatgtgtaccttcaggggcccatctgggcaaagattccacacacggacggacattttcacccctctcccctcatgggtggattcggacttaaacaccctcccccacagattctcatcaagaacaccccggtacctgcgaatccttcgaccaccttcagtgcggcaaagtttgcttccttcatcacacagtactccacgggacaggtcagcgtggagatcgagtgggagctgcagaaggaaaacagcaaacgctggaatcccgaaattcagtacacttccaactacaacaagtctgttaatgtggactttactgtggacactaatggcgtgtattcagagcctcgccccattggcaccagatacctgactcgtaatctgtaa

SEQ ID NO: 3331 - DNA, 2208 bp, synthetic construct
  misc_feature 1..2208: note = source = /note="Description of Artificial Sequence: Synthetic polynucleotide"
  source 1..2208: mol_type = other DNA
atggctgccgatggttatcttccagattggctcgaggacactctctctgaaggaataagacagtggtggaagctcaaacctggcccaccaccaccaaagcccgcagagcggcataaggacgacagcaggggtcttgtgcttcctgggtacaagtacctcggacccttcaacggactcgacaagggagagccggtcaacgaggcagacgccgcggccctcgagcacggcaaagcctacgaccggcagctcgacagcggagacaacccgtacctcaagtacaaccacgccgacgcggagtttcaggagcgccttaaagaagatacgtcttttgggggcaacctcggacgagcagtcttccaggcgaaaaagagggttcttgaacctctgggcctggttgaggaacctgttaagacggctccgggaaaaaagaggccggtagagcactctcctgtggagccagactcctcctcgggaaccggaaaggcgggccagcagcctgcaagaaaaagattgaattttggtcagactggagacgcagactcagtacctgacccccagcctctcggacagccaccagcagccccctctggtctgggaactaatacgatggctacaggcagtggcgcaccaatggcagacaataacgagggcgccgacggagtgggtaattcctcgggaaattggcattgcgattccacatggatgggcgacagagtcatcaccaccagcacccgaacctgggccctgcccacctacaacaaccacctctacaaacaaatttccagccaatcaggagcctcgaacgacaatcactactttggctacagcaccccttgggggtattttgacttcaacagattccactgccacttttcaccacgtgactggcaaagactcatcaacaacaactggggattccgacccaagagactcaacttcaagctctttaacattcaagtcaaagaggtcacgcagaatgacggtacgacgacgattgccaataaccttaccagcacggttcaggtgtttactgactcggagtaccagctcccgtacgtcctcggctcggcgcatcaaggatgcctcccgccgttcccagcagacgtcttcatggtgccacagtatggatacctcaccctgaacaacgggagtcaggcagtaggacgctcttcattttactgcctggagtactttccttctcagatgctgcgtaccggaaacaactttaccttcagctacacttttgaggacgttcctttccacagcagctacgctcacagccagagtctggaccgtctcatgaatcctctcatcgaccagtacctgtattacttgagcagaacaaacactccaagtggaaccaccacgcagtcaaggcttcagttttctcaggccggagcgagtgacattcgggaccagtctaggaactggcttcctggaccctgttaccgccagcagcgagtatcaaagacatctgcggataacaacaacagtgaatactcgtggactggagctaccaagtaccacctcaatggcagagactctctggtgaatccgggcccggccatggcaagccacaaggacgatgaagaaaagttttttcctcagagcggggttctcatctttgggaagcaaggctcagagaaaacaaatgtggacattgaaaaggtcatgattacagacgaagaggaaatcaggacaaccaatcccgtggctacggagcagtatggttctgtatctaccaacctccagagaggcaacagacaagcagctaccgcagatgtcaacacacaaggcgttcttccaggcacggtctggcaggacagagatgtgtaccttcaggggcccatctgggcaaagattccacacacggacggacattttcacccctctcccctcatgggtggattcggacttaaacaccctcctccacagattctcatcaagaacaccccggtacctgcgaatccttcgaccaccttcagtgcggcaaagtttgcttccttcatcacacagtactccacgggacaggtcagcgtggagatcgagtgggagctgcagaaggaaaacagcaaacgctggaatcccgaaattcagtacacttccaactacaacaagtctgttaatgtggactttactgtggacactaatggcgtgtattcagagcctcgccccattggcaccagatacctgactcgtaatctgtaa

SEQ ID NO: 3332 - DNA, 2208 bp, synthetic construct
  misc_feature 1..2208: note = source = /note="Description of Artificial Sequence: Synthetic polynucleotide"
  source 1..2208: mol_type = other DNA
atggctgccgatggttatcttccagattggctcgaggacactctctctgaaggaataagacagtggtggaagctcaaacctggcccaccaccaccaaagcccgcagagcggcataaggacgacagcaggggtcttgtgcttcctgggtacaagtacctcggacccttcaacggactcgacaagggagagccggtcaacgaggcagacgccgcggccctcgagcacgacaaagcctacgaccggcagctcgacagcggagacaacccgtacctcaagtacaaccacgccgacgcggagtttcaggagcgccttaaagaagatacgtcttttgggggcaacctcggacgagcagtcttccaggcgaaaaagagggctcttgaacctctgggcctggttgaggaacctgttaagacggctccgggaaaaaagaggccggtagagcactctcctgtggagccagactcctcctcgggaaccggaaaggcgggccagcagcctgcaagaaaaagattgaattttggtcagactggagacgcagactcagtacctgacccccagcctctcggacagccaccagcagccccctctggtctgggaactaatacgatggctacaggcagtggcgcaccaatggcagacaataacgagggcgccgacggagtgggtaattcctcgggaaattggcattgcgattccacatggatgggcgacagagtcatcaccaccagcacccgaacctgggccctgcccacctacaacaaccacctctacaaacaaatttccagccaatcaggagcctcgaacgacaatcactactttggctacagcaccccttgggggtattttgacttcaacagattccactgccacttttcaccacgtgactggcaaagactcatcaacaacaactggggattccgacccaagagactcaacttcaagctctttaacattcaagtcaaagaggtcacgcagaatgacggtacgacgacgattgccaataaccttaccagcacggttcaggtgtttactgactcggagtaccagctcccgtacgtcctcggctcggcgcatcaaggatgcctcccgccgttcccagcagacgtcttcatggtgccacagtatggatacctcaccctgaacaacgggagtcaggcagtaggacgctcttcattttactgcctggagtactttccttctcagatgctgcgtaccggaaacaactttaccttcagctacacttttgaggacgttcctttccacagcagctacgctcacagccagagtctggaccgtctcatgaatcctctcgtcgaccagtacctgtattacttgagcagaacaaacactccaagtggaaccaccacgcagtcaaggcttcagttttctcaggccggagcgagtgacattcgggaccagtctaggaactggcttcctggaccctgttaccgccagcagcgagtatcaaagacatctgcggataacaacaacagtgaatactcgtggaccggagctaccaagtaccacctcaatggcagagactctctggtgaatccgggcccggccatggcaagccacaaggacgatgaagaaaagttttttcctcagagcggggttctcatctttgggaagcaaggctcagagaaaacaaatgtggacattgaaaaggtcatgattacagacgaagaggaaatcaggacaaccaatcccgtggctacggagcagtatggttctgtatctaccaacctccagagaggcaacagacaagcagctaccgcagatgtcaacacacaaggcgttcttccaggcatggtctggcaggacagagatgtgtaccttcaggggcccatctgggcaaagattccacacacggacggacattttcacccctctcccctcatgggtggattcggacttaaacgccctcctccacagattctcatcaagaacaccccggtacctgcgaatccttcgaccaccttcagtgcggcaaagtttgcttccttcatcacacagtactccacgggacaggtcagcgtggagatcgagtgggagctgcagaaggaaaacagcaaacgctggaatcccgaaattcagtacacttccaactacaacaagtctgttaatgtggactttactgtggacactaatggcgtgtattcagagcctcgccccattggcaccagatacctgactcgtaatctgtaa

SEQ ID NO: 3333 - DNA, 2208 bp, synthetic construct
  misc_feature 1..2208: note = source = /note="Description of Artificial Sequence: Synthetic polynucleotide"
  source 1..2208: mol_type = other DNA
atggctgccgatggttatcttccagattggctcgaggacactctctctgaaggaataagacagtggtggaagctcaaacctggcccaccaccaccaaagcccgcagagcggcataaggacgacagcaggggtcttgtgcttcctgggtacaagtacctcggacccttcaacggactcgacaagggagagccggtcaacgaggcagacgccgcggccctcgagcacgacaaagcctacgaccggcagctcgacagcggagacaacccgtacctcaagtacaaccacgccgacgcggagtttcaggagcgccttaaagaagatacgtcttttgggggcaacctcggacgagcagtcttccaggcgaaaaagagggttcttgaacctctgggcctggttgaggaacctgttaagacggctccgggaaaaaagaggccggtagagcactctcctgtggagccagactcctcctcgggaaccggaaaggcgggccagcagcctgcaagaaaaagattgaattttggtcagactggagacgcagactcagtacctgacccccagcctctcggacagccaccagcagccccctctggtctgggaactaatacgatggctacaggcagtggcgcaccaatggcagacaataacgagggcgccgacggagtgggtaattcctcgggaaattggcattgcgattccacatggatgggcgacagagtcatcaccaccagcacccgaacctgggccctgcccacctacaacaaccacctctacaaacaaatttccagccaatcaggagcctcgaacgacaatcactactttggctacagcaccccttgggggtattttgacttcaacagattccactgccacttttcaccacgtgactggcaaagactcatcaacaacaactggggattccgacccaagagactcaacttcaagctctttaacattcaagtcaaagaggtcacgcagaatgacggtacgacgacgattgccaataaccttaccagcacggttcaggtgtttactgactcggagtaccagctcccgtacgtcctcggctcggcgcatcaaggatgcctcccgccgttcccagcagacgtcttcatggtgccacagtatggatacctcaccctgaacaacgggagtcaggcagtaggacgctcttcattttactgcctggagtactttccttctcagatgctgcgtaccggaaacaactttaccttcagctacacttttgaggacgttcctttccacagcagctacgctcacagccagagtctggaccgtctcatgaatcctctcatcgaccagtacctgtattacttgagcagaacaaacactccaagtggaaccaccacgcagtcaaggcttcagttttctcaggccggagcgagtgacattcgggaccagtctaggaactggcttcctggaccctgttaccgccagcagcgagtatcaaagacatctgcggataacaacaacagtgaatactcgtggactggagctaccaagtaccacctcaatggcagagactctctggtgaatccgggcccggccatggcaagccacaaggacgatgaagaaaagttttttcctcagagcggggttctcatctttgggaagcaaggctcagagaaaacaaatgtggacattgaaaaggtcatgattacagacgaagaggaaatcaggacaaccaatcccgtggctacggagcagtatggttctgtatctaccaacctccagagaggcaacagacaagcagctaccgcagatgtcaacacacaaggcgttcttccaggcacggtctggcaggacagagatgtgtaccttcaggggcccatctgggcaaagattccacacacggacggacattttcacccctctcccctcatgggtggattcggacttaaacaccctcctccacagattctcatcaagaacaccccggtacctgcgaatccttcgaccaccttcagtgcggcaaagtttgcttccttcatcacacagcactccacgggacaggtcagcgtggagatcgagtgggagctgcagaaggaaaacagcaaacgctggaatcccgaaattcagtacacttccaactacaacaagtctgttaatgtggactttactgtggacactaatggcgtgtattcagagcctcgccccattggcaccagatacctgactcgtaatctgtaa

SEQ ID NO: 3334 - DNA, 2208 bp, synthetic construct
  misc_feature 1..2208: note = source = /note="Description of Artificial Sequence: Synthetic polynucleotide"
  source 1..2208: mol_type = other DNA
atggctgccgatggttatcttccagattggctcgaggacactctctctgaaggaataagacagtggtggaagctcaaacctggcccaccaccgccaaagcccgcagagcggcataaggacgacagcaggggtcttgtgcttcctgggtacaagtacctcggacccttcaacggactcgacaagggagagccggtcaacgaggcagacgccgcggccctcgagcacgacaaggcctacgaccggcagctcgacagcggagacgacccgtacctcaagtacaaccacgccgacgcggagtttcaggagcgccttaaagaagatacgtcttttgggggcaacctcgcaagagcagtattccaggcgaaaaagagggttcttgaacctctgggcctggttgaggagcctgttaagacggctccgggaaaaaagaggccggtagagcattctcctgcggagccagactcctcctcgggaaccggaaaagcgggccagcagcctgcgagaaagagattgaatttcggtcagactggagacgcagactccgtacctgacccccagcctctcggacagccaccagcagccccctctggtctgggaactaatacgatggctacaggcagtggcgcaccaatggcagacaataacgagggtgccgacggagtgggtaattcctcaggaaattggcattgcgattccacatggatgggcgacagagtcatcaccaccagcacccgcacctgggctctgcccacctacaacaaccatctgtacaagcagatctccagccaatctggagccagcaacgacaaccactactttggctacagcaccccttgggggtattttgacttcaacagattccactgccacttctccccacgtgactggcaaagactcatcaacaacaactggggattccggcccaagagactcagcttcaagctctttaacattcaagtcaaggaggtcacgcagaatgacggtacgacgacgattgccaataaccttaccagcacggttcaggtctttactgactcggagtaccagctcccgtacgtcctcggctcggcgcatcaaggatgcctcccgccgttcccagcagacgtcttcatggtgccacagtatggatacctcaccctgaacaacgggagtcaggcggtaggacgctcttcattttactgcctggagtacttcccttctcagatgcttcgcacgggaaacaactttaccttcagctacacctttgaggacgtgccttttcacagcagctacgctcacagccaaagtctggaccgtctcatgaatcctctcatcgaccagtacctgtattacttgagcaaaacaaacgctccaagcggaaccaccacgatgtccaggcttcagttttctcaggccggagcaagtgacattcgggaccagtctagaaactggcttcctggaccctgttaccgccagcagcgagtatcaaagacagctgcggacaacaacaacagtgattactcgtggactggagctaccaagtaccacctcaatggaagagactctctggtgaacccgggcccagctatggccagccacaaggacgatgaagaaaaatattttcctcagagcggggttctcatcttcgggaaacaaggctcaaataaaactaatgtggacattgaaaaggttatgattacagacgaagaggaaatcaggaccaccaatcccgtggctacggagcagtatggttctgtatctaccaaccttcaaagcggcaacacacaagcagctacctcagatgtcaacacacaaggcgttcttcctggcatggtctggcaggacagagatgtgtacctgcaggggcccatctgggcaaagattccacacacggatggacactttcacccttctcctcttatgggaggatttggactgaagcaccctcccccgcagattctcatcaagaataccccggtacctgcgaatccttcgaccaccttcagtgcggcaaagtttgcttctttcatcacacagtactccacggggcaggtcagcgtggagatcgagtgggagctgcagaaggagaacagcaaacgctggaaccccgagatccagtatacttccaactacaacaaatctgttaatgtggactttactgtggacactaatggtgtgtattcagagcctcgccccattggcaccagatacctgactcgtaatctgtaa

SEQ ID NO: 3335 - DNA, 2208 bp, synthetic construct
  misc_feature 1..2208: note = source = /note="Description of Artificial Sequence: Synthetic polynucleotide"
  source 1..2208: mol_type = other DNA
atggctgccgatggttatcttccagattggctcgaggacactctctctgaaggaataagacagtggtggaagctcaaacctggcccaccaccaccaaagcccgcagagcggcataaggacgacagcaggggtcttgtgcttcctgggtacaagtacctcggacccttcaacggactcgacaagggagagccggtcaacgaggcagacgccgcggccctcgagcacgacaaagcctacgaccggcagctcgacagcggagacaacccgtacctcaagtacaaccacgccgacgcggagtttcaggagcgccttaaagaagatacgtcttttgggggcaacctcggacgagcagtcttccaggcgaaaaagagggttcttgaacctctgggcctggttgaggaacctgttaagacggctccgggaaaaaagaggccggtagagcactctcctgtggagccagactcctcctcgggaaccggaaaggcgggccagcagcctgcaagaaaaagattgaattttggtcagactggagacgcagactcagtacctgacccccagcctctcggacagccaccagcagccccctctggtctgggaactaatacgatggctacaggcagtggcgcaccaatggcagacaataacgagggcgccgacggagtgggtaattcctcgggaaattggcattgcgattccacatggatgggcgacagagtcatcaccaccagcacccgaacctgggccctgcccacctacaacaaccacctctacaaacaaatttccagccaatcaggagcctcgaacgacaatcactactttggctacagcaccccttgggggtattttgacttcaacagattccactgccacttttcaccacgtgactggcaaagactcatcaacaacaactggggattccgacccaagagactcaacttcaagctctttaacattcaagtcaaagaggtcacgcagaatgacggtacgacgacgattgccaataaccttaccagcacggttcaggtgtttactgactcggagtaccagctcccgtacgtcctcggctcggcgcatcaaggatgcctcccgccgttcccagcagacgtcttcatggtgccacagtatggatacctcaccctgaacaacgggagtcaggcagtaggacgctcttcattttactgcctggagtactttccttctcagatgctgcgtaccggaaacaactttaccttcagctacacttttgaggacgttcctttccacagcagctacgctcacagccagagtctggaccgtctcatgaatcctctcatcgaccagtacctgtattacttgagcagaacaaacactccaagtggaaccaccacgcagccaaggcttcagttttctcaggccggagcgagtgacattcgggaccagtctaggaactggcttcctggaccctgttaccgccagcagcgagtatcaaagacatctgcggataacaacaacagtgaatactcgtggactggagctaccaagtaccacctcaatggcagagactctctggtgaatccgggcccggccatggcaagccacaaggacgatgaagaaaagttttttcctcagagcggggttctcatctttgggaagcaaggctcagagaaaacaaatgtggacattgaaaaggtcatgattacagacgaagaggaaatcaggacaaccaatcccgtggctacggagcagtatggttctgtatctaccaacctccagagaggcaacagacaagcagctaccgcagatgtcaacacacaaggcgttcttccaggcacggtctggcaggacagagatgtgtaccttcaggggcccatctgggcaaagattccacacacggacggacattttcacccctctcccctcatgggtggattcggacttaaacaccctcctccacagattctcatcaagaacaccccggtacctgcgaatccttcgaccaccttcagtgcggcaaagtttgcttccttcatcacacagtactccacgggacaggtcagcgtggagatcgagtgggagctgcagaaggaaaacagcaaacgctggaatcccgaaattcagtacacttccaactacaacaagtctgttaatgtggactttactgtggacactaatggcgtgtattcagagcctcgccccattggcaccagatacctgactcgtaatctgtaa

SEQ ID NO: 3336 - DNA, 2208 bp, synthetic construct
  misc_feature 1..2208: note = source = /note="Description of Artificial Sequence: Synthetic polynucleotide"
  source 1..2208: mol_type = other DNA
atggctgccgatggttatcttccagattggctcgaggacactctctctgaaggaataagacagtggtggaagctcaaacctggcccaccaccaccaaagcccgcagagcggcataaggacgacagcaggggtcttgtgcttcctgggtacaagtacctcggacccttcaacggactcgacaagggagagccggtcaacgaggcagacgccgcggccctcgagcacgacaaagcctacgaccggcagctcgacagcggagacaacccgtacctcaagtacaaccacgccgacgcggagtttcaggagcgccttaaagaagatacgtcttttgggggcaacctcggacgagcagtcttccaggcgaaaaagagggttcttgaacctctgggcctggttgaggaacctgttaagacggctccgggaaaaaagaggccggtagagcactctcctgtggagccagactcctcctcgggaaccggaaaggcgggccagcagcctgcaagaaaaagattgaattttggtcagactggagacgcagactcagtacctgacccccagcctctcggacagccaccagcagccccctctggtctgggaactaatacgatggctacaggcagtggcgcaccaatggcagacaataacgagggcgccgacggagtgggtaattcctcgggaaattggcattgcgattccacatggatgggcgacagagtcatcaccaccagcacccgaacctgggccctgcccacctacaacaaccacctctacaaacaaatttccagccaatcaggagcctcgaacgacaatcactactttggctacagcaccccttgggggtattttgacttcaacagattccactgccacttttcaccacgtgactggcaaagactcatcaacaacaactggggattccgacccaagagactcaacttcaagctctttaacattcaagtcaaagaggtcacgcagaatgacggtacgacgacgattgccaataaccttaccagcacggttcaggtgtttactgactcggagtaccagctcccgtacgtcctcggctcggcgcatcaaggatgcctcccgccgttcccagcagacgtcttcatggtgccacagtatggatacctcaccctgaacaacgggagtcaggcagtaggacgctcttcattttactgcctggagtactttccttctcagatgctgcgtaccggaaacaactttaccttcagctacacttttgaggacgttcctttccacagcagctacgctcacagccagagtctggaccgtctcatgaatcctctcatcgaccagtacctgtattacttgagcagaacaaacactccaagtggaaccaccacgcagtcaaggcttcagttttctcaggccggagcgagtgacattcgggaccagtctaggaactggcttcctggaccctgttaccgccagcagcgagtatcaaagacatctgcggataacaacaacagtgaatacttgtggactggagctaccaagtaccacctcaatggcagagactctctggtgaatccgggcccggccatggcaagccacaaggacgatgaagaaaagttttttcctcagagcggggttctcatctttgggaagcaaggctcagagaaaacaaatgtggacattgaaaaggtcatgattacagacgaagaggaaatcaggacaaccaatcccgtggctacggagcagtatggttctgtatctaccaacctccagagaggcaacaggcaagcagctaccgcagatgtcaacacacaaggcgttcttccaggcacggtctggcaggacagagatgtgtaccttcaggggcccatctgggcaaagattccacacacggacggacattttcacccctctcccctcatgggtggattcggacttaaacaccctcctccacagattctcatcaagaacaccccggtacctgcgaatccttcgaccaccttcagtgcggcaaagtttgcttccttcatcacacagtactccacgggacaggtcagcgtggagatcgagtgggagctgcagaaggaaaacagcaaacgctggaatcccgaaattcagtacacttccaactacaacaagtctgttaatgtggactttactgtggacactaatggcgtgtattcagagcctcgccccattggcaccagatacctgactcgtaatctgtaa

SEQ ID NO: 3337 - DNA, 2208 bp, synthetic construct
  misc_feature 1..2208: note = source = /note="Description of Artificial Sequence: Synthetic polynucleotide"
  source 1..2208: mol_type = other DNA
atggctgccgatggttatcttccagattggctcgaggacactctctctgaaggaataagacagtggtggaagctcaaacctggcccaccaccaccaaagcccgcagagcggcataaggacgacagcaggggtcttgtgcttcctgggtacaagtacctcggacccttcaacggactcgacaagggagagccggtcaacgaggcagacgccgcggccctcgagcacgacaaagcctacgaccggcagctcgacagcggagacaacccgtacctcaagtacaaccacgccgacgcggagtttcaggagcgccttaaagaagatacgtcttttgggggcaacctcggacgagcagtcttccaggcgaaaaagagggttcttgaacctctgggcctggttgaggaacctgttaagacggctccgggaaaaaagaggccggtagagcactctcctgtggagccagactcctcctcgggaaccggaaaggcgggccagcagcctgcaagaaaaagattgaattttggtcagactggagacgcagactcagtacctgacccccagcctctcggacagccaccagcagccccctctggtctgggaactaatacgatggctacaggcagtggcgcaccaatggcagacaataacgagggcgccgacggagtgggtaattcctcgggaaattggcattgcgattccacatggatgggcgacagagtcatcaccaccagcacccgaacctgggccctgcccacctacaacaaccacctctacaaacaaatttccagccaatcaggagcctcgaacgacaatcactactttggctacagcaccccttgggggtattttgacttcaacagattccactgccacttttcaccacgtgactggcaaagactcatcaacaacaactggggattccgacccaagagactcaacttcaagccctttaacattcaagtcaaagaggtcacgcagaatgacggtacgacgacgattgccaataaccttaccagcacggttcaggtgtttactgactcggagtaccagctcccgtacgtcctcggctcggcgcatcaaggatgcctcccgccgttcccagcagacgtcttcatggtgccacagtatggatacctcaccctgaacaacgggagtcaggcagtaggacgctcttcattttactgcctggagtactttccttctcagatgctgcgtaccggaaacaactttaccttcagctacacttttgaggacgttcctttccacagcagctacgctcacagccagagtctggaccgtctcatgaatcctctcatcgaccagtacctgtattacttgagcagaacaaacactccaagtggaaccaccacgcagtcaaggcttcagttttctcaggccggagcgagtgacattcgggaccagtctaggaactggcttcctggaccctgttaccgccagcagcgagtatcaaagacatctgcggataacaacaacagtgaatactcgtggactggagctaccaagtaccacctcaatggcagagactctctggtgaatccgggcccggccatggcaagccacaaggacgatgaagaaaagttttttcctcagagcggggttctcatctttgggaagcaaggctcagagaaaacaaatgtggacattgaaaaggtcatgattacagacgaagaggaaatcaggacaaccaatcccgtggctacggagcagtatggttctgtatctaccaacctccagagaggcaacagacaagcagctaccgcagatgtcaacacacaaggcgttcttccaggcacggtctggcaggacagagatgtgtaccttcaggggcccatctgggcaaagattccacacacggacggacattttcacccctctcccctcatgggtggattcggacttaaacaccctcctccacagattctcatcaagaacaccccggtacctgcgaatccttcgaccaccttcagtgcggcaaagtttgcttccttcatcacacagtactccacgggacaggtcagcgtggagatcgagtgggagctgcagaaggaaaacagcaaacgctggaatcccgaaattcagtacacttccaactacaacaagtctgttaatgtggactttactgtggacactaatggcgtgtattcagagcctcgccccattggcaccagatacctgactcgtaatctgtaa

SEQ ID NO: 3338 - DNA, 2208 bp, synthetic construct
  misc_feature 1..2208: note = source = /note="Description of Artificial Sequence: Synthetic polynucleotide"
  source 1..2208: mol_type = other DNA
atggctgccgatggttatcttccagattggctcgaggacactctctctgaaggaataagacagtggtggaagctcaaacctggcccaccaccaccaaagcccgcagagcggcataaggacgacagcaggggtcttgtgcttcctgggtacaagtacctcggacccttcaacggactcgacaagggagagccggtcaacgaggcagacgccgcggccctcgagcacgacaaagcctacgaccggcagctcgacagcggagacaacccgtacctcaagtacaaccacgccgacgcggagtttcaggagcgccttaaagaagatacgtcttttgggggcaacctcggacgagcagtcttccaggcgaaaaagagggttcttgaacctctgggcctggttgaggaacctgttaagacggctccgggaaaaaagaggccggtagagcactctcctgtggagccagactcctcctcgggaaccggaaaggcgggccagcagcctgcaagaaaaagattgaattttggtcagactggagacgcagactcagtacctgacccccagcctctcggacagccaccagcagccccctctggtctgggaactaatacgatggctacaggcagtggcgcaccaatggcagacaataacgagggcgccgacggagtgggtaattcctcgggaaattggcattgcgattccacatggatgggcgacagagtcatcaccaccagcacccgaacctgggccctgcccacctacaacaaccacctctacaaacaaatttccagccaatcaggagcctcgaacgacaatcactactttggctacagcaccccttgggggtattttgacttcaacagattccactgccacttttcaccacgtgactggcaaagactcatcaacaacaactggggattccgacccaagagactcaacttcaagctctttaacattcaagtcaaagaggtcacgcagaatgacggtacgacgacgattgccaataaccttaccagcacggttcaggtgtttactgactcggagtaccagctcccgtacgtcctcggctcggcgcatcaaggatgcctcccgccgttcccagcagacgtcttcatggtgccacagtatggatacctcaccctgaacaacgggagtcaggcagtaggacgctcttcattttactgcctggagtactttccttctcagatgctgcgtaccggaaacaactttaccttcagctacacttttgaggacgttcctttccacagcagctacgctcacagccagagtctggaccgtctcatgaatcctctcatcgaccagtacccgtattacttgagcagaacaaacactccaagtggaaccaccacgcagtcaaggcttcagttttctcaggccggagcgagtgacattcgggaccagtctaggaactggcttcctggaccctgttaccgccagcagcgagtatcaaagacatctgcggataacaacaacagtgaatactcgtggactggagctaccaagtaccacctcaatggcagagactctctggtgaatccgggcccggccatggcaagccacaaggacgatgaagaaaagttttttcctcagagcggggttctcatctttgggaagcaaggctcagagaaaacaaatgtggacattgaaaaggtcatgattacagacgaagaggaaatcaggacaaccaatcccgtggctacggagcagtatggttctgtatctaccaacctccagagaggcaacagacaagcagctaccgcagatgtcaacacacaaggcgttcttccaggcacggtctggcaggacagagatgtgtaccttcaggggcccatctgggcaaagattccacacacggacggacattttcacccctctcccctcatgggtggattcggacttaaacaccctcctccacagattctcatcaagaacaccccggtacctgcgaatccttcgaccaccttcagtgcggcaaagtttgcttccttcatcacacagtactccacgggacaggtcagcgtggagatcgagtgggagctgcagaaggaaaacagcaaacgctggaatcccgaaattcagtacacttccaactacaacaagtctgttaatgtggactttactgtggacactaatggcgtgtattcagagcctcgccccattggcaccagatacctgactcgtaatctgtaa

SEQ ID NO: 3339 - DNA, 2208 bp, synthetic construct
  misc_feature 1..2208: note = source = /note="Description of Artificial Sequence: Synthetic polynucleotide"
  source 1..2208: mol_type = other DNA
atggctgccgatggttatcttccagattggctcgaggacactctctctgaaggaataagacagtggtggaagctcaaacctggcccaccaccaccaaagcccgcagagcggcataaggacgacagcaggggtcttgtgcttcctgggtacaagtacctcggacccttcaacggactcgacaagggagagccggtcaacgaggcagacgccgcggccctcgagcacgacaaagcctacgaccggcagctcgacagcggagacaacccgtacctcaagtacaaccacgccgacgcggagtttcaggagcgccttaaagaagatacgtcttttgggggcaacctcggacgagcagtcttccaggcgaaaaagagggctcttgaacctctgggcctggttgaggaacctgttaagacggctccgggaaaaaagaggccggtagagcactctcctgtggagccagactcctcctcgggaaccggaaaggcgggccagcagcctgcaagaaaaagattgaattttggtcagactggagacgcagactcagtacctgacccccagcctctcggacagccaccagcagccccctctggtctgggaactaatacgatggctacaggcagtggcgcaccaatggcagacaataacgagggcgccgacggagtgggtaattcctcgggaaattggcattgcgattccacatggatgggcgacagagtcatcaccaccagcacccgaacctgggccctgcccacctacaacaaccacctctacaaacaaatttccagccaatcaggagcctcgaacgacaatcactactttggctacagcaccccttgggggtattttgacttcaacagattccactgccacttttcaccacgtgactggcaaagactcatcaacaacaactggggattccgacccaagagactcaacttcaagctctttaacattcaagtcaaagaggtcacgcagaatgacggtacgacgacgattgccaataaccttaccagcacggttcaggtgtttactgactcggagtaccagctcccgtacgtcctcggctcggcgcatcaaggatgcctcccgccgttcccagcagacgtcttcatggtgccacagtatggatacctcaccctgaacaacgggagtcaggcagtaggacgctcttcattttactgcctggagtactttccttctcagatgctgcgtaccggaaacaactttaccttcagctacacttttgaggacgttcctttccacagcagctacgctcacagccagagtctggaccgtctcatgaatcctctcatcgaccagtacctgtattacttgagcagaacaaacactccaagtggaaccaccacgcagtcaaggcttcagttttctcaggccggagcgagtgacattcgggaccagtctaggaactggcttcctggaccctgttaccgccagcagcgagtatcaaagacatctgcggataacaacaacagtgaatactcgtggactggagctaccaagtaccacctcaatggcagagactctctggtgaatccgggcccggccatggcaagccacaaggacgatgaagaaaagttttttcctcagagcggggttctcatctttgggaagcaaggctcagagaaaacaaatgtggacattgaaaaggtcatgattacagacgaagaggaaatcaggacaaccaatcccgtggctacggagcagtatggttctgtatctaccaacctccagagaggcaacagacaagcagctaccgcagatgtcaacacacaaggcgttcttccaggcacggtctggcaggacagagatgtgtaccttcaggggcccatctgggcaaagattccacacacggacggacattttcacccctctcccctcatgggtggattcggacttaaacaccctcctccacagattctcatcaagaacaccccggtacctgcgaatccttcgaccaccttcagtgcggcaaagtttgcttccttcatcacacagtactccacgggacaggtcagcgtggagatcgagtgggagctgcagaaggaaaacagcaaacgctggaatcccgaaattcagtacacttccaactacaacaagtctgttaatgtggactttactgtggacactaatggcgtgtattcagagcctcgccccattggcaccagatacctgactcgtaatctgtaa

SEQ ID NO: 3340 - DNA, 2208 bp, synthetic construct
  misc_feature 1..2208: note = source = /note="Description of Artificial Sequence: Synthetic polynucleotide"
  source 1..2208: mol_type = other DNA
atggctgccgatggttatcttccagattggctcgaggacactctctctgaaggaataagacagtggtggaagctcaaacctggcccaccaccaccaaagcccgcagagcggcataaggacgacagcaggggtcttgtgcttcctgggtacaagtacctcggacccttcaacggactcgacaagggagagccggtcaacgaggcagacgccgcggccctcgagcacgacaaagcctacgaccggcagctcgacagcggagacaacccgtacctcaagtacaaccacgccgacgcggagtttcaggagcgccttaaagaagatacgtcttttgggggcaacctcggacgagcagtcttccaggcgaaaaagagggttcttgaacctctgggcctggttggggaacctgttaagacggctccgggaaaaaagaggccggtagagcactctcctgtggagccagactcctcctcgggaaccggaaaggcgggccagcagcctgcaagaaaaagattgaattttggtcagactggagacgcagactcagtacctgacccccagcctctcggacagccaccagcagccccctctggtctgggaactaatacgatggctacaggcagtggcgcaccaatggcagacaataacgagggcgccgacggagtgggtaattcctcgggaaattggcattgcgattccacatggatgggcgacagagtcatcaccaccagcacccgaacctgggccctgcccacctacaacaaccacctctacaaacaaatttccagccaatcaggagcctcgaacgacaatcactactttggctacagcaccccttgggggtattttgacttcaacagattccactgccacttttcaccacgtgactggcaaagactcatcaacaacaactggggattccgacccaagagactcaacttcaagctctttaacattcaagtcaaagaggtcacgcagaatgacggtacgacgacgattgccaataaccttaccagcacggttcaggtgtttactgactcggagtaccagctcccgtacgtcctcggctcggcgcatcaaggatgcctcccgccgttcccagcagacgtcttcatggtgccacagtatggatacctcaccctgaacaacgggagtcaggcagtaggacgctcttcattttactgcctggagtactttccttctcagatgctgcgtaccggaaacaactttaccttcagctacacttttgaggacgttcctttccacagcagctacgctcacagccagagtctggaccgtctcatgaatcctctcatcgaccagtacctgtattacttgagcagaacaaacactccaagtggaaccaccacgcagtcaaggcttcagttttctcaggccggagcgagtgacattcgggaccagtctaggaactggcttcctggaccctgttaccgccagcagcgagtatcaaagacatctgcggataacaacaacagtgaatactcgtggactggagctaccaagtaccacctcaatggcagagactctctggtgaatccgggcccggccatggcaagccacaaggacgatgaagaaaagttttttcctcagagcggggttctcatctttgggaagcaaggctcagagaaaacaaatgtggacattgaaaaggtcatgattacagacgaagaggaaatcaggacaaccaatcccgtggctacggagcagtatggttctgtatctaccaacctccagagaggcaacagacaagcagctaccgcagatgtcaacacacaaggcgttcttccaggcatggtctggcaggacagagatgtgtaccttcaggggcccatctgggcaaagattccacacacggacggacattttcacccctctcccctcatgggtggattcggacttaaacaccctcctccacagattctcatcaagaacaccccggtacctgcgaatccttcgaccaccttcagtgcggcaaagtttgcttccttcatcacacagtactccacgggacaggtcagcgtggagatcgagtgggagctgcagaaggaaaacagcaaacgctggaatcccgaaattcagtacacttccaactacaacaagtctgttaatgtggactttactgtggacactaatggcgtgtattcagagcctcgccccattggcaccagatacctgactcgtaatctgtaa

SEQ ID NO: 3341 - DNA, 2208 bp, synthetic construct
  misc_feature 1..2208: note = source = /note="Description of Artificial Sequence: Synthetic polynucleotide"
  source 1..2208: mol_type = other DNA
atggctgccgatggttatcttccagattggctcgaggacactctctctgaaggaataagacagtggtggaagctcaaacctggcccaccaccaccaaagcccgcagagcggcataaggacgacagcaggggtcttgtgcttcctgggtacaagtacctcggacccttcaacggactcgacaagggagagccggtcaacgaggcagacgccgcggccctcgagcacgacaaagcctacgaccggcagcccgacagcggagacaacccgtacctcaagtacaaccacgccgacgcggagtttcaggagcgccttaaagaagatacgtcttttgggggcaacctcggacgagcagtcttccaggcgaaaaagagggttcttgaacctctgggcctggttgaggaacctgttaagacggctccgggaaaaaagaggccggtagagcactctcctgtggagccagactcctcctcgggaaccggaaaggcgggccagcagcctgcaagaaaaagattgaattttggtcagactggagacgcagactcagtacctgacccccagcctctcggacagccaccagcagccccctctggtctgggaactaatacgatggctacaggcagtggcgcaccaatggcagacaataacgagggcgccgacggagtgggtaattcctcgggaaattggcattgcgattccacatggatgggcgacagagtcatcaccaccagcacccgaacctgggccctgcccacctacaacaaccacctctacaaacaaatttccagccaatcaggagcctcgaacgacaatcactactttggctacagcaccccttgggggtattttgacttcaacagattccactgccacttttcaccacgtgactggcaaagactcatcaacaacaactggggattccgacccaagagactcaacttcaagctctttaacattcaagtcaaagaggtcacgcagaatgacggtacgacgacgattgccaataaccttaccagcacggttcaggtgtttactgactcggagtaccagctcccgtacgtcctcggctcggcgcatcaaggatgcctcccgccgttcccagcagacgtcttcatggtgccacagtatggatacctcaccctgaacaacgggagtcaggcagtaggacgctcttcattttactgcctggagtactttccttctcagatgctgcgtaccggaaacaactttaccttcagctacacttttgaggacgttcctttccacagcagctacgctcacagccagagtctggaccgtctcatgaatcctctcatcgaccagtacctgtattacttgagcagaacaaacactccaagtggaaccaccacgcagtcaaggcttcagttttctcaggccggagcgagtgacattcgggaccagtctaggaactggcttcctggaccctgttaccgccagcagcgagtatcaaagacatctgcggataacaacaacagtgaatactcgtggactggagctaccaagtaccacctcaatggcagagactctctggtgaatccgggcccggccatggcaagccacaaggacgatgaagaaaagttttttcctcagagcggggttctcatctttgggaagcaaggctcagagaaaacaaatgtggacattgaaaaggtcatgattacagacgaagaggaaatcaggacaaccaatcccgtggctacggagcagtatggttctgtatctaccaacctccagagaggcaacagacaagcagctaccgcagatgtcaacacacaaggcgttcttccaggcacggtctggcaggacagagatgtgtaccttcaggggcccatctgggcaaagattccacacacggacggacattttcacccctctcccctcatgggtggattcggacttaaacaccctcctccacagattctcatcaagaacaccccggtacctgcgaatccttcgaccaccttcagtgcggcaaagtttgcttccttcatcacacagtactccacgggacaggtcagcgtggagatcgagtgggagctgcagaaggaaaacagcaaacgctggaatcccgaaattcagtacacttccaactacaacaagtctgttaatgtggactttactgtggacactaatggcgtgtattcagagcctcgccccattggcaccagatacctgactcgtaatctgtaa

SEQ ID NO: 3342 - DNA, 2208 bp, synthetic construct
  misc_feature 1..2208: note = source = /note="Description of Artificial Sequence: Synthetic polynucleotide"
  source 1..2208: mol_type = other DNA
atggctgccgatggttatcttccagattggctcgaggacactctctctgaaggaataagacagtggtggaagctcaaacctggcccaccaccaccaaagcccgcagagcggcataaggacgacagcaggggtcttgtgcttcctgggtacaagtacctcggacccttcaacggactcgacaagggagagccggtcaacgaggcagacgccgcggccctcgagcacgacaaagcctacgaccggcagctcgacagcggagacaacccgtacctcaagtacaaccacgccgacgcggagtttcaggagcgccttaaagaagatacgtcttttgggggcaacctcggacgagcagtcttccaggcgaaaaagagggttcttgaacctctgggcctggttgaggaacctgttaagacggctccgggaaaaaagaggccggtagagcactctcctgtggagccagactcctcctcgggaaccggaaaggcgggccagcagcctgcaagaaaaagattgaattttggtcagactggagacgcagactcagtacctgacccccagcctctcggacagccaccagcagccccctctggtctgggaactaatacgatggctacaggcagtggcgcaccaatggcagacaataacgagggcgccgacggagtgggtaattcctcgggaaattggcattgcgattccacatggatgggcgacagagtcatcaccaccagcacccgaacctgggccctgcccacctacaacaaccacctctacaaacaaatttccagccaatcaggagcctcgaacgacaatcactactttggctacagcaccccttgggggtattttgacttcaacagattccactgccacttttcaccacgtgactggcaaagactcatcaacaacaactggggattccgacccaagagactcaacttcaagctctttaacattcaagtcaaagaggtcacgcagaatgacggtacgacgacgattgccaataaccttaccagcacggttcaggtgtttactgactcggagtaccagctcccgtacgtcctcggctcggcgcatcaaggatgcctcccgccgttcccagcagacgtcttcatggtgccacagtatggatacctcaccctgaacaacgggagtcaggcagtaggacgctcttcattttactgcctggagtactttccttctcagatgctgcgtaccggaaacaactttaccttcagctacacttttgaggacgttcctttccacagcagctacgctcacagccagagtctggaccgtctcatgaatcctctcatcgaccagtacctgtattacttgagcagaacaaacaccccaagtggaaccaccacgcagtcaaggcttcagttttctcaggccggagcgagtgacattcgggaccagtctaggaactggcttcctggaccctgttaccgccagcagcgagtatcaaagacatctgcggataacaacaacagtgaatactcgtggactggagctaccaagtaccacctcaatggcagagactctctggtgaatccgggcccggccatggcaagccacaaggacgatgaagaaaagttttttcctcagagcggggttctcatctttgggaagcaaggctcagagaaaacaaatgtggacattgaaaaggtcatgattacagacgaagaggaaatcaggacaaccaatcccgtggctacggagcagtatggttctgtatctaccaacctccagagaggcaacagacaagcagctaccgcagatgtcaacacacaaggcgttcttccaggcatggtctggcaggacagagatgtgtaccttcaggggcccatctgggcaaagattccacacacggacggacattttcacccctctcccctcatgggtggattcggacttaaacaccctcctccacagattctcatcaagaacaccccggtacctgcgaatccttcgaccaccttcagtgcggcaaagtttgcttcctccatcacacagtactccacgggacaggtcagcgtggagatcgagtgggagctgcagaaggaaaacagcaaacgctggaatcccgaaattcagtacacttccaactacaacaagtctgttaatgtggactttactgtggacactaatggcgtgtattcagagcctcgccccattggcaccagatacctgactcgtaatctgtaa

SEQ ID NO: 3343 - DNA, 2208 bp, synthetic construct
  misc_feature 1..2208: note = source = /note="Description of Artificial Sequence: Synthetic polynucleotide"
  source 1..2208: mol_type = other DNA
atggctgccgatggttatcttccagattggctcgaggacactctctctgaaggaataagacagtggtggaagctcaaacctggcccaccaccaccaaagcccgcagagcggcataaggacgacagcaggggtcttgtgcttcctgggtacaagtacctcggacccttcaacggactcgacaagggagagccggtcaacgaggcagacgccgcggccctcgagcacgacaaagcctacgaccggcagctcgacagcggagacaacccgtacctcaagtacaaccacgccgacgcggagtttcaggagcgccttaaagaagatacgtcttttgggggcaacctcggacgagcagtcttccaggcgaaaaagagggttcttgaacctctgggcctggttgaggaacctgttaagacggctccgggaaaaaagaggccggtagagcactctcctgtggagccagactcctcctcgggaaccggaaaggcgggccagcagcctgcaagaaaaagattgaattttggtcagactggagacgcagactcagtacctgacccccagcctctcggacagccaccagcagccccctctggtctgggaactaatacgatggctacaggcagtggcgcaccaatggcagacaataacgagggcgccgacggagtgggtaattcctcgggaaattggcattgcgattccacatggatgggcgacagagtcatcaccaccagcacccgaacctgggccctgcccacctacaacaaccacctctacaaacaaatttccagccaatcaggagcctcgaacgacaatcactactttggctacagcaccccttgggggtattttgacctcaacagattccactgccacttttcaccacgtgactggcaaagactcatcaacaacaactggggattccgacccaagagactcaacttcaagctctttaacattcaagtcaaagaggtcacgcagaatgacggtacgacgacgattgccaataaccttaccagcacggttcaggtgtttactgactcggagtaccagctcccgtacgtcctcggctcggcgcatcaaggatgcctcccgccgttcccagcagacgtcttcatggtgccacagtatggatacctcaccctgaacaacgggagtcaggcagtaggacgctcttcattttactgcctggagtactttccttctcagatgctgcgtaccggaaacaactttaccttcagctacacttttgaggacgttcctttccacagcagctacgctcacagccagagtctggaccgtctcatgaatcctctcatcgaccagtacctgtattacttgagcagaacaaacactccaagtggaaccaccacgcagtcaaggcttcagttttctcaggccggagcgagtgacattcgggaccagtctaggaactggcttcctggaccctgttaccgccagcagcgagtatcaaagacatctgcggataacaacaacagtgaatactcgtggactggagctaccaagtaccacctcaatggcagagactctctggtgaatccgggcccggccatggcaagccacaaggacgatgaagaaaagttttttcctcagagcggggttctcatctttgggaagcaaggctcagagaaaacaaatgtggacattgaaaaggtcatgattacagacgaagaggaaatcaggacaaccaatcccgtggctacggagcagtatggttctgtatctaccaacctccagagaggcaacagacaagcagctaccgcagatgtcaacacacaaggcgttcttccaggcacggtctggcaggacagagatgtgtaccttcaggggcccatctgggcaaagattccacacacggacggacattttcacccctctcccctcatgggtggattcggacttaaacaccctcctccacagattctcatcaagaacaccccggtacctgcgaatccttcgaccaccttcagtgcggcaaagtttgcttccttcatcacacagtactccacgggacaggtcagcgtggagatcgagtgggagctgcagaaggaaaacagcaaacgctggaatcccgaaattcagtacacttccaactacaacaagtctgttaatgtggactttactgtggacactaatggcgtgtattcagagcctcgccccattggcaccagatacctgactcgtaatctgtaa

SEQ ID NO: 3344 - DNA, 2208 bp, synthetic construct
  misc_feature 1..2208: note = source = /note="Description of Artificial Sequence: Synthetic polynucleotide"
  source 1..2208: mol_type = other DNA
atggctgccgatggttatcttccagattggctcgaggacactctctctgaaggaataagacagtggtggaagctcaaacctggcccaccaccaccaaagcccgcagagcggcataaggacgacagcaggggtcttgtgcttcctgggtacaagtacctcggacccttcaacggactcgacaagggagagccggtcaacgaggcagacgccgcggccctcgagcacgacaaagcctacgaccggcagctcgacagcggagacaacccgtacctcaagtacaaccacgccgacgcggagtttcaggagcgccttaaagaagatacgtcttttgggggcaacctcggacgagcagtcttccaggcgaaaaagagggttcttgaacctctgggcctggttgaggaacctgttaagacggctccgggaaaaaagaggccggtagagcactctcctgtggagccagactcctcctcgggaaccggaaaggcgggccagcagcctgcaagaaaaagattgaattttggtcagactggagacgcagactcagtacctgacccccagcctctcggacagccaccagcagccccctctggtctgggaactaatacgatggctacaggcagtggcgcaccaatggcagacaataacgagggcgccgacggagtgggtaattcctcgggaaattggcattgcgattccacatggatgggcgacagagtcatcaccaccagcacccgaacctgggccctgcccacctacaacaaccacctctacaaacaaatttccagccaatcaggagcctcgaacgacaatcgctactttggctacagcaccccttgggggtattttgacttcaacagattccactgccacttttcaccacgtgactggcaaagactcatcaacaacaactggggattccgacccaagagactcaacttcaagctctttaacattcaagtcaaagaggtcacgcagaatgacggtacgacgacgattgccaataaccttaccagcacggttcaggtgtttactgactcggagtaccagctcccgtacgtcctcggctcggcgcatcaaggatgcctcccgccgttcccagcagacgtcttcatggtgccacagtatggatacctcaccctgaacaacgggagtcaggcagtaggacgctcttcattttactgcctggagtactttccttctcagatgctgcgtaccggaaacaactttaccttcagctacacttttgaggacgttcctttccacagcagctacgctcacagccagagtctggaccgtctcatgaatcctctcatcgaccagtacctgtattacttgagcagaacaaacactccaagtggaaccaccacgcagtcaaggcttcagttttctcaggccggagcgagtgacattcgggaccagtctaggaactggcttcctggaccctgttaccgccagcagcgagtatcaaagacatctgcggataacaacaacagtgaatactcgtggactggagctaccaagtaccacctcaatggcagagactctctggtgaatccgggcccggccatggcaagccacaaggacgatgaagaaaagttttttcctcagagcggggttctcatctttgggaagcaaggctcagagaaaacaaatgtggacattgaaaaggtcatgattacagacgaagaggaaatcaggacaaccaatcccgtggctacggagcagtatggttctgtatctaccaacctccagagaggcaacagacaagcagctaccgcagatgtcaacacacaaggcgttcttccaggcacggtctggcaggacagagatgtgtaccttcaggggcccatctgggcaaagattccacacacggacggacattttcacccctctcccctcatgggtggattcggacttaaacaccctcctccacagattctcatcaagaacaccccggtacctgcgaatccttcgaccaccttcagtgcggcaaagtttgcttccttcatcacacagtactccacgggacaggtcagcgtggagatcgagtgggagctgcagaaggaaaacagcaaacgctggaatcccgaaattcagtacacttccaactacaacaagtctgttaatgtggactttactgtggacactaatggcgtgtattcagagcctcgccccattggcaccagatacctgactcgtaatctgtaa

SEQ ID NO: 3345 - DNA, 2208 bp, synthetic construct
  misc_feature 1..2208: note = source = /note="Description of Artificial Sequence: Synthetic polynucleotide"
  source 1..2208: mol_type = other DNA
atggctgccgatggttatcttccagattggctcgaggacactctctctgaaggaataagacagtggtggaagctcaaacctggcccaccaccaccaaagcccgcagagcggcataaggacgacagcaggggtcttgtgcttcctgggtacaagtacctcggacccttcaacggactcgacaagggagagccggtcaacgaggcagacgccgcggccctcgagcacgacaaagcctacgaccggcagctcgacagcggagacaacccgtacctcaagtacaaccacgccgacgcggagtttcaggagcgccttaaagaagatacgtcttttgggggcaacctcggacgagcagtcttccaggcgaaaaagagggttcttgaacctctgggcctggttgaggaacctgttaagacggctccgggaaaaaagaggccggtagagcactctcctgtggagccagactcctcctcgggaaccggaaaggcgggccagcagcctgcaagaaaaagattgaattttggtcagactggagacgcagactcagtacctgacccccagcctctcggacagccaccagcagccccctctggtctgggaactaatacgatggctacaggcagtggcgcaccaatggcagacaataacgagggcgccgacggagtgggtaattcctcgggaaattggcattgcgattccacatggatgggcgacagagtcatcaccaccagcacccgaacctgggccctgcccacctacaacaaccacctctacaaacaaatttccagccaatcaggagcctcgaacgacaatcactactttggctacagcaccccttgggggtattttgacttcaacagattccactgccacttttcaccacgtgactggcaaagactcatcaacaacaactggggattccgacccaagagactcaacttcaagctctttaacattcaagtcaaagaggtcacgcagaatgacggtacgacgacgattgccaataaccttaccagcacggttcaggtgtttactgactcggagtaccagctcccgtacgtcctcggctcggcgcatcaaggatgcctcccgccgttcccagcagacgtcttcatggtgccacagtatggatacctcaccctgaacaacgggagtcaggcagtaggacgctcttcattttactgcctggagtactttccttctcagatgctgcgtaccggaaacaactttaccttcagctacacttttgaggacgttcctttccacagcagctacgctcacagccagagtctggaccgtctcatgaatcctctcatcgaccagtacctgtattacttgagcagaacaaacactccaagtggaaccaccacgcagtcaaggcttcagttttctcaggccggagcgagtgacattcgggaccagtctaggaactggcttcctggaccctgttaccgccagcagcgagtatcaaagacatctgcggataacaacaacagtgaatactcgtggactggagctaccaagtaccacctcaatggcagagactctctggtgaatccgggcccggccatggcaagccacaaggacgatgaagaaaagttttttcctcagagcggggttctcatctttgggaagcaaggctcagagaaaacaaatgtggacattgaaaaggtcatgattacagacgaagaggaaatcaggacaaccaatcccgtggctacggagcagtatggttctgtatctaccaacctccagagaggcaacagacaagcagctaccgcagatgtcaacacacaaggcgttcttccaggcacggtctggcaggacagagatgtgtaccttcaggggcccatctgggcaaagattccacacacggacggacattttcacccctctcccctcatgggtggattcggacttaaacaccctcctccacagattctcatcaagaacaccccggtacctgcgaatccttcgaccaccttcagtgcggcaaagtttgcttccttcatcacacagtactccacgggacaggtcagcgtggagatcgagtgggagctgcagaaggaaaacagcaaacgctggaatcccgaaattcagtacacttccaactacaacaagtctgctaatgtggactttactgtggacactaatggcgtgtattcagagcctcgccccattggcaccagatacctgactcgtaatctgtaa

SEQ ID NO: 3346 - DNA, 2208 bp, synthetic construct
  misc_feature 1..2208: note = source = /note="Description of Artificial Sequence: Synthetic polynucleotide"
  source 1..2208: mol_type = other DNA
atggctgccgatggttatcttccagattggctcgaggacactctctctgaaggaataagacagtggtggaagctcaaacctggcccaccaccaccaaagcccgcagagcggcataaggacgacagcaggggtcttgtgcttcctgggtacaagtacctcggacccttcaacggactcgacaagggagagccggtcaacgaggcagacgccgcggccctcgagcacgacaaagcctacgaccggcagctcgacagcggagacaacccgtacctcaagtacaaccacgccgacgcggagtttcaggagcgccttaaagaagatacgtcttttgggggcaacctcggacgagcagtcttccaggcgaaaaagagggttcttgaacctctgggcctggttgaggaacctgttaagacggctccgggaaaaaagaggccggtagagcactctcctgtggagccagactcctcctcgggaaccggaaaggcgggccagcagcctgcaagaaaaagattgaattttggtcagactggagacgcagactcagtacctgacccccagcctctcggacagccaccagcagccccctctggtctgggaactaatacgatggctacaggcagtggcgcaccaatggcaggcaataacgagggcgccgacggagtgggtaattcctcgggaaattggcattgcgattccacatggatgggcgacagagtcatcaccaccagcacccgaacctgggccctgcccacctacaacaaccacctctacaaacaaatttccagccaatcaggagcctcgaacgacaatcactactttggctacagcaccccttgggggtattttgacttcaacagattccactgccacttttcaccacgtgactggcaaagactcatcaacaacaactggggattccgacccaagagactcaacttcaagctctttaacattcaagtcaaagaggtcacgcagaatgacggtacgacgacgattgccaataaccttaccagcacggttcaggtgtttactgactcggagtaccagctcccgtacgtcctcggctcggcgcatcaaggatgcctcccgccgttcccagcagacgtcttcatggtgccacagtatggatacctcaccctgaacaacgggagtcaggcagtaggacgctcttcattttactgcctggagtactttccttctcagatgctgcgtaccggaaacaactttaccttcagctacacttttgaggacgttcctttccacagcagctacgctcacagccagagtctggaccgtctcatgaatcctctcatcgaccagtacctgtattacttgagcagaacaaacactccaagtggaaccaccacgcagtcaaggcttcagttttctcaggccggagcgagtgacattcgggaccagtctaggaactggcttcctggaccctgttaccgccagcagcgagtatcaaagacatctgcggataacaacaacagtgaatactcgtggactggagctaccaagtaccacctcaatggcagagactctctggtgaatccgggcccggccatggcaagccacaaggacgatgaagaaaagttttttcctcagagcggggttctcatctttgggaagcaaggctcagagaaaacaaatgtggacattgaaaaggtcatgattacagacgaagaggaaatcaggacaaccaatcccgtggctacggagcagtatggttctgtatctaccaacctccagagaggcaacagacaagcagctaccgcagatgtcaacacacaaggcgttcttccaggcacggtctggcaggacagagatgtgtaccttcaggggcccatctgggcaaagattccacacacggacggacattttcacccctctcccctcatgggtggattcggacttaaacaccctcctccacagattctcatcaagaacaccccggtacctgcgaatccttcgaccaccttcagtgcggcaaagtttgcttccttcatcacacagtactccacgggacaggtcagcgtggagatcgagtgggagctgcagaaggaaaacagcaaacgctggaatcccgaaattcagtacacttccaactacaacaagtctgttaatgtggactttactgtggacactaatggcgtgtattcagagcctcgccccattggcaccagatacctgactcgtaatctgtaa

SEQ ID NO: 3347 - DNA, 2208 bp, synthetic construct
  misc_feature 1..2208: note = source = /note="Description of Artificial Sequence: Synthetic polynucleotide"
  source 1..2208: mol_type = other DNA
atggctgccgatggttatcttccagattggctcgaggacactctctctgaaggaataagacagtggtggaagctcaaacctggcccaccaccaccaaagcccgcagagcggcataaggacgacagcaggggtcttgtgcttcctgggtacaagtacctcggacccttcaacggactcgacaagggagagccggtcaacgaggcagacgccgcggccctcgagcacgacaaagcctacaaccggcagctcgacagcggagacaacccgtacctcaagtacaaccacgccgacgcggagtttcaggagcgccttaaagaagatacgtcttttgggggcaacctcggacgagcagtcttccaggcgaaaaagagggttcttgaacctctgggcctggttgaggaacctgttaagacggctccgggaaaaaagaggccggtagagcactctcctgtggagccagactcctcctcgggaaccggaaaggcgggccagcagcctgcaagaaaaagattgaattttggtcagactggagacgcagactcagtacctgacccccagcctctcggacagccaccagcagccccctctggtctgggaactaatacgatggctacaggcagtggcgcaccaatggcagacaataacgagggcgccgacggagtgggtaattcctcgggaaattggcattgcgattccacatggatgggcgacagagtcatcaccaccagcacccgaacctgggccctgcccacctacaacaaccacctctacaaacaaatttccagccaatcaggagcctcgaacgacaatcactactttggctacagcaccccttgggggtattttgacttcaacagattccactgccacttttcaccacgtgactggcaaagactcatcaacaacaactggggattccgacccaagagactcaacttcaagctctttaacattcaagtcaaagaggtcacgcagaatgacggtacgacgacgattgccaataaccttaccagcacggttcaggtgtttactgactcggagtaccagctcccgtacgtcctcggctcggcgcatcaaggatgcctcccgccgctcccagcagacgtcttcatggtgccacagtatggatacctcaccctgaacaacgggagtcaggcagtaggacgctcttcattttactgcctggagtactttccttctcagatgctgcgtaccggaaacaactttaccttcagctacacttttgaggacgttcctttccacagcagctacgctcacagccagagtctggaccgtctcatgaatcctctcatcgaccagtacctgtattacttgagcagaacaaacactccaagtggaaccaccacgcagtcaaggcttcagttttctcaggccggagcgagtgacattcgggaccagtctaggaactggcttcctggaccctgttaccgccagcagcgagtatcaaagacatctgcggataacaacaacagtgaatactcgtggactggagctaccaagtaccacctcaatggcagggactctctggtgaatccgggcccggccatggcaagccacaaggacgatgaagaaaagttttttcctcagagcggggttctcatctttgggaagcaaggctcagagaaaacaaatgtggacattgaaaaggtcatgattacagacgaagaggaaatcaggacaaccaatcccgtggctacggagcagtatggttctgtatctaccaacctccagagaggcaacagacaagcagctaccgcagatgtcaacacacaaggcgttcttccaggcatggtctggcaggacagagatgtgtaccttcaggggcccatctgggcaaagattccacacacggacggacattttcacccctctcccctcatgggtggattcggacttaaacaccctcctccacagattctcatcaagaacaccccggtacctgcgaatccttcgaccaccttcagtgcggcaaagtttgcttccttcatcacacagtactccacgggacaggtcagcgtggagatcgagtgggagctgcagaaggaaaacagcaaacgctggaatcccgaaattcagtacacttccaactacaacaagtctgttaatgtggactttactgtggacactaatggcgtgtattcagagcctcgccccattggcaccagatacctgactcgtaatctgtaa

SEQ ID NO: 3348 - DNA, 2208 bp, synthetic construct
  misc_feature 1..2208: note = source = /note="Description of Artificial Sequence: Synthetic polynucleotide"
  source 1..2208: mol_type = other DNA
atggctgccgatggttatcttccagattggctcgaggacactctctctgaaggaataagacagtggtggaagctcaaacctggcccaccaccgccaaagcccgcagagcggcataaggacgacagcaggggtcttgtgcttcctgggtacaagtacctcggacccttcaacggactcgacaagggagagccggtcaacgaggcagacgccgcggccctcgagcacgacaaggcctacgaccggcagctcgacagcggagacaacccgtacctcaagtacaaccacgccgacgcggagtttcaggagcgccttaaagaagatacgtcttttgggggcaacctcgcaagagcagtattccaggcgaaaaagagggttcttgaacctctgggcctggttgaggagcctgttaagacggctccgggaaaaaagaggccggtagagcattctcctgcggagccagactcctcctcgggaaccggaaaagcgggccagcagcctgcgagaaagagattgaatttcggtcagactggagacgcagactccgtacctgacccccagcctctcggacagccaccagcagccccctctggtctgggaactaatacgatggctacaggcagtggcgcaccaatggcagacaataacgagggtgccgacggagtgggtaattcctcaggaaattggcattgcgattccacatggatgggcgacagagtcatcaccaccagcacccgcacctgggctctgcccacctacaacaaccatctgtacaagcagatctccagccaatctggagccagcaacgacaaccactactttggctacagcaccccttgggggtattttgacttcaacagattccactgccacttctccccacgtgactggcaaagactcatcaacaacaactggggattccggcccaagagactcagcttcaagctctttaacattcaagtcaaggaggtcacgcagaatgacggtgcgacgacgattgccaataaccttaccagcacggttcaggtctttactgactcggagtaccagctcccgtacgtcctcggctcggcgcatcaaggatgcctcccgccgttcccagcagacgtcttcatggtgccacagtatggatacctcaccctgaacaacgggagtcaggcggtaggacgctcttcattttactgcctggagtacttcccttctcagatgcttcgcacgggaaacaactttaccttcagctacacctttgaggacgtgccttttcacagcagctacgctcacagccaaagtctggaccgtctcatgaatcctctcatcgaccagtacctgtattacttgagcaaaacaaacgctccaagcggaaccaccacgatgtccaggcttcagttttctcaggccggagcaagtgacattcgggaccagtctagaaactggcttcctggaccctgttaccgccagcagcgagtatcaaagacagctgcggacaacaacaacagtgattactcgtggactggagctaccaagtaccacctcaatggaagagactctctggtgaacccgggcccagctatggccagccacaaggacgatgaagaaaaatattttcctcagagcggggttctcatcttcgggaaacaaggctcaaataaaactaatgtggacattgaaaaggttatgattacagacgaagaggaaatcaggaccaccaatcccgtggctacggagcagtatggttctgtatctaccaaccttcaaagcggcaacacacaagcagctacctcagatgtcaacacacaaggcgttcttcctggcatggtctggcaggacagagatgtgtacctgcaggggcccatctgggcaaagattccacacacggatggacactttcacccttctcctcttatgggaggatttggactgaagcaccctcccccgcagattctcatcaagaataccccggtacctgcgaatccttcgaccaccttcagtgcggcaaagtttgcttctttcatcacacagtactccacggggcaggtcagcgtggagatcgagtgggagctgcagaaggagaacagcaaacgctggaaccccgagatccagtatacttccaactacaacaaatctgttaatgtggactttactgtggacactaatggtgtgtattcagagcctcgccccattggcaccagatacctgactcgtaatctgtaa

SEQ ID NO: 3349 - DNA, 2205 bp, synthetic construct
  misc_feature 1..2205: note = source = /note="Description of Artificial Sequence: Synthetic polynucleotide"
  source 1..2205: mol_type = other DNA
atggctgccgatggttatcttccagattggctcgaggacactctctctgaaggaataagacagtggtggaagctcaaacctggcccaccaccaaagcccgcagagcggcataaggacgacagcaggggtcttgtgcttcctgggtacaagtacctcggacccttcaacggactcgacaagggagagccggtcaacgaggcagacgccgcggccctcgagcacgacaaagcctacgaccggcagctcgacagcggagacaacccgtacctcaagtacaaccacgccgacgcggagtttcaggagcgccttaaagaagatacgtcttttgggggcaacctcggacgagcagtcttccaggcgaaaaagagggctcttgaacctctgggcctggttgaggaacctgttaagacggctccgggaaaaaagaggccggtagagcactctcctgtggagccagactcctcctcgggaaccggaaaggcgggccagcagcctgcaagaaaaagattgaattttggtcagactggagacgcagactcagtacctgacccccagcctctcggacagccaccagcagccccctctggtctgggaactaatacgatggctacaggcagtggcgcaccaatggcagacaataacgagggcgccgacggagtgggtaattcctcgggaaattggcattgcgattccacatggatgggcgacagagtcatcaccaccagcacccgaacctgggccctgcccacctacaacaaccacctctacaaacaaatttccagccaatcaggagcctcgaacgacaatcactactttggctacagcaccccttgggggtattttgacttcaacagattccactgccacttttcaccacgtgactggcaaagactcatcaacaacaactggggattccgacccaagagactcaacttcaagctctttaacattcaagtcaaagaggtcacgcagaatgacggtacgacgacgattgccaataaccttaccagcacggttcaggtgtttactgactcggagtaccagctcccgtacgtcctcggctcggcgcatcaaggatgcctcccgccgttcccagcagacgtcttcatggtgccacagtatggatacctcaccctgaacaacgggagtcaggcagtaggacgctcttcattttactgcctggagtactttccttctcagatgctgcgtaccggaaacaactttaccttcagctacacttttgaggacgttcctttccacagcagctacgctcacagccagagtctggaccgtctcatgaatcctctcatcgaccagtacctgtattacttgagcagaacaaacactccaagtggaaccaccacgcagtcaaggcttcagttttctcaggccggagcgagtgacattcgggaccagtctaggaactggcttcctggaccctgttaccgccagcagcgagtatcaaagacatctgcggataacaacaacagtgaatactcgtggactggagctaccaagtaccacctcaatggcagagactctctggtgaatccgggcccggccatggcaagccacaaggacgatgaagaaaagttttttcctcagagcggggttctcatctttgggaagcaaggctcagagaaaacaaatgtggacattgaaaaggtcatgattacagacgaagaggaaatcaggacaaccaatcccgtggctacggagcagtatggttctgtatctaccaacctccagagaggcaacagacaagcagctaccgcagatgtcaacacacaaggcgttcttccaggcatggtctggcaggacagagatgtgtaccttcaggggcccatctgggcaaagattccacacacggacggacattttcacccctctcccctcatgggtggattcggacttaaacaccctcctccacagattctcatcaagaacaccccggtacctgcgaatccttcgaccaccttcagtgcggcaaagtttgcttccttcatcacacagtactccacgggacaggtcagcgtggagatcgagtgggagctgcagaaggaaaacagcaaacgctggaatcccgaaattcagtacacttccaactacaacaagtctgttaatgtggactttactgtggacactaatggcgtgtattcagagcctcgccccattggcaccagatacctgactcgtaatctgtaa

SEQ ID NO: 3350 - DNA, 2208 bp, synthetic construct
  misc_feature 1..2208: note = source = /note="Description of Artificial Sequence: Synthetic polynucleotide"
  source 1..2208: mol_type = other DNA
atggctgccgatggttatcttccagattggctcgaggacactctctctgaaggaataagacagtggtggaagctcaaacctggcccaccaccgccaaagcccgcagagcggcataaggacgacagcaggggtcttgtgcttcctgggtacaagtacctcggacccttcaacggactcgacaagggagagccggtcaacgaggcagacgccgcggccctcgagcacgacaaggcctacgaccggcagctcgacagcggagacaacccgtacctcaagtacaaccacgccgacgcggagtttcaggagcgccttaaagaagatacgtcttttgggggcaacctcgcaagagcagtattccaggcgaaaaagagggttcttgaacctctgggcctggttgaggagcctgttaagacggctccgggaaaaaagaggccggtagagcattctcctgcggagccagactcctcctcgggaaccggaaaagcgggccagcagcctgcgagaaagagattgaatttcggtcagactggagacgcagactccgtacctgacccccagcctctcggacagccaccagcagccccctctggtctgggaactaatacgatggctacaggcagtggcgcaccaatggcagacaataacgagggtgccgacggagtgggtaattcctcaggaaattggcattgcgattccacatggatgggcgacagagtcatcaccaccagcacccgcacctgggctctgcccacctacaacaaccatctgtacaagcagatctccagccaatctggagccagcaacgacaaccactactttggctacagcaccccttgggggtattttgacttcaacagattccactgccacttctccccacgtgactggcaaagactcatcaacaacaactggggattccggcccaagagactcagcttcaagctctttaacattcaagtcaaggaggtcacgcagaatgacggtacgacgacgattgccaataaccttaccagcacggttcaggtctttactgactcggagtaccagctcccgtacgtcctcggctcggcgcatcaaggatgcctcccgccgttcccagcagacgtcttcatggtgccacagtatggatacctcaccctgaacaacgggagtcaggcggtaggacgctcttcattttactgcctggagtacttcccttctcagatgcttcgcacgggaaacaactttaccttcagctacacctttgaggacgtgccttttcacagcagctacgctcacagccaaagtctggaccgtctcatgaatcctctcatcgaccagtacctgtattacttgagcaaaacaaacgctccaagcggaaccaccacgatgtccaggcttcagttttctcaggccggagcaagtgacattcgggaccagtctagaaactggcttcctggaccctgttaccgccagcagcgagtatcaaagacagctgcggacaacaacaacagtgattactcgtggactggagctaccaagtaccacctcaatggaagagactctctggtgaacccgggcccagctatggccagccacaaggacgatgaagaaaaatattttcctcagagcggggttctcatcttcgggaaacaaggctcaaataaaactaatgtggacattgaaaaggttatgattacagacgaagaggaaatcaggaccaccaatcccgtggctacggagcagtatggttctgtatctaccaaccttcaaagcggcaacacacaagcagctacctcagatgtcaacacacaaggcgttcttcctggcatggtctggcaggacagagatgtgtacctgcaggggcccatctgggcaaagattccacacacggatggacactttcacccttctcctcttatgggaggatttggactgaagcaccctcccccgcagattctcatcaagaataccccggtacctgcgaatccttcgaccaccttcagtgcggcaaagtttgcttctttcatcacacagtactccacggggcaggtcagcgtggagatcgagtgggagctgcagaaggagaacggcaaacgctggaaccccgagatccagtatacttccaactacaacaaatctgttaatgtggactttactgtggacactaatggtgtgtattcagagcctcgccccattggcaccagatacctgactcgtaatctgtaa

SEQ ID NO: 3351 - DNA, 2208 bp, synthetic construct
  misc_feature 1..2208: note = source = /note="Description of Artificial Sequence: Synthetic polynucleotide"
  source 1..2208: mol_type = other DNA
atggctgccgatggttatcttccagattggctcgaggacactctctctgaaggaataagacagtggtggaagctcaaacctggcccaccaccaccaaagcccgcagagcggcataaggacgacagcaggggtcttgtgcttcctgggtacaagtacctcggacccttcaacggactcgacaagggagagccggtcaacgaggcagacgccgcggccctcgagcacgacaaagcctacgaccggcagctcgacagcggagacaacccgtacctcaagtacaaccacgccgacgcggagtttcaggagcgccttaaagaagatacgtcttttgggggcaacctcggacgagcagtcttccaggcgaaaaagagggttcttgaacctctgggcctggttgaggaacctgttaagacggctccgggaaaaaagaggccggtagagcactctcctgtggagccagactcctcctcgggaaccggaaaggcgggccagcagcctgcaagaaaaagattgaattttggtcagactggagacgcagactcagtacctgacccccagcctctcggacagccaccagcagccccctctggtctgggaactaatacgatggctacaggcagtggcgcaccaatggcagacaataacgagggcgccgacggagtgggtaattcctcgggaaattggcattgcgattccacatggatgggcgacagagtcatcaccaccagcacccgaacctgggccctgcccacctacaacaaccacctctacaaacaaatttccagccaatcaggggcctcgaacgacaatcactactttggctacagcaccccttgggggtattttgacttcaacagattccactgccacttttcaccacgtgactggcaaagactcatcaacaacaactggggattccgacccaagagactcaacttcaagctctttaacattcaagtcaaagaggtcacgcagaatgacggtacgacgacgattgccaataaccttaccagcacggttcaggtgtttactgactcggagtaccagctcccgtacgtcctcggctcggcgcatcaaggatgcctcccgccgttcccagcagacgtcttcatggtgccacagtatggatacctcaccctgaacaacgggagtcaggcagtaggacgctcttcattttactgcctggagtactttccttctcagatgctgcgtaccggaaacaactttaccttcagctacacttttgaggacgttcctttccacagcagctacgctcacagccagagtctggaccgtctcatgaatcctctcattgaccagtacctgtattacttgagcagaacaaacactccaagtggaaccaccacgcagtcaaggcttcagttttctcaggccggagcgagtgacattcgggaccagtctaggaactggcttcctagaccctgttaccgccagcagcgagtatcaaagacatctgcggataacaacaacagtgaatactcgtggactggagctaccaagtaccacctcaatggcagagactctctggtgaatccgggcccggccatggcaagccacaaggacgatgaagaaaagttttttcctcagagcggggttctcatctttgggaagcaaggctcagagaaaacaaatgtggacattgaaaaggtcatgattacagacgaagaggaaatcaggacaaccaatcccgtggctacggagcagtatggttctgtatctaccaacctccagagaggcaacagacaagcagctaccgcagatgtcaacacacaaggcgttcttccaggcacggtctggcaggacagagatgtgtaccttcaggggcccatctgggcaaagattccacacacggacggacattttcacccctctcccctcatgggtggattcggacttaaacaccctcctccacagattctcatcaagaacaccccggtacctgcgaatccttcgaccaccttcagtgcggcaaagtttgcttccttcatcacacagtactccacgggacaggtcagcgtggagatcgagtgggagctgcagaaggaaaacagcaaacgctggaatcccgaaattcagtacacttccaactacaacaagtctgttaatgtggactttactgtggacactaatggcgtgtattcagagcctcgccccattggcaccagatacctgactcgtaatctgtaa

SEQ ID NO: 3352 - DNA, 2208 bp, synthetic construct
  misc_feature 1..2208: note = source = /note="Description of Artificial Sequence: Synthetic polynucleotide"
  source 1..2208: mol_type = other DNA
atggctgccgatggttatcttccagattggctcgaggacactctctctgaaggaataagacagtggtggaagctcaaacctggcccaccaccaccaaagcccgcagagcggcataaggacgacagcaggggtcttgtgcttcctgggtacaagtacctcggacccttcaacggactcgacaagggagagccggtcaacgaggcagacgccgcggccctcgagcacgacaaagcctacgaccggcagctcgacagcggagacaacccgtacctcaagtacaaccacgccgacgcggagtttcaggagcgccttaaagaagatacgtcttttgggggcaacctcggacgagcagtcttccaggcgaaaaagagggctcttgaacctctgggcctggttgaggaacctgttaagacggctccgggaaaaaagaggccggtagagcactctcctgtggagccagactcctcctcgggaaccggaaaggcgggccagcagcctgcaagaaaaagattgaattttggtcagactggagacgcagactcagtacctgacccccagcctctcggacagccaccagcagccccctctggtctgggaactaatacgatggctacaggcagtggcgcaccaatggcagacaataacgagggcgccgacggagtgggtaattcctcgggaaattggcattgcgattccacatggatgggcgacagagtcatcaccaccagcacccgaacctgggccctgcccacctacaacaaccacctctacaaacaaatttccagccaatcaggagcctcgaacgacaatcactactttggctacagcaccccttgggggtattttgacttcaacagattccactgccacttttcaccacgtgactggcaaagactcatcaacaacaactggggattccgacccaagagactcaacttcaagctctttaacattcaagtcaaagaggtcacgcagaatgacggtacgacgacgattgccaataaccttaccagcacggttcaggtgtttactgactcggagtaccagctcccgtacgtcctcggctcggcgcatcaaggatgcctcccgccgttcccagcagacgtcttcatggtgccacagtatggatacctcaccctgaacaacgggagtcaggcagtaggacgctcttcattttactgcctggagtactttccttctcagatgctgcgtaccggaaacaactttaccttcagctacacttttgaggacgttcctttccacagcagctacgctcacagccagagtctggaccgtctcatgaatcctctcatcgaccagtacctgtattacttgagcagaacaaacactccaagtggaaccaccacgcagtcaaggcttcagttttctcaggccggagcgagtgacattcgggaccagtctaggaactggcttcctggaccctgttaccgccagcagcgagtatcaaagacatctgcggataacaacaacagtgaatactcgtggactggagctaccaagtaccacctcaatggcagagactctctggtgaatccgggcccggccatggcaagccacaaggacgatgaagaaaagttttttcctcagagcggggttctcatctttgggaagcaaggctcagaggaaacaaatgtggacattgaaaaggtcatgattacagacgaagaggaaatcaggacaaccaatcccgtggctacggagcagtatggttctgtatctaccaacctccagagaggcaacagacaagcagctaccgcagatgtcaacacacaaggcgttcttccaggcatggtctggcaggacagagatgtgtaccttcaggggcccatctgggcaaagattccacacacggacggacattttcacccctctcccctcatgggtggattcggacttaaacaccctcctccacagattctcatcaagaacaccccggtacctgcgaatccttcgaccaccttcagtgcggcaaagtttgcttccttcatcacacagtactccacgggacaggtcagcgtggagatcgagtgggagctgcagaaggaaaacagcaaacgctggaatcccgaaattcagtacacttccaactacaacaagtctgttaatgtggactttactgtggacactaatggcgtgtattcagagcctcgccccattggcaccagatacctgactcgtaatctgtaa

SEQ ID NO: 3353 - DNA, 2208 bp, synthetic construct
  misc_feature 1..2208: note = source = /note="Description of Artificial Sequence: Synthetic polynucleotide"
  source 1..2208: mol_type = other DNA
atggctgccgatggttatcttccagattggctcgaggacaccctctctgaaggaataagacagtggtggaagctcaaacctggcccaccaccaccgaagcccgcagagcggcataaggacgacagcaggggtcttgtgcttcctgggtacaagtacctcggacccttcaacggactcgacaagggagagccggccaacgaggcagacgccgcggccctcgagcacgacaaagcctacgaccggcagctcgacagcggagacaacccgtacctcaagtacaaccacgccgacgcggagtttcaggagcgccttaaagaagatacgtcttttgggggcaacctcggacgagcagtcttccaggcgaaaaagagggttcttgaacctctgggcctggttgaggaacctgttaagacggctccgggaaaaaagaggccggtagagcactctcctgtggagccagactcctcctcgggaaccggaaaggcgggccagcagcctgcaagaaaaagattgaattttggtcagactggagacgcagactcagtacctgacccccagcctctcggacagccaccagcagccccctctggtctgggaactaatacgatggctacaggcagtggcgcaccaatggcagacaataacgagggcgccgacggagtgggtaattcctcgggaaattggcattgcgattccacatggatgggcgacagagtcatcaccaccagcacccgaacctgggccctgcccacctacaacaaccacctctacaaacaaatttccagccaatcaggagcctcgaacgacaatcactactttggctacagcaccccttgggggtattttgacttcaacagattccactgccacttttcaccacgtgactggcaaagactcatcaacaacaactggggattccgacccaagagactcaacttcaagctctttaacattcaagtcaaagaggtcacgcagaatgacggtacgacgacgattgccaataaccttaccagcacggttcaggtgtttactgactcggagtaccagctcccgtacgtcctcggctcggcgcatcaaggatgcctcccgccgttcccagcagacgtcttcatggtgccacagtatggatacctcaccctgaacaacgggagtcaggcagtaggacgctcttcattttactgcctggagtactttccttctcagatgctgcgtaccggaaacaactttaccttcagctacacttttgaggacgttcctttccacagcagctacgctcacagccagagtctggaccgtctcatgaatcctctcatcgaccagtacctgtattacttgagcagaacaaacactccaagtggaaccaccacgcagtcaaggcttcagttttctcaggccggagcgagtgacattcgggaccagtctaggaactggcttcctggaccctgttaccgccagcagcgagtatcaaagacatctgcggataacaacaacagtgaatactcgtggactggagctaccaagtaccacctcaatggcagagactctctggtgaatccgggcccggccatggcaagccacaaggacgatgaagaaaagttttttcctcagagcggggttctcatctttgggaagcaaggctcagagaaaacaaatgtggacattgaaaaggtcatgattacagacgaagaggaaatcaggacaaccaatcccgtggctacggagcagtatggttctgtatctaccaacctccagagaggcaacagacaagcagctaccgcagatgtcaacacacaaggcgttcttccaggcacggtctggcaggacagagatgtgtaccttcaggggcccatctgggcaaagattccacacacggacggacattttcacccctctcccctcatgggtggattcggacttaaacaccctcctccacagattctcatcaagaacaccccggtacctgcgaatccttcgaccaccttcagtgcggcaaagtttgcttccttcatcacacagtactccacgggacaggtcagcgtggagatcgagtgggagctgcagaaggaaaacagcaaacgctggaatcccgaaattcagtacacttccaactacaacaagtctgttaatgtggactttactgtggacactaatggcgtgtattcagagcctcgccccattggcaccagatacctgactcgtaatctgtaa

SEQ ID NO: 3354 - DNA, 2208 bp, synthetic construct
  misc_feature 1..2208: note = source = /note="Description of Artificial Sequence: Synthetic polynucleotide"
  source 1..2208: mol_type = other DNA
atggctgccgatggttatcttccagattggctcgaggacactctctctgaaggaataagacagtggtggaagctcaaacctggcccaccaccaccaaagcccgcagagcggcataaggacgacagcaggggtcttgtgcttcctgggtacaagtacctcggacccttcaacggactcgacaagggagagccggtcaacgaggcagacgccgcggccctcgagcacgacaaagcctacgaccggcagctcgacagcggagacaacccgtacctcaagtacaaccacgccgacgcggagtttcaggagcgccttaaagaagatacgtcttttgggggcaacctcggacgagcagtcttccaggcgaaaaagagggttcttgaacctctgggcctggttgaggaacctgttaagacggctccgggaaaaaagaggccggtagagcactctcctgtggagccagactcctcctcgggaaccggaaaggcgggccagcagcctgcaagaaaaagattgaattttggtcagactggagacgcagactcagtacctgacccccagcctctcggacagccaccagcagccccctctggtctgggaactaatacgatggctacaggcagtggcgcaccaatggcagacaataacgagggcgccgacggagtgggtaattcctcgggaaattggcattgcgattccacatggatgggcgacagagtcatcaccaccagcacccgaacctgggccctgcccacctacaacaaccacctctacaaacaaatttccagccaatcaggagcctcgaacgacaatcactactttggctacagcaccccttgggggtattttgacttcaacagattccactgccacttttcaccacgtgactggcaaagactcatcaacaacaactggggattccgacccaagagactcaacttcaagctctttaacattcaagtcaaagaggtcacgcagaatgacggtacgacgacgattgccaataaccttaccagcacggttcaggtgtttactgactcggagtaccagctcccgtacgtcctcggctcggcgcatcaaggatgcctcccgccgttcccagcagacgtcttcatggtgccacagtatggatacctcaccctgaacaacgggagtcaggcagtaggacgctcttcattttactgcctggagtactttccttctcagatgctgcgtaccggaaacaactttaccttcagctacacttttgaggacgttcctttccacagcagctacgctcacagccagagtctggaccgtctcatgaatcctctcatcgaccagtacctgtattacttgagcagaacaaacactccaagtggaaccaccacgcagtcaaggcttcagttttctcaggccggagcgagtgacattcgggaccagtctaggaactggcttcctggaccctgttaccgccagcagcgagtatcaaagacatctgcggataacaacaacagtgaatactcgtggactggagctaccaagtaccacctcaatggcagagactctctggtgaatccgggcccggccatggcaagccacaaggacgatgaagaaaagttttttcctcagagcggggttctcatctttgggaagcaaggctcagagaaaacaaatgtggacattgaaaaggtcatggttacagacgaagaggaaatcaggacaaccaatcccgtggctacggagcagtatggttctgtatctaccaacctccagagaggcaacagacaagcagctaccgcagatgtcaacacacaaggcgttcttccaggcacggtctggcaggacagagatgtgtaccttcaggggcccatctgggcaaagattccacacacggacggacattttcacccctctcccctcatgggtggattcggacttaaacaccctcctccacagattctcatcaagaacaccccggtacctgcgaatccttcgaccaccttcagtgcggcaaagtttgcttccttcatcacacagtactccacgggacaggtcagcgtggagatcgagtgggagctgcagaaggaaaacagcaaacgctggaatcccgaaattcagtacacttccaactacaacaagtctgttaatgtggactttactgtggacactaatggcgtgtattcagagcctcgccccattggcaccagatacctgactcgtaatctgtaa

SEQ ID NO: 3355 - DNA, 2208 bp, synthetic construct
  misc_feature 1..2208: note = source = /note="Description of Artificial Sequence: Synthetic polynucleotide"
  source 1..2208: mol_type = other DNA
atggctgccgatggttatcttccagattggctcgaggacactctctctgaaggaataagacagtggtggaagctcaaacctggcccaccaccaccaaagcccgcagagcggcataaggacgacagcaggggtcttgtgcttcctgggtacaagtacctcggacccttcaacggactcgacaagggagagccggtcaacgaggcagacgccgcggccctcgagcacgacaaagcctacgaccggcagctcgacagcggagacaacccgtacctcaagtacaaccacgccgacgcggagtttcaggagcgccttaaagaagatacgtcttttgggggcaacctcggacgagcagtcttccaggcgaaaaagagggttcttgaacctctgggcctggttgaggaacctgttaagacggctccgggaaaaaagaggccggtagagcactctcctgtggagccagactcctcctcgggaaccggaaaggcgggccagcagcctgcaagaaaaagattgaattttggtcagactggagacgcagactcagtacctgacccccagcctctcggacagccaccagcagccccctctggtctgggaactaatacgatggctacaggcagtggcgcaccaatggcagacaataacgagggcgccgacggagtgggtaattcctcgggaaattggcattgcgattccacatggatgggcgacagagtcatcaccaccagcacccgaacctgggccctgcccacctacaacaaccacctctacaaacaaatttccagccaatcaggagcctcgaacgacaatcactactttggctacagcaccccttgggggtattttgacttcaacagattccactgccacttttcaccacgtgactggcaaagactcatcaacaacaactggggattccgacccaagagactcaacttcaagctctttaacattcaagtcaaagaggtcacgcagaatgacggtacgacgacgattgccaataaccttaccagcacggttcaggtgtttactgactcggagtaccagctcccgtacgtcctcggctcggcgcatcaaggatgcctcccgccgttcccagcagacgtcttcatggcgccacagtatggatacctcaccctgaacaacgggagtcaggcagtaggacgctcttcattttactgcctggagtactttccttctcagatgctgcgtaccggaaacaactttaccttcagctacacttttgaggacgttcctttccacagcagctacgctcacagccagagtctggaccgtctcatgaatcctctcatcgaccagtacctgtattacttgagcagaacaaacactccaagtggaaccaccacgcagtcaaggcttcagttttctcaggccggagcgagtgacattcgggaccagtctaggaactggcttcctggaccctgttaccgccagcagcgagtatcaaagacatctgcggataacaacaacagtgaatactcgtggactggagctaccaagtaccacctcaatggcagagactctctggtgaatccgggcccggccatggcaagccacaaggacgatgaagaaaagttttttcctcagagcggggttctcatctttgggaagcaaggctcagagaaaacaaatgtggacattgaaaaggtcatgattacagacgaagaggaaatcaggacaaccaatcccgtggctacggagcagtatggttctgtatctaccaacctccagagaggcaacagacaagcagctaccgcagatgtcaacacacaaggcgttcttccaggcacggtctggcaggacagagatgtgtaccttcaggggcccatctgggcaaagattccacacacggacggacattttcacccctctcccctcatgggtggattcggacttaaacaccctcctccacagattctcatcaagaacaccccggtacctgcgaatccttcgaccaccttcagtgcggcaaagtttgcttccttcatcacacagtactccacgggacaggtcagcgtggagatcgagtgggagctgcagaaggaaaacagcaaacgctggaatcccgaaattcagtacacttccaactacaacaagtctgttaatgtggactttactgtggacactaatggcgtgtattcagagcctcgccccattggcaccagatacctgactcgtaatctgtaa

SEQ ID NO: 3356 - DNA, 2208 bp, synthetic construct
  misc_feature 1..2208: note = source = /note="Description of Artificial Sequence: Synthetic polynucleotide"
  source 1..2208: mol_type = other DNA
atggctgccgatggttatcttccagattggctcgaggacactctctctgaaggaataagacagtggtggaagctcaaacctggcccaccaccaccaaagcccgcagagcggcataaggacgacagcaggggtcttgtgcttcctgggtacaagtacctcggacccttcaacggactcgacaagggagagccggtcaacgaggcagacgccgcggccctcgagcacgacaaagcctacgaccggcagctcgacagcggagacaacccgtacctcaagtacaaccacgccgacgcggagtttcaggagcgccttaaagaagatacgtcttttgggggcaacctcggacgagcagtcttccaggcgaaaaagagggttcttgaacctctgggcctggttgaggaacctgttaagacggctccgggaaaaaagaggccggtagagcactctcctgtggagccagactcctcctcgggaaccggaaagacgggccagcagcctgcaagaaaaagattgaattttggtcagactggagacgcagactcagtacctgacccccagcctctcggacagccaccagcagccccctctggtctgggaactaatacgatggctacaggcagtggcgcaccaatggcagacaataacgagggcgccgacggagtgggtaattcctcgggaaattggcattgcgattccacatggatgggcgacagagtcatcaccaccagcacccgaacctgggccctgcccacctacaacaaccacctctacaaacaaatttccagccaatcaggagcctcgaacgacaatcactactttggctacagcaccccttgggggtattttgacttcaacagattccactgccacttttcaccacgtgactggcaaagactcatcaacaacaactggggattccgacccaagagactcaacttcaagctctttaacattcaagtcaaagaggtcacgcagaatgacggtacgacgacgattgccaataaccttaccagcacggttcaggtgtttactgactcggagtaccagctcccgtacgtcctcggctcggcgcatcaaggatgcctcccgccgttcccagcagacgtcttcatggtgccacagtatggatacctcaccctgaacaacgggagtcaggcagtaggacgctcttcattttactgcctggagtactttccttctcagatgctgcgtaccggaaacaactttaccttcagctacacttttgaggacgttcctttccacagcagctacgctcacagccagagtctggaccgtctcatgaatcctctcatcgaccagtacctgtattacttgagcagaacaaacactccaagtggaaccaccacgcagtcaaggcttcagttttctcaggccggagcgagtgacattcgggaccagtctaggaactggcttcctggaccctgttaccgccagcagcgagtatcaaagacatctgcggataacaacaacagtgaatactcgtggactggagctaccaagtaccacctcaatggcagagactctctggtgaatccgggcccggccatggcaagccacaaggacgatgaagaaaagttttttcctcagagcggggttctcatctttgggaagcaaggctcagagaaaacaaatgtggacattgaaaaggtcatgattacagacgaagaggaaatcaggacaaccaatcccgtggctacggagcagtatggttctgtatctaccaacctccagagaggcaacagacaagcagctaccgcagatgtcaacacacaaggcgttcttccaggcatggtctggcaggacagagatgtgtaccttcaggggcccatctgggcaaagattccacacacggacggacattttcacccctctcccctcatgggtggattcggacttaaacaccctcctccacagattctcatcaagaacaccccggtatctgcgaatccttcgaccaccttcagtgcggcaaagtttgcttccttcatcacacagtactccacgggacaggtcagcgtggagatcgagtgggagctgcagaaggaaaacagcaaacgctgggatcccgaaattcagtacacttccaactacaacaagtctgttaatgtggactttactgtggacactaatggcgtgtattcagagcctcgccccattggcaccagatacctgactcgtaatctgtaa

SEQ ID NO: 3357 - DNA, 2205 bp, synthetic construct
  misc_feature 1..2205: note = source = /note="Description of Artificial Sequence: Synthetic polynucleotide"
  source 1..2205: mol_type = other DNA
atggctgccgatggttatcttccagattggctcgaggacactctctctgaaggaataagacagtggtggaagctcaaacctggcccaccaccaccaaagcccgcagagcggcataaggacgacagcaggggtcttgtgcttcctgggtacaagtacctcggacccttcaacggactcgacaagggagagccggtcaacgaggcagacgccgcggccctcgagcacgacaaagcctacgaccggcagctcgacagcggagacaacccgtacctcaagtacaaccacgccgacgcggagtttcaggagcgccttaaagaagatacgtcttttgggggcaacctcggacgagcagtcttccaggcgaaaaagagggttcttgaacctctgggcctggttgaggaacctgttaagacggctccgggaaaaaagaggccggtagagcactctcctgtggagccagactcctcctcgggaaccggaaaggcgggccagcagcctgcaagaaaaagattgaattttggtcagactggagacgcagactcagtacctgacccccagcctctcggacagccaccagcagccccctctggtctgggaactaatacgatggctacaggcagtggcgcaccaatggcagacaataacgagggcgccgacggagtgggtaattcctcgggaaattggcattgcgattccacatggatgggcgacagagtcatcaccaccagcacccgaacctgggccctgcccacctacaacaaccacctctacaaacaaatttccagccaatcaggagcctcgaacgacaatcactactttggctacagcaccccttgggggtattttgacttcaacagattccactgccacttttcaccacgtgactggcaaagactcatcaacaactggggattccgacccaagagactcaacttcaagctctttaacattcaagtcaaagaggtcacgcagaatgacggtacgacgacgattgccaataaccttaccagcacggttcaggtgtttactgactcggagtaccagctcccgtacgtcctcggctcggcgcatcaaggatgcctcccgccgttcccagcagacgtcttcatggtgccacagtatggatacctcaccctgaacaacgggagtcaggcagtaggacgctcttcattttactgcctggagtactttccttctcagatgctgcgtaccggaaacaactttaccttcagctacacttttgaggacgttcctttccacagcagctacgctcacagccagagtctggaccgtctcatgaatcctctcatcgaccagtacctgtattacttgagcagaacaaacactccaagtggaaccaccacgcagtcaaggcttcagttttctcaggccggagcgagtgacattcgggaccagtctaggaactggcttcctggaccctgttaccgccagcagcgagtatcaaagacatctgcggataacaacaacagtgaatactcgtggactggagctaccaagtaccacctcaatggcagagactctctggtgaatccgggcccggccatggcaagccacaaggacgatgaagaaaagttttttcctcagagcggggttctcatctttgggaagcaaggctcagagaaaacaaatgtggacattgaaaaggtcatgattacagacgaagaggaaatcaggacaaccaatcccgtggctacggagcagtatggttctgtatctaccaacctccagagaggcaacagacaagcagctaccgcagatgtcaacacacaaggcgttcttccaggcacggtctggcaggacagagatgtgtaccttcaggggcccatctgggcaaagattccacacacggacggacattttcacccctctcccctcatgggtggattcggacttaaacaccctcctccacagattctcatcaagaacaccccggtacctgcgaatccttcgaccaccttcagtgcggcaaagtttgcttccttcatcacacagtactccacgggacaggtcagcgtggagatcgagtgggagctgcagaaggaaaacagcaaacgctggaatcccgaaattcagtacacttccaactacaacaagtctgttaatgtggactttactgtggacactaatggcgtgtattcagagcctcgccccattggcaccagatacctgactcgtaatctgtaa

SEQ ID NO: 3358 - DNA, 2208 bp, synthetic construct
  misc_feature 1..2208: note = source = /note="Description of Artificial Sequence: Synthetic polynucleotide"
  source 1..2208: mol_type = other DNA
atggctgccgatggttatcttccagattggctcgaggacactctctctgaaggaataagacagtggtggaagctcaaacctggcccaccaccaccaaagcccgcagagcggcataaggacgacagcaggggtcttgtgcttcctgggtacaagtacctcggacccttcaacggactcgacaagggagagccggtcaacgaggcagacgccgcggccctcgagcacgacaaagcctacgaccggcagctcgacagcggagacaacccgtacctcaagtacaaccacgccgacgcggagtttcaggagcgccttaaagaagatacgtcttttgggggcaacctcggacgagcagtcttccaggcgaaaaagagggttcttgaacctctgggcctggttgaggaacctgttaagacggctccgggaaaaaagaggccggtagagcactctcctgtggagccagactcctcctcgggaaccggaaaggcgggccagcagcctgcaagaaaaagattgaattttggtcagactggagacgcagactcagtacctgacccccagcctctcggacagccaccagcagccccctctggtctgggaactaatacgatggctacaggcagtggcgcaccaatggcagacaataacgagggcgccgacggagtgggtaattcctcgggaaattggcattgcgattccacatggatgggcgacagagtcatcaccaccagcacccgaacctgggccctgcccacctacaacaaccacctctacaaacaaatttccagccaatcaggagcctcgaacgacaatcactactttggctacagcaccccttgggggtattttgacttcaacagattccactgccacttttcaccacgtgactggcaaagactcatcaacaacaactggggattccgacccaagagactcaacttcaagctctttaacattcaagtcaaagaggtcacgcagaatgacggtacgacgacgattgccaataaccttaccagcacggttcaggtgtttactgactcggagtaccagctcccgtacgtcctcggctcggcgcatcaaggatgcctcccgccgttcccagcagacgtcttcatggtgccacagtatggatacctcaccctgaacaacgggagtcaggcagtaggacgctcttcattttactgcctggagtactttccttctcagatgctgcgtaccggaaacaactttaccttcagctacacttttgaggacgttcctttccacagcagctacgctcacagccagagtctggaccgtctcatgaatcctctcatcgaccagtacctgtattacttgagcagaacaaacactccaagtggaaccaccacgcagtcaaggcttcagttttctcaggccggagcgagtgacattcgggaccagtctaggaactggcttcctggaccctgttaccgccagcagcgagtatcaaagacatctgcggataacaacaacagtgaatactcgtggactggagctaccaagtaccacctcaatggcagagactctctggtgaatccgggcccggccatggcaagccacaaggacgatgaagaaaagttttttcctcagagcggggttctcatctttgggaagcaaggctcagagaaaacaaatgtggacattgaaaaggtcatgattacagacgaagaggaaatcaggacaaccaatcccgtggctacggagcagtatggttctgtatctaccaacctccagagaggcaacagacaagcagctaccgcagatgtcaacacacaaggcgttcttccaggcacggtctggcaggacagagatgtgtaccttcaggggcccatctgggcaaagattccacacacggacggacattttcacccctctcccctcatgggtggattcggacttaaacaccctcctccacagattctcatcaagaacaccccggtacctgcgaatccttcgaccaccttcagtgcggcaaagtttgcttccttcatcacacagtactccacgggacaggtcagcgtggagatcgagtgggagctgcagaaggaaaacggcaaacgctggaatcccgaaattcagtacacttccaactacaacaagtctgttaatgtggactttactgtggacactaatggcgtgtattcagagcctcgccccattggcaccagatacctgactcgtaatctgtaa

SEQ ID NO: 3359 - DNA, 2208 bp, synthetic construct
  misc_feature 1..2208: note = source = /note="Description of Artificial Sequence: Synthetic polynucleotide"
  source 1..2208: mol_type = other DNA
atggctgccgatggttatcttccagattggctcgaggacactctctctgaaggaataagacagtggtggaagctcaaacctggcccaccaccaccaaagcccgcagagcggcataaggacgacagcaggggtcttgtgcttcctgggtacaagtacctcggacccttcaacggactcgacaagggagagccggtcaacgaggcagacgccgcggccctcgagcacgacaaagcctacgaccggcagctcgacagcggagacaacccgtacctcaagtacaaccacgccgacgcggagtttcaggagcgccctaaagaagatacgtcttttgggggcaacctcggacgagcagtcttccaggcgaaaaagagggttcttgaacctctgggcctggttgaggaacctgttaagacggctccgggaaaaaagaggccggtagagcactctcctgtggagccagactcctcctcgggaaccggaaaggcgggccagcagcctgcaagaaaaagattgaattttggtcagactggagacgcagactcagtacctgacccccagcctctcggacagccaccagcagccccctctggtctgggaactaatacgatggctacaggcagtggcgcaccaatggcagacaataacgagggcgccgacggagtgggtaattcctcgggaaattggcattgcgattccacatggatgggcgacagagtcatcaccaccagcacccgaacctgggccctgcccacctacaacaaccacctctacaaacaaatttccagccaatcaggagcctcgaacgacaatcactactttggctacagcaccccttgggggtattttgacttcaacagattccactgccacttttcaccacgtgactggcaaagactcatcaacaacaactggggattccgacccaagagactcaacttcaagctctttaacattcaagtcaaagaggtcacgcagaatgacggtacgacgacgattgccaataaccttaccagcacggttcaggtgtttactgactcggagtaccagctcccgtacgtcctcggctcggcgcatcaaggatgcctcccgccgttcccagcagacgtcttcatggtgccacagtatggatacctcaccctgaacaacgggagtcaggcagtaggacgctcttcattttactgcctggagtactttccttctcagatgctgcgtaccggaaacaactttaccttcagctacacttttgaggacgttcctttccacagcagctacgctcacagccagagtctggaccgtctcatgaatcctctcatcgaccagtacctgtattacttgagcagaacaaacactccaagtggaaccaccacgcagtcaaggcttcagttttctcaggccggagcgagtgacattcgggaccagtctaggaactggcttcctggaccctgttaccgccagcagcgagtatcaaagacatctgcggataacaacaacagtgaatacttgtggactggagctaccaagtaccacctcaatggcagagactctctggtgaatccgggcccggccatggcaagccacaaggacgatgaagaaaagttttttcctcagagcggggttctcatctttgggaagcaaggctcagagaaaacaaatgtggacattgaaaaggtcatgattacagacgaagaggaaatcaggacaaccaatcccgtggctacggagcagtatggttctgtatctaccaacctccagagaggcaacaggcaagcagctaccgcagatgtcaacacacaaggcgttcttccaggcacggtctggcaggacagagatgtgtaccttcaggggcccatctgggcaaagattccacacacggacggacattttcacccctctcccctcatgggtggattcggacttaaacaccctcctccacagattctcatcaagaacaccccggtacctgcgaatccttcgaccaccttcagtgcggcaaagtttgcttccttcatcacacagtactccacgggacaggtcagcgtggagatcgagtgggagctgcagaaggaaaacagcaaacgctggaatcccgaaattcagtacacttccaactacaacaagtctgttaatgtggactttactgtggacactaatggcgtgtattcagagcctcgccccattggcaccagatacctgactcgtaatctgtaa

SEQ ID NO: 3360 - DNA, 2208 bp, synthetic construct
  misc_feature 1..2208: note = source = /note="Description of Artificial Sequence: Synthetic polynucleotide"
  source 1..2208: mol_type = other DNA
atggctgccgatggttatcttccagattggctcgaggacactctctctgaaggaataagacagtggtggaagctcaaacctggcccaccaccaccaaagcccgcagagcggcataaggacgacagcaggggtcttgtgcttcctgggtacaagtacctcggacccttcaacggactcgacaagggagagccggtcaacgaggcagacgccgcggccctcgagcacgacaaagcctacgaccggcagctcgacagcggagacaacccgtacctcaagtacaaccacgccgacgcggagtttcaggagcgccttaaagaagatacgtcttttgggggcaacctcggacgagcagtcttccaggcgaaaaagagggctcttgaacctctgggcctggttgaggaacctgttaagacggctccgggaaaaaagaggccggtagagcactctcctgtggagccagactcctcctcgggaaccggaaaggcgggccagcagcctgcaagaaaaagattggattttggtcagactggagacgcagactcagtacctgacccccagcctctcggacagccaccagcagccccctctggtctgggaactaatacgatggctacaggcagtggcgcaccaatggcagacaataacgagggcgccgacggagtgggtaattcctcgggaaattggcattgcgattccacatggatgggcgacagagtcatcaccaccagcacccggacctgggccctgcccacctacaacaaccacctctacaaacaaatttccagccaatcaggagcctcgaacgacaatcactactttggctacagcaccccttgggggtattttgacttcaacagattccactgccacttttcaccacgtgactggcaaagactcatcaacaacaactggggattccgacccaagagactcaacttcaagctctttaacattcaagtcaaagaggtcacgcagaatgacggtacgacgacgattgccaataaccttaccagcacggttcaggtgtttactgactcggagtaccagctcccgtacgtcctcggctcggcgcatcaaggatgcctcccgccgttcccagcagacgtcttcatggtgccacagtatggatacctcaccctgaacaacgggagtcaggcagtaggacgctcttcattttactgcctggagtactttccttctcagatgctgcgtaccggaaacaactttaccttcagctacacttttgaggacgttcctttccacagcagctacgctcacagccagagtctggaccgtctcatgaatcctctcatcgaccagtacctgtattacttgagcagaacaaacactccaagtggaaccaccacgcagtcaaggcttcagttttctcaggccggagcgagtgacattcgggaccagtctaggaactggcttcctggaccctgttaccgccagcagcgagtatcaaagacatctgcggataacaacaacagtgaatactcgtggactggagctaccaagtaccacctcaatggcagagactctctggtgaatccgggcccggccatggcaagccacaaggacgatgaagaaaagttttttcctcagagcggggttctcatctttgggaagcaaggctcagagaaaacaaatgtggacattgaaaaggtcatgattacagacgaagaggaaatcaggacaaccaatcccgtggctacggagcagtatggttctgtatctaccaacctccagagaggcaacagacaagcagctaccgcagatgtcaacacacaaggcgttcttccaggcatggtctggcaggacagagatgtgtaccttcaggggcccatctgggcaaagattccacacacggacggacattttcacccctctcccctcatgggtggattcggacttaaacaccctcctccacagattctcatcaagaacaccccggtacctgcgaatccttcgaccaccttcagtgcggcaaagtttgcttccttcatcacacagtactccacgggacaggtcagcgtggagatcgagtgggagctgcagaaggaaaacagcaaacgctggaatcccgaaattcagtacacttccaactacaacaagtctgttaatgtggactttactgtggacactaatggcgtgtattcagagcctcgccccattggcaccagatacctgactcgtaatctgtaa

SEQ ID NO: 3361 - DNA, 2208 bp, synthetic construct
  misc_feature 1..2208: note = source = /note="Description of Artificial Sequence: Synthetic polynucleotide"
  source 1..2208: mol_type = other DNA
atggctgccgatggttatcttccagattggctcgaggacactctctctgaaggaataagacagtggtggaagctcaaacctggcccaccaccgccaaagcccgcagagcggcataaggacgacagcaggggtcttgtgcttcctgggtacaagtacctcggacccttcaacggactcgacaagggagagccggtcaacgaggcagacgccgcggccctcgagcacgacaaggcctacgaccggcagctcgacagcggagacaacccgtacctcaagtacaaccacgccgacgcggagtttcaggagcgccttaaagaagatacgtcttttgggggcaacctcgcaagagcagtattccaggcgaaaaagagggttcttgaacctctgggcctggttgaggagcctgttaagacggctccgggaaaaaagaggccggtagagcattctcctgcggagccagactcctcctcgggaaccggaaaagcgggccagcagcctgcgagaaagagattgaatttcggtcagactggagacgcagactccgtacctgacccccagcctctcggacagccaccagcagccccctctggtctgggaactaatacgatggctacaggcagtggcgcaccaatggcagacaataacgagggtgccgacggagtgggtaattcctcaggaaattggcattgcgattccacatggatgggcgacagagtcatcaccaccagcacccgcacctgggctctgcccacctacaacaaccatctgtacaagcagatctccagccaatctggagccagcaacgacaaccactactttggctacagcaccccttgggggtattttgacttcaacagattccactgccacttctccccacgtgactggcaaagactcatcaacaacaactggggattccggcccaagagactcagcttcaagctctttaacattcaagtcaaggaggtcacgcagaatgacggtacgacgacgattgccaataaccttaccagcacggttcaggtctttactgactcggagtaccagctcccgtacgtcctcggctcggcgcatcaaggatgcctcccgccgttcccagcagacgtcttcatggtgccacagtatggatacctcaccctgaacaacgggagtcaggcggtaggacgctcttcattttactgcctggagtacttcccttctcagatgcttcgcacgggaaacaactttaccttcagctacacctttgaggacgtgccttttcacagcagctacgctcacagccaaagtctggaccgtctcatgaatcctctcatcgaccagtacctgtattacttgagcaaaacaaacgctccaagcggaaccaccacgatgtccaggcttcagttttctcaggccggagcaagtgacattcgggaccagtctagaaactggcttcctggaccctgttaccgccagcagcgagtatcaaagacagctgcggacaacaacaacagtgattactcgtggactggagctaccaagtaccacctcaatggaagagactctctggtgaacccgggcccagctatggccagccacaaggacgatgaagaaaaatattttcctcagagcggggttctcatcttcgggaaacaaggctcaaataaaactaatgtggacattgaaaaggttatgattacagacgaagaggaaatcaggaccaccaatcccgtggctacggagcagtatggttctgtatctaccaaccttcaaagcggcaacacacaagcagctacctcagatgtcaacacacaaggcgttcttcctggcatggtctggcaggacagagatgtgtacctgcaggggcccatctgggcaaagattccacacacggatggacactttcacccttctcctcttatgggaggatttggactgaagcaccctcctccgcagattctcatcaagaataccccggtacctgcgaatccttcgaccaccttcagtgcggcaaagtttgcttctttcatcacacagtactccacggggcaggtcagcgtggagatcgagtgggagctgcagaaggagaacagcaaacgctggaaccccgagatccagtatacttccaactacaacaaatctgttaatgtggactttactgtggacactaatggtgtgtattcagagcctcgccccattggcaccagatacctgactcgtaatctgtaa

SEQ ID NO: 3362 - DNA, 2208 bp, synthetic construct
  misc_feature 1..2208: note = source = /note="Description of Artificial Sequence: Synthetic polynucleotide"
  source 1..2208: mol_type = other DNA
atggctgccgatggttatcttccagattggctcgaggacactctctctgaaggaataagacagtggtggaagctcaaacctggcccaccaccaccaaagcccgcagagcggcataaggacgacagcaggggtcttgtgcttcctgggtacaagtacctcggacccttcaacggactcgacaagggagagccggtcaacgaggcagacgccgcggccctcgagcacgacaaagcctacgaccggcagctcgacagcggagacaacccgtacctcaagtacaaccacgccgacgcggagtttcaggagcgccttaaagaagatacgtcttttgggggcaacctcggacgagcagtcttccaggcgaaaaagagggttcttgaacctctgggcctggttgaggaacctgttaagacggctccgggaaaaaagaggccggtagagcactctcctgtggagccagactcctcctcgggaaccggaaaggcgggccagcagcctgcaagaaaaagattgaattttggtcagactggagacgcagactcagtacctgacccccagcctctcggacagccaccagcagccccctctggtctgggaactaatacgatggctacaggcagtggcgcaccaatggcagacaataacgagggcgccgacggagtgggtaattcctcgggaaattggcattgcgattccacatggatgggcgacagagtcatcaccaccagcacccgaacctgggccctgcccacctacaacaaccacctctacaaacaaatttccagccaatcaggagcctcgaacgacaatcactactttggctacagcaccccttgggggtattttgacttcaacagattccactgccacttttcaccacgtgactggcaaagactcatcaacaacaactggggattccgacccaagagactcaacttcaagctctttaacattcaagtcaaagaggtcacgcagaatgacggtacgacgacgattgccaataaccttaccagcacggttcaggtgtttactgactcggagtaccagctcccgtacgtcctcggctcggcgcatcaaggatgcctcccgccgttcccagcagacgtctccatggtgccacagtatggatacctcaccctgaacaacgggagtcaggcagtaggacgctcttcattttactgcctggagtactttccttctcagatgctgcgtaccggaaacaactttaccttcagctacacttttgaggacgttcctttccacagcagctacgctcacagccagagtctggaccgtctcatgaatcctctcatcgaccagtacctgtattacttgagcagaacaaacactccaagtggaaccaccacgcagtcaaggcttcagttttctcaggccggagcgagtgacattcgggaccagtctaggaactggcttcctggaccctgttaccgccagcagcgagtatcaaagacatctgcggataacaacaacagtgaatactcgtggactggagctaccaagtaccacctcaatggcagagactctctggtgaatccgggcccggccatggcaagccacaaggacgatgaagaaaagttttttcctcagagcggggttctcatctttgggaagcaaggctcagagaaaacaaatgtggacattgaaaaggtcatgattacagacgaagaggaaatcaggacaaccaatcccgtggctacggagcagtatggttctgtatctaccaacctccagagaggcaacagacaagcagctaccgcagatgtcaacacacaaggcgttcttccaggcacggtctggcaggacagagatgtgtaccttcaggggcccatctgggcaaagattccacacacggacggacattttcacccctctcccctcatgggtggattcggacttaaacaccctcctccacagattctcatcaagaacaccccggtacctgcgaatccttcgaccaccttcagtgcggcaaagtttgcttccttcatcacacagtactccacgggacaggtcagcgtggagatcgagtgggagctgcagaaggaaaacagcaaacgctggaatcccgaaattcagtacacttccaactacaacaagtctgttaatgtggactttactgtggacactaatggcgtgtattcagagcctcgccccattggcaccagatacctgactcgtaatctgtaa

SEQ ID NO: 3363 - DNA, 2208 bp, synthetic construct
  misc_feature 1..2208: note = source = /note="Description of Artificial Sequence: Synthetic polynucleotide"
  source 1..2208: mol_type = other DNA
atggctgccgatggttatcttccagattggctcgaggacactctctctgaaggaataagacagtggtggaagctcaaacctggcccaccaccgccaaagcccgcagagcggcataaggacgacagcaggggtcttacgcttcctgggtacaagtacctcggacccttcaacggactcgacaaaggagagccggtcaacgaggcagacgccgcggccctcgagcacgacaaggcctacgaccggcagctcgacagcggagacaacccgtacctcaagtacaaccacgccgacgcggagtttcaggagcgccttaaagaagatacgtcttttgggggcaacctcgcaagagcagtattccaggcgaaaaagagggttcttgaacctctgggcctggttgaggagcctgttaagacggctccgggaaaaaagaggccggtagagcactctcctgcggagctagattcctcctccggaactggaaagtcgggccaacagcctgcaagaaagagattgaattttggtcagactggagacgcagactccgtacctgacccccagcctctcggacagccaccagcagccccctctggtctgggaactaatacgatggcttcaggcagtggcgcaccaatggcagacaataacgagggcgccgacggagtgggtaattcctcgggaaattggcattgcgattccacatggatgggcgacagagtcatcaccaccagcacccgcacctgggctctgcccacctacaacaaccatctgtacaagcaaatttccagccagtctggggccagcaacgacaaccactactttggctacagcaccccttgggggtattttgacttcaacagattccactgccacttctccccacgtgactggcaaagactcatcaacaacaattggggattccggcccaaaagactcaacttcaagctctttaacattcaagtcaaggaggtcacgcagaatgacggtacgacgacgattgccaataaccttaccagcacggttcaggtgtttactgactcggagtaccagctcccgtacgtcctcggctcggcgcatcaaggatgcctcccgccgttcccagcagacgtcttcatggtgccacagtatggatacctcaccctgaacaacgggagtcaggcggtaggacgctcttcattttactgcctggagtactttccttctcagatgctgcgtaccggaaacaactttaccttcagctacacctttgaggacgttccttttcacagcagctacgctcatagccagagtttggaccgtctcatgaatcctctcatcgaccagtacctgtattacttgagcagaacaaacactccaagcggaaccactacgcagtccaggcttcagttttctcaagccggagcgagtgacattcgggaccagtctaggaactggcttcctggaccctgttaccgccagcagcgagtatcaaagacagctgcggacaacaacaacagtgattactcgtggactggagctaccaagtatcacctcaatggaagagactctctggtgaatccgggcacagccatggccagccacaaggacgatgaagaaaagtattttcctcagagcggggttctcatcttcggaaaacaagactcgggaaaaactaatgtggacattgaaaaggtcatgattacagacgaagaggaaatcaggaccaccaatcccgtggctacggagcagtatggttctgtatctaccaatctccagagcggcaacacacaagcagctacctcagatgtcaacacacaaggcgttcttccaggcatggtctggcaggacagagacgtgtacctgcagggacccatctgggcaaagattccacacacggacggacattttcacccttctcctcttatgggaggatttggaccgaagcaccctcccccgcagattctcatcaagaataccccggtacctgcgaatccttctaccaccttcagcgcggcaaagtttgcttccttcatcacacagtactccacggggcaggtcagcgtggagatcgagtgggagctgcagaaagagaacagcaaacgctggaaccccgagatccagtatacctccaactacaacaagtctgttaatgtggactttactgtggacactaatggcgtgtattcagagcctcgccccattggcacaagatacctgactcgtaatctgtaa

SEQ ID NO: 3364 - DNA, 2208 bp, synthetic construct
  misc_feature 1..2208: note = source = /note="Description of Artificial Sequence: Synthetic polynucleotide"
  source 1..2208: mol_type = other DNA
atggctgccgatggttatcttccagattggctcgaggacactctctctgaaggaataagacagtggtggaagctcaaacctggcccaccaccgccaaagcccgcagagcggcataaggacgacagcaggggtcttgtgcttcctgggtacaagtacctcggacccttcaacggactcgacaaaggagagccggtcaacgaggcagacgccgcggccctcgagcacgacaaggcctacgaccggcagctcgacagcggagacaacccgtacctcaagtacaaccacgccgacgcggagtttcaggagcgccttaaagaagatacgtcttttgggggcaacctcgcaagagcagtattccaggcgaaaaagagggttcttgaacctctgggcctggttgaggagcctgttaagacggctccgggaaaaaagaggccggtagagcactctcctgcggagccagattcctcctccggaactggagagtcgggccaacagcctgcaagaaagagattgaattttggtcagactggagacgcagactccgtacctgacccccagcctctcggacagccaccagcagccccctctggtctgggaactaatacgatggcttcaggcagtggcgcaccaatggcagacaataacgagggcgccgacggagtgggtaattcctcgggaaattggcattgcgattccacatggatgggcgacagagtcatcaccaccagcacccgcacctgggctctgcccacctacaacaaccatctgtacaagcaaatttccagccagtctggagccagcaacgacaaccactactttggctacagcaccccttgggggtattttgacttcaacagattccactgccacttctccccacgtgactggcaaagactcatcaacaacaattggggattccggcccaaaagactcaacttcaagctctttaacattcaagtcaaggaggtcacgcagaatgacggtacgacgacgattgccaataaccttaccagcacggttcaggtgtttactgactcggagtaccagctcccgtacgtcctcggctcggcgcatcaaggatgcctcccgccgttcccagcagacgtcttcatggtgccacagtatggatacctcaccctgaacaacgggagtcaggcggtaggacgctcttcattttactgcctggagtactttccttctcagatgctgcgtaccggaaacaactttaccttcagctacacctttgaggacgttccttttcacagcagctacgctcacagccagagtttggaccgtcttatgaatcctctcatcgaccagtacctgtattacttgagcagaacaaacactccaagcggaaccactacgcagtccaggcttcagttttctcaagccggagcgagtgacattcgggaccagtctaggaactggcttcctggaccctgttaccgccagcagcgagtatcaaagacagctgcggacaacaacaacagtgattactcgtggactggagctaccaagtatcacctcaatggaagagactctctggtgaatccgggcacagccatggccagccacaaggacgatgaagaaaagtattttcctcagagcggggttctcatcttcggaaaacaagactcgggaaaaactaatgtggacattgaaaaggtcatgattacagacgaagaggaaatcaggaccaccaatcccgtggctacggagcagtatggttctgtatctaccaatctccagagcggcaacacacaagcagctacctcagatgtcaacacacaaggcgttcttccaggcatggtccggcaggacagagacgtgtacctgcagggacccatctgggcaaagattccacacacggacggacattttcacccttctcctcttatgggaggatttggactgaagcaccctcccccgcagattctcatcaagaataccccggtacctgcgaatccttctaccaccttcagcgcggcaaagtttgcttccttcatcacacagtactccacggggcaggtcagcgtggagatcgagtgggagccgcagaaagagaacagcaaacgctggaaccccgagatccagtatacctccaactacaacaagtctgttaatgtggactttactgtggacactaatggcgtgtattcagagcctcgccccattggcacaagatacctgactcgtaatctgtaa

SEQ ID NO: 3365 - DNA, 2208 bp, synthetic construct
  misc_feature 1..2208: note = source = /note="Description of Artificial Sequence: Synthetic polynucleotide"
  source 1..2208: mol_type = other DNA
atggctgccgatggttatcttccagattggctcgaggacactctctctgaaggaataagacagtggtggaagctcaaacctggcccaccaccgccaaagcccgcagagcggcataaggacgacagcaggggtcttgcgcttcctgggtacaagtacctcggacccttcaacggactcgacaaaggagagccggtcaacgaggcagacgccgcggccctcgagcacgacaaggcctacgaccggcagctcgacagcggagacaacccgtacctcaagtacaaccacgccgacgcggagtttcaggagcgccttaaagaagatacgtcttttgggggcaacctcgcaagagcagtattccaggcgaaaaagagggttcttgaacctctgggcctggttgaggagcctgttaagacggctccgggaaaaaagaggccggtagagcactctcctgcggagctagattcctcctccggaactggaaagtcgggccaacagcctgcaagaaagagattgaattttggtcagactggagacgcagactccgtacctgacccccagcctctcggacagccaccagcagccccctctggtctgggaactaatacgatggcttcaggcagtggcgcaccaatggcagacaataacgagggcgccgacggagtgggtaattcctcgggaaattggcattgcgattccacatggatgggcgacagagtcatcaccaccagcacccgcacctgggctctgcccacctacaacaaccatctgtacaagcaaatttccagccagtctggggccagcaacgacaaccactactttggctacagcaccccttgggggtattttgacttcaacagattccactgccacttctccccacgtgactggcaaagactcatcaacaacaattggggattccggcccaaaagactcaacttcaagctctttaacattcaagtcaaggaggtcacgcagaatgacggtacgacgacgattgccaataaccttaccagcacggttcaggtgtttactgactcggagtaccagctcccgtacgtcctcggctcggcgcatcaaggatgcctcccgccgttcccagcagacgtcttcatggtgccacagtatggatacctcaccctgaacaacgggagtcaggcggtaggacgctcttcattttactgcctggagtactttccttctcagatgctgcgtaccggaaacaactttaccttcagctacacctttgaggacgttccttttcacagcagctacgctcacagccagagtttggaccgtctcatgaatcctctcatcgaccagtacctgtattacttgagcagaacaaacactccaagcggaaccactacgcagtccgggcttcagttttctcaagccggagcgagtgacattcgggaccagtctaggaactggcttcctggaccctgttaccgccagcagcgagtatcaaagacagctgcggacaacaacaacagtgattactcgtggactggagctaccaagtatcacctcaatggaagagactctctggtgaatccgggcacagccatggccagccacaaggacgatgaagaaaagtattttcctcagagcggggttctcatcttcggaaaacaagactcgggaaaaactaatgtggacattgaaaaggtcatgattacagacgaagaggaaatcaggaccaccaatcccgtggctacggagcagtatggttctgtatctaccaatctccagagcggcaacacacaagcagctacctcagatgtcaacacacaaggcgttcttccaggcatggtctggcaggacagagacgtgtacctgcagggacccatctgggcaaagattccacacacggacggacattttcacccttctcctcttatgggagggtttggaccgaagcaccctcccccgcagattctcatcaagaataccccggtacctgcgaatccttctaccaccttcagcgcggcaaagtttgcttccttcatcacacagtactccacggggcaggtcagcgtggagatcgagtgggagctgcagaaagagaacagcaaacgctggaaccccgagatccagtatacctccaactacaacaagtctgttaatgtggactttactgtggacactaatggcgtgtattcagagcctcgccccattggcacaagatacctgactcgtaatctgtaa

SEQ ID NO: 3366 - DNA, 2208 bp, synthetic construct
  misc_feature 1..2208: note = source = /note="Description of Artificial Sequence: Synthetic polynucleotide"
  source 1..2208: mol_type = other DNA
atggctgccgatggttatcttccagattggctcgaggacactctctctgaaggaataagacagtggtggaagctcaaacctggcccaccaccgccaaagcccgcagagcggcataaggacgacagcaggggtcttgtgcttcctgggtacaagtacctcggacccttcaacggactcgacaaaggagagccggtcaacgaggcagacgccgcggccctcgagcacgacaaggcctacgaccggcagctcgacagcggagacaacccgtacctcaagtacaaccacgccgacgcggagtttcaggagcgccttaaagaagatacgtcttttgggggcaacctcgcaagagcagtattccaggcgaaaaagagggttcttgaacctctgggcctggttgaggagcctgttaagacggctccgggaaaaaagaggccggtagagcactctcctgcggagccagattcctcctccggaactggaaagtcgggccaacagcctgcaagaaagagattgaattttggtcagactggagacgcagactccgtacctgacccccagcctctcggacagccaccagcagccccctctggtctgggaactaatacgatggcttcaggcagtggcgcaccaatggcagacaataacgagggcgccgacggagtgggtaattcctcgggaaattggcattgcgattccacatggatgggcgacagagtcatcaccaccagcacccgcacctgggctctgcccacctacaacaaccatctgtacaagcaaatttccagccagtctggagccagcaacgacaaccactactttggctacagcaccccttgggggtattttgacttcaacagattccactgccacttctccccacgtgactggcaaagactcatcaacaacaattggggattccggcccaaaagactcaacttcaagctctttaacattcaagtcaaggaggtcacgcagaatgacggtacgacgacggttgccaataaccttaccagcacggttcaggtgtttactgactcggagtaccagctcccgtacgtcctcggctcggcgcatcaaggatgcctcccgccgttcccagcagacgtcttcatggtgccacagtatggatacctcaccctgaacaacgggagtcaggcggtaggacgctcttcattttactgcctggagtacttcccttctcagatgctgcgtaccggaaacaactttaccttcagctacacctttgaggacgttccttttcacagcagctacgctcacagccagagtttggaccgtcttatgaatcctctcatcgaccagtacctgtattacttgagcagaacaaacactccaagcggaaccactacgcagtccaggcttcagttttctcaagccggagcgagtgacattcgggaccagtctaggaactggcttcctggaccctgttaccgccagcagcgagtatcaaagacagctgcggacaacaacaacagtgattactcgtggactggagctaccaagtatcacctcaatggaagagactctctggtgaatccgggcacagccatggccagccacaaggacgatgaagaaaagtattttcctcagagcggggttctcatcttcggaaaacaagactcgggaaaaactaatgtggacattgaaaaggtcatgattacagacgaagaggaaatcaggaccaccaatcccgtggctacggagcagtatggttctgtatctaccaatctccagagcggcaacacacaagcagctacctcagatgtcaacacacaaggcgttcttccaggcatggtccggcaggacagagacgtgtacctgcagggacccatctgggcaaagattccacacacggacggacattttcacccttctcctcttatgggaggatttggactgaagcaccctcccccgcagattctcatcaagaataccccggtacctgcgaatccttctaccaccttcagcgcggcaaagtttgcttccttcatcacacagtactccacggggcaggtcagcgtggagatcgagtgggagccgcagaaagagaacagcaaacgctggaaccccgagatccagtatacctccaactacaacaagtctgttaatgtggactttactgtggacactaatggcgtgtattcagagcctcgccccattggcacaagatacctgactcgtaatctgtaa

SEQ ID NO: 3367 - DNA, 2208 bp, synthetic construct
  misc_feature 1..2208: note = source = /note="Description of Artificial Sequence: Synthetic polynucleotide"
  source 1..2208: mol_type = other DNA
atggctgccgatggttatcttccagattggctcgaggacactctctctgaaggaataagacagtggtggaagctcaaacctggcccaccaccgccaaagcccgcagagcggcataaggacgacagcaggggtcttgtgcttcctgggtacaagtacctcggacccttcaacggactcgacaaaggagagccggtcaacgaggcagacgccgcggccctcgagcacgacaaggcctacgaccggcagctcgacagcggagacaacccgtacctcaagtacaaccacgccgacgcggagtttcaggagcgccttaaagaagatacgtcttttgggggcaacctcgcaagagcagtattccaggcgaaaaagagggttcttgaacctctgggcctggttgaggagcctgttaagacggctccgggaaaaaagaggccggtagagcactctcctgcggagccagattcctcctccggaactggaaagtcgggccaacagcctgcaagaaagagattgaattttggtcagactggagacgcagactccgtacctgacccccagcctctcggacagccaccagcagccccctctggtctgggaactaatacgatggcttcaggcagtggcgcaccaatggcagacaataacgagggcgccgacggagtgggtaattcctcgggaaattggcattgcgattccacatggatgggcgacagagtcatcaccaccagcacccgcacctgggctctgcccacctacaacaaccatctgtacaagcaaatttccagccagtctggagccagcaacgacaaccactactttggctacagcaccccttgggggtattttgacttcaacagattccactgccacttctccccacgtgactggcaaagactcatcaacaacaattggggattccggcccaaaagactcaacttcaagctctttaacattcaagtcaaggaggtcacgcagaatgacggtacgacgacgattgccaataaccttaccagcacggttcaggtgtttactgactcggagtaccagctcccgtacgtcctcggctcggcgcatcaaggatgcctcccgccgttcccagcagacgtcttcatggtgccacagtatggatacctcaccctgaacaacgggagtcaggcggtaggacgctcttcattttactgcctggagtactttccttctcagatgctgcgtaccggaaacaactttaccttcagctacacctttgaggacgttccttttcacagcagctacgctcacagccagagtttggaccgtcttatgaatcctctcatcgaccagtacctgtattacttgagcagaacaaacactccaagcggaactactacgcagtccaggcttcagttttctcaagccggagcgagtgacattcgggaccagtctaggaactggcttcctggaccctgttaccgccagcagcgagtatcaaagacagctgcggacaacaacaacagtgattactcgtggactggagctaccaagtatcacctcaatggaagagactctctggtgaatccgggcacagccatggccagccacaaggacgatgaagaaaagtattttcctcagggcggggttctcatcttcggaaaacaagactcgggaaaaactaatgtggacattgaaaaggtcatgattacagacgaagaggaaatcaggaccaccaatcccgtggctacggagcagtatggttctgtatctaccaatctccagagcggcaacacacaagcagctacctcagatgtcaacacacaaggcgttcttccaggcatggtccggcaggacagagacgtgtacctgcagggacccatctgggcaaagattccacacacggacggacattttcacccttctcctcttatgggaggatttggactgaagcaccctcccccgcagattctcatcaagaataccccggtacctgcgaatccttctaccaccttcagcgcggcaaagtttgcttccttcatcacacagtactccacggggcaggtcagcgtggagatcgagtgggagccgcagaaagagaacagcaaacgctggaaccccgagatccagtatacctccaactacaacaagtctgttaatgtggactttactgtggacactaatggcgtgtattcagagcctcgccccattggcacaagatacctgactcgtaatctgtaa

SEQ ID NO: 3368 - DNA, 2208 bp, synthetic construct
  misc_feature 1..2208: note = source = /note="Description of Artificial Sequence: Synthetic polynucleotide"
  source 1..2208: mol_type = other DNA
atggctgccgatggttatcttccagattggctcgaggacactctctctgaaggaataagacagtggtggaagctcaaacctggcccaccaccgccaaagcccgcagagcggcataaggacgacagcaggggtcttgcgcttcctgggtacaagtacctcggacccttcaacggactcgacaaaggagagccggtcaacgaggcagacgccgcggccctcgagcacgacaaggcctacgaccggcagctcgacagcggagacaacccgtacctcaagtacaaccacgccgacgcggagtttcaggagcgccttaaagaagatacgtcttttgggggcaacctcgcaagagcagtattccaggcgaaaaagagggttcttgaacctctgggcctggttgaggagcctgttaagacggctccgggaaaaaagaggccggtagagcactctcctgcggagctagattcctcctccggaactggaaagtcgggccaacagcctgcaagaaagagattgaattttggtcagactggagacgcagactccgtacctgacccccagcctctcggacagccaccagcagccccctctggtctgggaactaatacgatggcttcaggcagtggcgcaccaatggcagacaataacgagggcgccgacggagtgggtaattcctcgggaaattggcattgcgattccacatggatgggcgacagagtcatcaccaccagcacccgcacctgggctctgcccacctacaacaaccatctgtacaagcaaatttccagccagtctggggccagcaacgacaaccactactttggctacagcaccccttgggggtattttgacttcaacagattccactgccacttctccccacgtgactggcaaagactcatcaacaacaattggggattccggcccaaaagactcaacttcaagctctttaacattcaagtcaaggaggtcacgcagaatgacggtacgacgacgattgccaataaccttaccagcacggttcaggtgtttactgactcggagtaccagctcccgtacgtcctcggctcggcgcatcaaggatgcctcccgccgttcccagcagacgtcttcatggtgccacagtatggatacctcaccctgaacaacgggagtcaggcggtaggacgctcttcattttactgcctggagtactttccttctcagatgctgcgtaccggaaacaactttaccttcagctacacctttgaggacgttccttttcacagcagctacgctcacagccagagtttggaccgtctcatgaatcctctcatcgaccagtacctgtattacttgagcagaacaaacactccaagcggaaccactacgcagtccaggcttcagttttctcaagccggagcgagtgacattcgggaccagtctaggaactggcttcctggaccctgttaccgccagcagcgagtatcaaagacagctgcggacaacaacaacagtgattactcgtggactggagctaccaagtatcacctcaatggaagagactctctggtgaatccgggcacagccatggccggccacaaggacgatgaagaaaagtattttcctcagagcggggttctcatcttcggaaaacaagactcgggaaaaactaatgtggacattgaaaaggtcatgattacagacgaagaggaaatcaggaccaccaatcccgtggctacggagcagtatggttctgtatctaccaatctccagagcggcaacacacaagcagctacctcagatgtcaacacacaaggcgttcttccaggcatggtctggcaggacagagacgtgtacctgcagggacccatctgggcaaagattccacacacggacggacattttcacccttctcctcttatgggagggtttggaccgaagcaccctcccccgcagattctcatcaagaataccccggtacctgcgaatccttctaccaccttcagcgcggcaaagtttgcttccttcatcacacagtactccacggggcaggtcagcgtggagatcgagtgggagctgcagaaagagaacagcaaacgctggaaccccgagatccagtatacctccaactacaacaagtctgttaatgtggactttactgtggacactaatggcgtgtattcagagcctcgccccattggcacaagatacctgactcgtaatctgtaa

SEQ ID NO: 3369 - DNA, 2208 bp, synthetic construct
  misc_feature 1..2208: note = source = /note="Description of Artificial Sequence: Synthetic polynucleotide"
  source 1..2208: mol_type = other DNA
atggctgccgatggttatcttccagattggctcgaggacactctctctgaaggaataagacagtggtggaagctcaaacctggcccaccaccgccaaagcccgcagagcggcataaggacgacagcaggggtcttgcgcttcctgggtacaagtacctcggacccttcaacggactcgacaaaggagagccggtcaacgaggcagacgccgcggccctcgagcacgacaaggcctacgaccggcagctcgacagcggagacaacccgtacctcaagtacaaccacgccgacgcggagtttcaggagcgccttaaagaagatacgtcttttgggggcaacctcgcaagagcagtattccaggcgaaaaagagggttcttgaacctctgggcctggttgaggagcctgttaagacggctccgggaaaaaagaggccggtagagcactctcctgcggagctagattcctcctccggaactggaaagtcgggccaacagcctgcaagaaagagattgaattttggtcagactggagacgcagactccgtacctgacccccagcctctcggacagccaccagcagccccctctggtctgggaactaatacgatggcttcaggcagtggcgcaccaatggcagacaataacgagggcgccgacggagtgggtaattcctcgggaaattggcattgcgattccacatggatgggcgacagagtcatcaccaccagcacccgcacctgggctctgcccacctacaacaaccatctgtacaagcaaatttccagccagtctggggccagcaacgacaaccactactttggctacagcaccccttgggggtattttgacttcaacagattccactgccacttctccccacgtgactggcaaagactcatcaacaacaattggggattccggcccaaaagactcaacttcaagctctttaacattcaagtcaaggaggtcacgcagaatgacggtacgacgacgattgccaataaccttaccagcacggttcaggtgtttactgactcggagtaccagctcccgtacgtcctcggctcggcgcatcaaggatgcctcccgccgttcccagcagacgtcttcatggtgccacagtatggatacctcaccctgaacaacgggagtcaggcggtaggacgctcttcattttactgcctggagtactttccttctcagatgctgcgtaccggaaacaactttaccttcagctacacctttgaggacgttccttttcacagcagctacgctcacagccagagtttggaccgtctcatgaatcctctcatcgaccagtacctgtattacttgagcagaacaaacactccaagcggaaccactacgcagtccaggcttcagttttctcaagccggagcgagtgacattcgggaccagtctaggaactggcttcctggaccctgttaccgccagcagcgagtatcaaagacagctgcggacaacaacaacagtgattactcgtggactggagctaccaagtatcacctcaatggaagagactctctggtgaatccgggcacagccatggccagccacaaggacgatgaagaaaagtattttcctcagagcggggttctcatcttcggaaaacaagactcgggaaaaactaatgtggacattgaaaaggtcatgattacagacgaagaggaaatcaggaccaccaatcccgtggctacggagcagtatggttctgtatctaccaatctccagagcggcaacacacaagcagctacctcagatgtcaacacacaaggcgttcttccaggcatggtctggcaggacagagacgtgtacctgcagggacccatctgggcaaagattccacacacggacggacattttcacccttctcctcttatgggaggatttggaccgaagcaccctcccccgcagattctcatcaagaataccccggtacctgcgaatccttctaccaccttcagcgcggcaaagtttgcttccttcatcacacagtactccacggggcaggtcagcgtggagatcgagtgggagctgcagaaagagaacagcaaacgctggaaccccgagatccagtatacctccaactacaacaagtctgttaatgtggactttactgtggacactaatggcgtgtattcagagcctcgccccattggcacaagatacctgactcgtaatctgtaa

SEQ ID NO: 3370 - DNA, 2208 bp, synthetic construct
  misc_feature 1..2208: note = source = /note="Description of Artificial Sequence: Synthetic polynucleotide"
  source 1..2208: mol_type = other DNA
atggctgccgatggttatcttccagattggctcgaggacactctctctgaaggaataagacagtggtggaagctcaaacctggcccaccaccgccaaagcccgcagagcggcataaggacgacagcaggggtcttgtgcttcctgggtacaagtacctcggacccttcaacggactcgacaaaggagagccggtcaacgaggcagacgccgcggccctcgagcacgacaaggcctacgaccggcagctcgacagcggagacaacccgtacctcaagtacaaccacgccgacgcggagtttcaggagcgccttaaagaagatacgtcttttgggggcaacctcgcaagagcagtattccaggcgaaaaagagggttcttgaacctctgggcctggttgaggagcctgttaagacggctccgggaaaaaagaggccggtagagcactctcctgcggagccagattcctcctccggaactggaaagtcgggccaacagcctgcaagaaagagattgaattttggtcagactggagacgcagactccgtacctggcccccagcctctcggacagccaccagcagccccctctggtctgggaactaatacgatggcttcaggcagtggcgcaccaatggcagacaataacgagggcgccgacggagtgggtaattcctcgggaaattggcattgcgattccacatggatgggcgacagagtcatcaccaccagcacccgcacctgggctctgcccacctacaacaaccatctgtacaagcaaatttccagccagtctggagccagcaacgacaaccactactttggctacagcaccccttgggggtattttgacttcaacagattccactgccacttctccccacgtgactggcaaagactcatcaacaacaattggggattccggcccaaaagactcaacttcaagctctttaacattcaagtcaaggaggtcacgcagaatgacggtacgacgacggttgccaataaccttaccagcacggttcaggtgtttactgactcggagtaccagctcccgtacgtcctcggctcggcgcatcaaggatgcctcccgccgttcccagcagacgtcttcatggtgccacagtatggatacctcaccctgaacaacgggagtcaggcggtaggacgctcttcattttactgcctggagtactttccttctcagatgctgcgtaccggaaacaactttaccttcagctacacctttgaggacgttccttttcacagcagctacgctcacagccagagtttggaccgtcttatgaatcctctcatcgaccagtacctgtattacttgagcagaacaaacactccaagcggaaccactacgcagtccaggcttcagttttctcaagccggagcgagtgacattcgggaccagtctaggaactggcttcctggaccctgttaccgccagcagcgagtatcaaagacagctgcggacaacaacaacagtgattactcgtggactggagctaccaagtatcacctcaatggaagagactctctggtgaatccgggcacagccatggccagccacaaggacgatgaagaaaagtattttcctcagagcggggttctcatcttcggaaaacaagactcgggaaaaactaatgtggacattgaaaaggtcatgattacagacgaagaggaaatcaggaccaccaatcccgtggctacggagcagtatggttctgtatctaccaatctccagagcggcaacacacaagcagctacctcagatgtcaacacacaaggcgttcttccaggcatggtccggcaggacagagacgtgtacctgcagggacccatctgggcaaagattccacacacggacggacattttcacccttctcctcttatgggaggatttggactgaagcaccctcccccgcagattctcatcaagaataccccggtacctgcgaatccttctaccaccttcagcgcggcaaagtttgcttccttcatcacacagtactccacggggcaggtcagcgtggagatcgagtgggagccgcagaaagagaacagcaaacgctggaaccccgagatccagtatacctccaactacaacaagtctgttaatgtggactttactgtggacactaatggcgtgtattcagagcctcgccccattggcacaagatacctgactcgtaatctgtaa

SEQ ID NO: 3371 - DNA, 2208 bp, synthetic construct
  misc_feature 1..2208: note = source = /note="Description of Artificial Sequence: Synthetic polynucleotide"
  source 1..2208: mol_type = other DNA
atggctgccgatggttatcttccagattggctcgaggacactctctctgaaggaataagacagtggtggaagctcaaacctggcccaccaccgccaaagcccgcagagcggcataaggacgacagcaggggtcttgtgcttcctgggtacaagtacctcggacccttcaacggactcgacaaaggagagccggtcaacgaggcagacgccgcggccctcgagcacgacaaggcctacgaccggcagctcgacagcggagacaacccgtacctcaagtacaaccacgccgacgcggagtttcaggagcgccttaaagaagatacgtcttttgggggcaacctcgcaagagcagtattccaggcgaaaaagagggttcttgaacctctgggcctggttgaggagcctgttaagacggctccgggaaaaaagaggccggtagagcactctcctgcggagccagattcctcctccggaactggaaagtcgggccaacagcctgcaagaaagagattgaattttggtcagactggagacgcagactccgtacctgacccccagcctctcggacagccaccagcagccccctctggtctgggaactaatacgatggcttcaggcagtggcgcaccaatggcagacaataacgagggcgccgacggagtgggtaattcctcgggaaattggcattgcgattccacatggatgggcgacagagtcatcaccaccagcacccgcacctgggctctgcccacctacaacaaccatctgtacaagcaaatttccagccagtctggagccagcaacgacaaccactactttggctacagcaccccttgggggtattttgacttcaacagattccactgccacttctccccacgtgactggcaaagactcatcaacaacaattggggattccggcccaaaagactcaacttcaagctctttaacattcaagtcaaggaggtcacgcagaatgacggtacgacgacgattgccaataaccttaccagcacggttcaggtgtttactgactcggagtaccagctcccgtacgtcctcggctcggcgcatcaaggatgcctcccgccgttcccagcagacgtcttcatggtgccacagtatggatacctcaccctgaacaacgggagtcaggcggtaggacgctcttcattttactgcctagagtactttccttctcagatgctgcgtaccggaaacaactttaccttcagctacacctttgaggacgctccttttcacagcagctacgctcacagccagagtttggaccgtcttatgaatcctctcatcgaccagtacctgtactacttgagcagaacaaacactccaagcggaaccactacgcagtccaggcttcagttttctcaagccggagcgagtgacattcgggaccagtctaggaactggcttcctggaccctgttaccgccagcagcgagtatcaaagacagctgcggacaacaacaacagtgattactcgtggactggagctaccaagtatcacctcaatggaagagactctctggtgaatccgggcacagccatggccagccacaaggacgatgaagaaaagtattttcctcagagcggggttctcatcttcggaaaacaagactcgggaaaaactaacgtggacattgaaaaggtcatgattacagacgaagaggaaatcaggaccaccaatcccgtggctacggagcagtatggttctgtatctaccaatctccagagcggcaacacacaagcagctacctcagatgtcaacacacaaggcgttcttccaggcatggtccggcaggacagagacgtgtacctgcagggacccatctgggcaaagattccacacacggacggacattttcacccttctcctcttatgggaggatttggactgaagcaccctcccccgcagattctcatcaagaataccccggtacctgcgaatccttctaccaccttcagcgcggcaaagtttgcttccttcatcacacagtactccacggggcaggtcagcgtggagatcgagtgggagccgcagaaagagaacagcaaacgctggaaccccgagatccagtatacctccaactacaacaagtctgttaatgtggactttactgtggacactaatggcgtgtattcagagcctcgccccattggcacaagatacctgactcgtaatctgtaa

SEQ ID NO: 3372 - DNA, 2208 bp, synthetic construct
  misc_feature 1..2208: note = source = /note="Description of Artificial Sequence: Synthetic polynucleotide"
  source 1..2208: mol_type = other DNA
atggctgccgatggttatcttccagattggctcgaggacactctctctgaaggaataagacagtggtggaagctcaaacctggcccaccaccgccaaagcccgcagagcggcataaggacgacagcaggggtcttgtgcttcctgggtacaagtacctcggacccttcaacggactcgacaaaggagagccggtcaacgaggcagacgccgcggccctcgagcacgacaaggcctacgaccggcagctcgacagcggagacaacccgtacctcaagtacaaccacgccgacgcggagtttcaggagcgccttaaagaagatacgtcttttgggggcaacctcgcaagagcagtattccaggcgaaaaagagggttcttgaacctctgggcctggttgaggagcctgttaagacggctccgggaaaaaagaggccggtagagcactctcctgcggagccagattcctcctccggaactggaaagtcgggccaacagcctgcaagaaagagattgaattttggtcagactggagacgcagactccgtacctgacccccagcctctcggacagccaccagcagccccctctggtctgggaactaatacgatggcttcaggcagtggcgcaccaatggcagacaataacgagggcgccgacggagtgggtaattcctcgggaaattggcattgcgattccacatggatgggcgacagagtcatccccaccagcacccgcacctgggctctgcccacctacaacaaccatctgtacaagcaaatttccagccagtctggagccagcaacgacaaccactactttggctacagcaccccttgggggtattttgacttcaacagattccactgccacttctccccacgtgactggcaaagactcatcaacaacaattggggattccggcccaaaagactcaacttcaagctctttaacattcaagtcaaggaggtcacgcagaatgacggtacgacgacgattgccaataaccttaccagcacggttcaggtgtttactgactcggagtaccagctcccgtacgtcctcggctcggcgcatcaaggatgcctcccgccgttcccagcagacgtcttcatggtgccacagtatggatacctcaccctgaacaacgggagtcaggcggtaggacgctcttcattttactgcctggagtactttccttctcagatgctgcgtaccggaaacaactttaccttcagctacacctttgaggacgttccttttcacagcagctacgctcacagccagagtttggaccgtcttatgaatcctctcatcgaccagtacctgtattacttgagcagaacaaacactccaagcggaaccactacgcagtccaggcttcagttttctcaagccggagcgagtgacattcgggaccagtctaggaactggcttcctggaccctgttaccgccagcagcgagtatcaaagacagctgcggacaacaacaacagtgattactcgtggactggagctaccaagtatcacctcaatggaagagactctctggtgaatccgggcacagccatggccagccacaaggacgatgaagaaaagtattttcctcagagcggggttctcatcttcggaaaacaagactcgggaaaaactaatgtggacattgaaaaggtcatgattacagacgaagaggaaatcaggaccaccaatcccgtggctacggagcagtatggttctgtatctaccaatctccagagcggcaacacacaagcagctacctcagatgtcaacacacaaggcgttcttccaggcatggtccggcaggacagagacgtgtacctgcagggacccatctgggcaaagattccacacacggacggacattttcacccttctcctcttatgggaggatttggactgaagcaccctcccccgcagattctcatcaagaataccccggtacctgcgaatccttctaccaccttcagcgcggcaaagtttgcttccttcatcacacagtactccacggggcaggtcagcgtggagatcgagtgggagccgcagaaagagaacagcaaacgctggaaccccgagatccagtatacctccaactacaacaagtctgttaatgtggactttactgtggacactaatggcgtgtattcagagcctcgccccattggcacaagatacctgactcgtaatctgtaa

SEQ ID NO: 3373 - DNA, 2208 bp, synthetic construct
  misc_feature 1..2208: note = source = /note="Description of Artificial Sequence: Synthetic polynucleotide"
  source 1..2208: mol_type = other DNA
atggctgccgatggttatcttccagattggctcgaggacactctctctgaaggaataagacagtggtggaagctcaaacctggcccaccaccgccaaagcccgcagagcggcataaggacgacagcaggggtcttgtgcttcctgggtacaagtacctcggacccttcaacggactcgacaaaggagagccggtcaacgaggcagacgccgcggccctcgagcacgacaaggcctacgaccggcagctcgacagcggagacaacccgtacctcaagtacaaccacgccgacgcggagtttcaggagcgccttaaagaagatacgtcttttgggggcaacctcgcaagagcagtattccaggcgaaaaagagggttcttgaacctctgggcctggttgaggagcctgttaagacggctccgggaaaaaagaggccggcagagcactctcctgcggagccagattcctcctccggaactggaaagtcgggccaacagcctgcaagaaagagattgaattttggtcagactggagacgcagactccgtacctgacccccagcctctcggacagccaccagcagccccctctggtctgggaactaatacgatggcttcaggcagtggcgcaccaatggcagacaataacgagggcgccgacggagtgggtaattcctcgggaaattggcattgcgattccacatggatgggcgacagagtcatcaccaccagcacccgcacctgggctctgcccacctacaacaaccatctgtacaagcaaatttccagccagtctggagccagcaacgacaaccactactttggctacagcaccccttgggggtattttgacttcaacagattccactgccacttctccccacgtgactggcaaagactcatcaacaacaattggggattccggcccaaaagactcaacttcaagctctttaacattcaagtcaaggaggtcacgcagaatgacggtacgacgacgattgccaataaccttaccagcacggttcaggtgtttactgactcggagtaccagctcccgtacgtcctcggctcggcgcatcaaggatgcctcccgccgttcccagcagacgtcttcatggtgccacagtatggatacctcaccctgaacaacgggagtcaggcggtaggacgctcttcattttactgcctagagtactttccttctcagatgctgcgtaccggaaacaactttaccttcagctacacctttgaggacgttccttttcacagcagctacgctcacagccagagtttggaccgtcttatgaatcctctcatcgaccagtacctgtattacttgagcagaacaaacactccaagcggaaccactacgcagtccaggcttcagttttctcaagccggagcgagtgacattcgggaccagtctaggaactggcttcctggaccctgttaccgccagcagcgagtatcaaagacagctgcggacaacaacaacagtgattactcgtggactggagctaccaagtatcacctcaatggaagagactctctggtgaatccgggcacagccatggccagccacaaggacgatgaagaaaagtattttcctcagagcggggttctcatcttcggaaaacaagactcgggaaaaactaatgtggacattgaaaaggtcatgattacagacgaagaggaaatcaggaccaccaatcccgtggctacggagcagtatggttctgtatctaccaatctccagagcggcaacacacaagcagctacctcagatgtcaacacacaaggcgttcttccaggcatggtccggcaggacagagacgtgtacctgcagggacccatctgggcaaagattccacacacggacggacattttcacccttctcctcttatgggaggatttggactgaagcaccctcccccgcagattctcatcaagaataccccggtacctgcgaatccttctaccaccttcagcgcggcaaagtttgcttccttcatcacacagtactccacggggcaggtcagcgtggagatcgagtgggagccgcagaaagagaacagcaaacgctggaaccccgagatccagtatacctccaactacaacaagtctgttaatgtggactttactgtggacactaatggcgtgtattcagagcctcgccccattggcacaagatacctgactcgtaatctgtaa

SEQ ID NO: 3374 - DNA, 2208 bp, synthetic construct
  misc_feature 1..2208: note = source = /note="Description of Artificial Sequence: Synthetic polynucleotide"
  source 1..2208: mol_type = other DNA
atggctgccgatggttatcttccagattggctcgaggacactctctctgaaggaataagacagtggtggaagctcaaacctggcccaccaccgccaaagcccgcagagcggcataaggacgacagcaggggtcttgtgcttcctgggtacaagtacctcggacccttcaacggactcgacaaaggagagccggtcaacgaggcagacgccgcggccctcgagcacgacaaggcctacgaccggcagctcgacagcggagacaacccgtacctcaagtacaaccacgccgacgcggagtttcaggagcgccttaaagaagatacgtcttttgggggcaacctcgcaagagcagtattccaggcgaaaaagagggttcttgaacctctgggcctggttgaggagcctgttaagacggctccgggaaaaaagaggccggtagagcactctcctgcggagccagattcctcctccggaactggaaagtcgggccaacagcctgcaagaaagagattgaattttggtcagactggagacgcagactccgtacctgacccccagcctctcggacagccaccagcagccccctctggtctgggaactaatacgatggcttcaggcagtggcgcaccaatggcagacaataacgagggcgccgacggagtgggtaattcctcgggaaattggcattgcgattccacatggatgggcgacagagtcatcaccaccagcacccgcacctgggctctgcccacctacaacaaccatctgtacaagcaaatttccagccagtctggagccagcaacgacaaccactactttggctacagcaccccttgggggtattttgacttcaacagattccactgccacttctccccacgtgactggcaaagactcatcaacaacaattggggattccggcccaaaagactcaacttcaagctctttaacattcaagtcaaggaggtcacgcagaatgacggtacgacgacgattgccaataaccttaccagcacggttcaggtgtttactgactcggagtaccagctcccgtacgtcctcggctcggcgcatcaaggatgcctcccgccgttcccagcagacgtcttcatggtgccacagtatggatacctcaccctgaacaacgggagtcaggcggtaggacgctcttcattttactgcctggagtactttccttctcagatgctgcgtaccggaaacaactttaccttcagctacacctttgaggacgttccttttcacagcagctacgctcacagccagagtttggaccgtcttatgaatcctctcatcgaccagtacctgtattacttgagcagaacaaacactccaagcggaaccactacgcagtccaggcttcagttttctcaagccggagcgagtgacattcgggaccagtctaggaactggcttcctggaccctgttaccgccagcagcgagtatcaaggacagctgcggacaacaacaacagtgattactcgtggactggagctaccaagtatcacctcaatggaagagactctctggtgaatccgggcacagccatggccagccacaaggacgatgaagaaaagtattttcctcagagcggggttctcatcttcggaaaacaagactcgggaaaaactaatgtggacattgaaaaggtcatgattacagacgaagaggaaatcaggaccaccaatcccgtggctacggagcagtatggttctgtatctaccaatctccagagcggcaacacacaagcagctacctcagatgtcaacacacaaggcgttcttccaggcatggtccggcaggacagagacgtgtatctgcagggacccatctgggcaaagattccacacacggacggacattttcacccttctcctcttatgggaggatttggactgaagcaccctcccccgcagattctcatcaagaataccccggtacctgcgaatccttctaccaccttcagcgcggcaaagtttgcttccttcatcacacagtactccacggggcaggtcagcgtggagatcgagtgggagccgcagaaagagaacagcaaacgctggaaccccgagatccagtatacctccaactacaacaagtctgttaatgtggactttactgtggacactaatggcgtgtattcagagcctcgccccattggcacaagatacctgactcgtaatctgtaa

SEQ ID NO: 3375 - DNA, 2208 bp, synthetic construct
  misc_feature 1..2208: note = source = /note="Description of Artificial Sequence: Synthetic polynucleotide"
  source 1..2208: mol_type = other DNA
atggctgccgatggttatcttccagattggctcgaggacactctctctgaaggaataagacagtggtggaagctcaaacctggcccaccaccgccaaagcccgcagagcggcataaggacgacagcaggggtcttgtgcttcctgggtacaagtacctcggacccttcaacggactcgacaaaggagagccggtcaacgaggcagacgccgcggccctcgagcacgacaaggcctacgaccggcagctcgacagcggagacaacccgtacctcaagtacaaccacgccgacgcggagtttcaggagcgccttaaagaagatacgtcttttgggggcaacctcgcaagagcagtattccaggcgaaaaagagggttcttgaacctctgggcctggttgaggagcctgttaagacggctccgggaaaaaagaggccggtagagcactctcctgcggggccagattcctcctccggaactggaaagtcgggccaacagcctgcaagaaagagattgaattttggtcagactggagacgcagactccgtacctgacccccagcctctcggacagccaccagcagccccctctggtctgggaactaatacgatggcttcaggcagtggcgcaccaatggcagacaataacgagggcgccgacggagtgggtaattcctcgggaaattggcattgcgattccacatggatgggcgacagagtcatcaccaccagcacccgcacctgggctctgcccacctacaacaaccatctgtacaagcaaatttccagccagtctggagccagcaacgacaaccactactttggctacagcaccccttgggggtattttgacttcaacagattccactgccacttctccccacgtgactggcaaagactcatcaacaacaattggggattccgggccaaaagactcaacttcgagctctttaacattcaagtcaaggaggtcacgcagaatgacggtacgacgacgattgccaataaccttaccagcacggttcaggtgtttactgactcggagtaccagctcccgtacgtcctcggctcggcgcatcaaggatgcctcccgccgttcccagcagacgtcttcatggtgccacagtatggatacctcaccctgaacaacgggagtcaggcggtaggacgctcttcattttactgcctggagtactttccttctcagatgctgcgtaccggaaacaactttaccttcagctacacctttgaggacgttccttttcacagcagctacgctcacagccagagtttggaccgtctcatgaatcctctcatcgaccagtacctgtattacttgagcagaacaaacactccaagcggaaccactacgcagtccaggcttcagttttctcaagccggagcgagtgacattcgggaccagtctaggaactggcttcctggaccctgttaccgccagcagcgagtatcaaagacagctgcggacaacaacaacagtgattactcgtggactggagctaccaagtatcacctcaatggaagagactctctggtgaatccgggcacagccatggccagccacaaggacgatgaagaaaagtattttcctcagagcggggttctcatcttcggaaaacaagactcgggaaaaactaatgtggacattgaaaaggtcatgattacagacgaagaggaaatcaggaccaccaatcccgtggctacggagcagtatggttctgtatctaccaatctccagagcggcaacacacaagcagctacctcagatgtcaacacacaaggcgttcttccaggcatggtctggcaggacagagacgtgtacctgcagggacccatctgggcaaagattccacacacggacggacactttcacccttctcctcttatgggaggatttggactgaagcaccctcccccgcagattctcatcaagagtaccccggtacctgcgaatccttctaccaccttcagcgcggcaaagtttgcttccttcatcacacagtactccacggggcaggtcagcgtggagatcgagtgggagctgcagaaagagaacagcaaacgctggaaccccgagatccagtatacctccaactacaacaagtctgttaatgtggactttactgtggacactaatggcgtgtattcagagcctcgccccattggcacaagatacctgactcgtaatctgtaa

SEQ ID NO: 3376 - DNA, 2208 bp, synthetic construct
  misc_feature 1..2208: note = source = /note="Description of Artificial Sequence: Synthetic polynucleotide"
  source 1..2208: mol_type = other DNA
atggctgccgatggttatcttccagattggctcgaggacactctctctgaaggaataagacagtggtggaagctcaaacctggcccaccaccgccaaagcccgcagagcggcataaggacgacagcaggggtcttgtgcttcctgggtacaagtacctcggacccttcaacggactcgacaaaggagagccggtcaacgaggcagacgccgcggccctcgagcacgacaaggcctacgaccggcagctcgacagcggagacaacccgtacctcaagtacaaccacgccgacgcggagtttcaggagcgccttaaagaagatacgtcttttgggggcaacctcgcaagagcagtattccaggcgaaaaagagggttcttgaacctctgggcctggttgaggagcctgttaagacggctccgggaaaaaagaggccggtagagcactctcctgcggagccagattcctcctccggaactggaaagtcgggccaacagcctgcaagaaagagattgaattttggtcagactggagacgcagactccgtacctgacccccagcctctcggacagccaccagcagccccctctggtctgggaactaatacgatggcttcaggcagtggcgcaccaatggcagacaataacgagggcgccgacggagtgggtaattcctcgggaaattggcattgcgattccacatggatgggcgacagagtcatcaccaccagcacccgcacctgggctctgcccacctacaacaaccatctgtacaagcaaatttccagccagtctggagccagcaacgacaaccactactttggctacagcaccccttgggggtattttgacttcaacagattccactgccacttctccccacgtgactggcaaagactcatcaacaacaattggggattccggcccaaaagactcaacttcaagctctttaacattcaagtcaaggaggtcacgcagaatgacggtacgacgacgattgccaataaccttaccagcacggttcaggtgtttactgactcggagtaccagctcccgtacgtcctcggctcggcgcatcaaggatgcctcccgccgttcccagcagacgtcttcatggtgccacagtatggatacctcaccctgaacaacgggagtcaggcggtaggacgctcttcattttactgcctggagtactttccttctcagatgctgcgtaccggaaacaactttaccttcagctacacctttgaggacgttccttttcacagcagctacgctcacagccagagtttggaccgtctcatgaatcctctcatcgaccagtacctgtattacttgagcagaacaaacactccaagcggaaccactacgcagtccaggcttcggttttctcaagccggagcgagtgacattcgggaccagtctaggaactggcttcctggaccctgttaccgccagcagcgagtatcaaagacagctgcggacaacaacaacagtgattactcgtggactggagctaccaagtatcacctcaatggaagagactctctggtgaatccgggcacagccatggccagccacaaggacgatgaagaaaagtattttcctcagagcggggttctcatcttccggaaacaagactcgggaaaaactaatgtggacattgaaagggtcatgattacagacgaagaggaaatcaggaccaccaatcccgtggctacggagcagtatggttctgtatctaccaatctccagagcggcaacacacaagcagctacctcagatgtcaacacacaaggcgttcttccaggcatggtctggcaggacagagacgtgtacctgcagggacccatctgggcaaagattccacacacggacggacattttcacccttctcctcttatgggaggatttggactgaagcaccctcccccgcagattctcatcaagaataccccggtacctgcgaatccttctaccaccttcagcgcggcaaagtttgcttccttcatcacacagtactccacggggcaggtcagcgtggagatcgagtgggagctgcagaaagagaacagcaaacgctggaaccccgagatccagtatacctccaactacaacaagtctgttaatgtggactttactgtggacactaatggcgtgtattcagagcctcgccccattggcacaagatacctgactcgtaatctgtaa

SEQ ID NO: 3377 - DNA, 2208 bp, synthetic construct
  misc_feature 1..2208: note = source = /note="Description of Artificial Sequence: Synthetic polynucleotide"
  source 1..2208: mol_type = other DNA
atggctgccgatggttatcttccagattggctcgaggacactctctctgaaggaataagacagtggtggaagctcaaacctggcccaccaccgccaaagcccgcagagcggcataaggacgacagcaggggtcttgtgcttcctgggtacaagtacctcggacccttcaacggactcgacaaaggagagccggtcaacgaggcagacgccgcggccctcgagcacgacaaggcctacgaccggcagctcgacagcggagacaacccgtacctcaagtacaaccacgccgacgcggagtttcaggagcgccttaaagaagatacgtcttttgggggcaacctcgcaagagcagtattccaggcgaaaaagagggttcttgaacctctgggcctggttgaggagcctgttaagacggctccgggaaaaaagaggccggtagagcactctcctgcggagccagattcctcctccggaactggaaagtcgggccaacagcctgcaagaaagagattgaattttggtcagactggagacgcagactccgtacctgacccccagcctctcggacagccaccagcagccccctctggtctgggaactaatacgatggcttcaggcagtggcgcaccaatggcagacaataacgagggcgccgacggagtgggtaattcctcgggaaattggcattgcgattccacatggatgggcgacagagtcatcaccaccagcacccgcacctgggctctgcccacctacaacaaccatctgtacaagcaaatttccagccagtctggagccagcaacgacaaccactactttggctacagcaccccttgggggtattttgacttcaacagattccactgccacttctccccacgtgactggcaaagactcatcaacaacaattggggattccgggccaaaagactcaacttcaagctctttaacattcaagtcaaggaggtcacgcagaatgacggtacgacgacgattgccaataaccttaccagcacggttcaggtgtttactgactcggagtaccagctcccgtacgtcctcggctcggcgcatcaaggatgcctcccgccgttcccagcagacgtcttcatggtgccacagtatggatacctcaccctgaacaacgggagtcaggcggtaggacgctcttcattttactgcctggagtactttccttctcagatgctgcgtaccggaaacaactttaccttcagctacacctttgaggacgttccttttcacagcagctacgctcacagccagagtttggaccgtctcatgaatcctctcatcgaccagtacctgtattacttgagcagaacaaacactccaagcggaaccactacgcagtccaggcttcggttttctcaagccggagcgagtgacattcgggaccagtctaggaactggcttcctggaccctgttaccgccagcagcgagtatcaaagacagctgcggacaacaacaacagtgattactcgtggactggagctaccaagtatcacctcaatggaagagactctctggtgaatccgggcacagccatggccagccacaaggacgatgaagaaaagtattttcctcagagcggggttctcatcttcggaaaacaagactcgggaaaaactaatgtggacattgaaagggtcatgattacagacgaagaggaaatcaggaccaccaatcccgtggctacggagcagtatggttctgtatctaccaatctccagagcggcaacacacaagcagctacctcagatgtcaacacacaaggcgttcttccaggcatggtctggcaggacagagacgtgtacctgcagggacccatctgggcaaagattccacacacggacggacattttcacccttctcctcttatgggaggatttggactgaagcaccctcccccgcagattctcatcaagaataccccggtacctgcgaatccttctaccaccttcagcgcggcaaagtttgcttccttcatcacacagtactccacggggcaggtcagcgtggagatcgagtgggagctgcagaaagagaacagcaaacgctggaaccccgagatccagtatacctccaactacaacaagtctgttaatgtggactttactgtggacactaatggcgtgtattcagagcctcgccccattggcacaagatacctgactcgtaatctgtaa

SEQ ID NO: 3378 - DNA, 2208 bp, synthetic construct
  misc_feature 1..2208: note = source = /note="Description of Artificial Sequence: Synthetic polynucleotide"
  source 1..2208: mol_type = other DNA
atggctgccgatggttatcttccagattggctcgaggacactctctctgaaggaataagacagtggtggaagctcaaacctggcccaccaccaccaaggcccgcagagcggcatcaggacgacagcaggggtcttgtgcttcctgggtacaagtacctcggacccttcaacggactcgacaaaggagagccggtcaacgaggcagacgctgcggccctcgagcacgacaaggcctacgaccggcagctcgacagcggagacaacccgtacctcaagtacaaccacgccgacgcggagtttcaggagcgtcttaaagaagatacgtcttttgggggcaacctcggacgagcagtcttccaggcgaaaaagagggttcttgaacctctgggcctggttgaggaacctgttaagacggctccgggaaaaaagaggccggtagagcactctcctgcggagccagactcctcctcgggaaccggaaaagcgggccagcagcctgcaagaaagagattgaatttcggtcagactggagacgcagactccgtacctgacccccagcctctcggacagccaccagcagcccccacaagtttgggatctactacaatggctacaggcagtggcgcaccaatggcagacaataacgagggtgccgatggagtgggtaattcctcaggaaattggcattgcgattcccaatggctgggcgacagagtcatcaccaccagcacccgaacctgggccctgcccacctacaacaaccacctctacaagcaaatctccagccaatcaggagcatcgaacgacaaccactactttggctacagcaccccttgggggtattttgacttcaacagattccactgccacttctccccacgtgactggcaaagactcatcaacaacaattggggattccggcccaaaagactcaacttcgagctctttaacattcaagtcaaggaggtcacgcagaatgacggtacgacgacgattgccaataaccttaccagcacggttcaggtgtttactgactcggagtaccagctcccgtacgtcctcggctcggcgcatcaaggatgcctcccgccgttcccagcagacgtcttcatggtgccacagtatggatacctcaccctgaacaacgggagtcaggcggtaggacgctcttcattttactgcctggagtactttccttctcagatgctgcgtaccggaaacaactttaccttcagctacacctttgaggacgttccttttcacagcagctacgctcacagccagagtttggaccgtctcatgaatcctctcatcgaccagtacctgtattacttgagcagaacaaacactccaagcggaaccactacgcagtccaggcttcagttttctcaagccggagcgagtgacattcgggaccagtctaggaactggcttcctggaccctgttaccgccagcagcgagtatcaaagacagctgcggacaacaacaacagtgattactcgtggactggagctaccaagtatcacctcaatggaagagactctctggtgaatccgggcacagccatggccagccacaaggacgatgaagaaaagtattttcctcagagcggggttctcatcttcggaaaacaagactcgggaaaaactaatgtggacattgaaaaggtcatgattacagacgaagaggaaatcaggaccaccaatcccgtggctacggagcagtatggttctgtatctaccaatctccagagcggcaacacacaagcagctacctcagatgtcaacacacaaggcgttcttccaggcatggtctggcaggacagagacgtgtacctgcagggacccatctgggcaaagattccacacacggacggacactttcacccttctcctcttatgggaggatttggactgaagcaccctcccccgcagattctcatcaagagtaccccggtacctgcgaatccttctaccaccttcagcgcggcaaagtttgcttccttcatcacacagtactccacggggcaggtcagcgtggagatcgagtgggagctgcagaaagagaacagcaaacgctggaaccccgagatccagtatacctccaactacaacaagtctgttaatgtggactttactgtggacactaatggcgtgtattcagagcctcgccccattggcacaagatacctgactcgtaatctgtaa

SEQ ID NO: 3379 - DNA, 2208 bp, synthetic construct
  misc_feature 1..2208: note = source = /note="Description of Artificial Sequence: Synthetic polynucleotide"
  source 1..2208: mol_type = other DNA
atggctgccgatggttatcttccagattggctcgaggacactctctctgaaggaataagacagtggtggaagctcaaacctggcccaccaccgccaaagcccgcagagcggcataaggacgacagcaggggtcttgtgcttcctgggtacaagtacctcggacccttcaacggactcgacaaaggagagccggtcaacgaggcagacgccgcggccctcgagcacgacaaggcctacgaccggcagctcgacagcggagacaacccgtacctcaagtacaaccacgccgacgcggagtttcaggagcgccttaaagaagatacgtcttttgggggcaacctcgcaagagcagtattccaggcgaaaaagagggttcttgaacctctgggcctggttgaggagcctgttaagacggctccgggaaaaaagaggccggtagagcactctcctgcggggccagattcctcctccggaactggaaagtcgggccaacagcctgcaagaaagagattgaattttggtcagactggagacgcagactccgtacctgacccccagcctctcggacagccaccagcagccccctctggtctgggaactaatacgatggcttcaggcagtggcgcaccaatggcagacaataacgagggcgccgacggagtgggtaattcctcgggaaattggcattgcgattccacatggatgggcgacagagtcatcaccaccagcacccgcacctgggctctgcccacctacaacaaccatctgtacaagcaaatttccagccagtctggagccagcaacgacaaccactactttggctacagcaccccttgggggtattttgacttcaacagattccactgccacttctccccacgtgactggcatagactcatcaacaacaattggggattccggcccaaaagactcaacttcgagctctttaacattcaagtcaaggaggtcacgcagaatgacggtacgacgacgattgccaataaccttaccagcacggttcaggtgtttactgactcggagtaccagctcccgtacgtcctcggctcggcgcatcaaggatgcctcccgccgttcccagcagacgtcttcatggtgccacagtatggatacctcaccctgaacaacgggagtcaggcggtaggacgctcttcattttactgcctggagtactttccttctcagatgctgcgtaccggaaacaactttaccttcagctacacctttgaggacgttccttttcacagcagctacgctcgcagccagagtttggaccgtctcatgaatcctctcatcgaccagtacctgtattacttgagcagaacaaacactccaagcggaaccactacgcagtccaggcttcagttttctcaagccggagcgagtgacattcgggaccagtctaggaactggcttcctggaccctgttaccgccagcagcgagtatcaaagacagctgcggacaacaacaacagtgattactcgtggactggagctaccaagtatcacctcaatggaagagactctctggtgaatccgggcacagccatggccagccacaaggacgatgaagaaaagtattttcctcagagcggggttctcatcttcggaaaacaagactcgggaaaaactaatgtggacattgaaaaggtcatgattacagacgaagaggaaatcaggaccaccaatcccgtggctacggagcagtatggttctgtatctaccaatctccagagcggcaacacacaagcagctacctcagatgtcaacacacaaggcgttcttccaggcatggtctggcaggacagagacgtgtacctgcagggacccatctgggcaaagattccacacacggacggacactttcacccttctcctcttatgggaggatttggactgaagcaccctcccccgcagattctcatcaagagtaccccggtacctgcgaatccttctaccaccttcagcgcggcaaagtttgcttccttcatcacacagtactccacggggcaggtcagcgtggagatcgagtgggagctgcagaaagagaacagcaaacgctggaaccccgagatccagtatacctccaactacaacaagtctgttaatgtggactttactgtggacactaatggcgtgtattcagagcctcgccccattggcacaagatacctgactcgtaatctgtaa

SEQ ID NO: 3380 - DNA, 2208 bp, synthetic construct
  misc_feature 1..2208: note = source = /note="Description of Artificial Sequence: Synthetic polynucleotide"
  source 1..2208: mol_type = other DNA
atggctgccgatggttatcttccagattggctcgaggacactctctctgaaggaataagacagtggtggaagctcaaacctggcccaccaccgccaaagcccgcagagcggcataaggacgacagcaggggtcttgtgcttcctgggtacaagtacctcggacccttcaacggactcgacaaaggagagccggtcaacgaggcagacgccgcggccctcgagcacgacaaggcctacgaccggcagctcgacagcggagacaacccgtacctcaagtacaaccacgccgacgcggagtttcaggagcgccttaaagaagatacgtcttttgggggcaacctcgcaagagcagtattccaggcgaaaaagagggttcttgaacctctgggcctggttgaggagcctgttaagacggctccgggaaaaaagaggccggtagagcactctcctgcggggccagattcctcctccggaactggaaagtcgggccaacagcctgcaagaaagagattgaattttggtcagactggagacgcagactccgtacctgacccccagcctctcggacagccaccagcagccccctctggtctgggaactaatacgatggcttcaggcagtggcgcaccaatggcagacaataacgagggcgccgacggagtgggtaattcctcgggaaattggcattgcgattccacatggatgggcgacagagtcatcaccaccagcacccgcacctgggctctgcccacctacaacaaccatctgtacaagcaaatttccagccagtctggagccagcaacgacaaccactactttggctacagcaccccttgggggtattttgacttcaacagattccactgccacttctccccacgtgactggcaaagactcatcaacaacaattggggattccggcccaaaagactcaacttcgagctctttaacattcaagtcaaggaggtcacgcagaatgacggtacgacgacgattgccaataaccttaccagcacggttcaggtgtttactgactcggagtaccagctcccgtacgtcctcggctcggcgcatcaaggatgcctcccgccgttcccagcagacgtcttcatggtgccacagtatggatacctcaccctgaacaacgggagtcaggcggtaggacgctcttcattttactgcctggagtactttccttctcagatgctgcgtaccggaaacaactttaccttcagctacacctttgaggacgttccttttcacagcagctacgctcacagccagagtttggaccgtctcatgaatcctctcatcgaccagtacctgtattacttgagcagaacaaacactccaagcggaaccactacgcagtccaggcttcagttttctcaagccggagcgagtgacattcgggaccagtctaggaactggcttcctggaccctgttaccgccagcagcgagtatcaaagacagctgcggacaacaacaacagtgattactcgtggactggagctaccaagtatcacctcaatggaagagactctctggtgaatccgggcacagccatggccagccacaaggacgatgaagaaaagtattttcctcagagcggggttctcatcttcggaaaacaagactcgggaaaaactaatgtggacattgaaaaggtcatgattacagacgaagaggaaatcaggaccaccaatcccgtggctacggagcagtatggttctgtatctaccaatctccagagcggcaacacacaagcagctacctcagatgtcaacacacaaggcgttcttccaggcatggtctggcaggacagagacgtgtacctgcagggacccatctgggcaaagattccacacacggacggacactttcacccttctcctcttatgggaggatttggactgaagcaccctcccccgcagattctcatcaagagtaccccggtacctgcgaatccttctaccaccttcagcgcggcaaagtttgcttccttcatcacacagtactccacggggcaggtcagcgtggagatcgagtgggagctgcagaaggagaacagcaaacgctggaaccccgagatccagtacacttccaactacaacaaatctgttaatgtggactttactgtggacgctaatggtgtgtattcagagcctcgccccattggcaccagatacctgactcgtaatctgtaa

SEQ ID NO: 3381 - DNA, 2208 bp, synthetic construct
  misc_feature 1..2208: note = source = /note="Description of Artificial Sequence: Synthetic polynucleotide"
  source 1..2208: mol_type = other DNA
atggctgccgatggttatcttccagattggctcgaggacactctctctgaaggaataagacagtggtggaagctcaaacctggcccaccaccgccaaagcccgcagagcggcataaggacgacagcaggggtcttgtgcttcctgggtacaagtacctcggacccttcaacggactcgacaaaggagagccggtcaacgaggcagacgccgcggccctcgagcacgacaaggcctacgaccggcagctcgacagcggagacaacccgtacctcaagtacaaccacgccgacgcggagtttcaggagcgccttaaagaagatacgtcttttgggggcaacctcgcaagagcagtattccaggcgaaaaagagggttcttgaacctctgggcctggttgaggagcctgttaagacggctccgggaaaaaagaggccggtagagcactctcctgcggggccagattcctcctccggaactggaaagtcgggccaacagcctgcaagaaagagattgaattttggtcagactggagacgcagactccgtacctgacccccagcctctcggacagccaccagcagccccctctggtctgggaactaatacgatggcttcaggcagtggcgcaccaatggcagacaataacgagggcgccgacggagtgggtaattcctcgggaaattggcattgcgattccacatggatgggcgacagagtcatcaccaccagcacccgcacctgggctctgcccacctacaacaaccatctgtacaagcaaatttccagccagtctggagccagcaacgacaaccactactttggctacagcaccccttgggggtattttgacttcaacagattccactgccacttctccccacgtgactggcaaagactcatcaacaacaatttgggattccgggccaaaagactcaacttcgagctctttaacattcaagtcaaggaggtcacgcagaatgacggtacgacgacgattgccaataaccttaccagcacggttcaggtgtttactgactcggagtaccagctcccgtacgtcctcggctcggcgcatcaaggatgcctcccgccgttcccagcagacgtcttcatggtgccacagtatggatacctcaccctgaacaacgggagtcaggcggtaggacgctcttcattttactgcctggagtactttccttctcagatgctgcgtaccggaaacaactttaccttcagctacacctttgaggacgttccttttcacagcagctacgctcacagccagagtttggaccgtctcatgaatcctctcatcgaccagtacctgtattacttgagcagaacaaacactccaagcggaaccactacgcagtccaggcttcagttttctcaagccggagcgagtgacattcgggaccagtctaggaactggcttcctggaccctgttaccgccagcagcgagtatcaaagacagctgcggacaacaacaacagtgattactcgtggactggagctaccaagtatcacctcaatggaagagactctctggtgaatccgggcacagccatggccagccacaaggacgatgaagaaaagtattttcctcagagcggggttctcatcttcggaaaacaagactcgggaaaaactaatgtggacattgaaaaggtcatgattacagacgaagaggaaatcaggaccaccaatcccgtggctacggagcagtatggttctgtatctaccaatctccagagcggcaacacacaagcagctacctcagatgtcaacacacaaggcgttcttccaggcatggtctggcaggacagagacgtgtacctgcagggacccatctgggcaaagattccacacacggacggacactttcacccttctcctcttatgggaggatttggactgaagcaccctcccccgcagattctcatcaagagtaccccggtacctgcgaatccttctaccaccttcagcgcggcaaagtttgcttccttcatcacacagtactccacggggcaggtcagcgtggagatcgagtgggagctgcagaaagagaacagcaaacgctggaaccccgagatccagtatacctccaactacaacaagtctgttaatgtggactttactgtggacactaatggcgtgtattcagagcctcgccccattggcacaagatacctgactcgtaatctgtaa

SEQ ID NO: 3382 - DNA, 2208 bp, synthetic construct
  misc_feature 1..2208: note = source = /note="Description of Artificial Sequence: Synthetic polynucleotide"
  source 1..2208: mol_type = other DNA
atggctgccgatggttatcttccagattggctcgaggacactctctctgaaggaataagacagtggtggaagctcaaacctggcccaccaccgccaaagcccgcagagcggcataaggacgacagcaggggtcttgtgcttcctgggtacaagtacctcggacccttcaacggactcgacaaaggagagccggtcaacgaggcagacgccgcggccctcgagcacgacaaggcctacgaccggcagctcgacagcggagacaacccgtacctcaagtacaaccacgccgacgcggagtttcaggagcgccttaaagaagatacgtcttttgggggcaacctcgcaagagcagtattccaggcgaaaaagagggttcttgaacctctgggcctggttgaggagcctgttaagacggctccgggaaaaaagaggccggtagagcactctcctgcggagccagattcctcctccggaactggaaagtcgggccaacagcctgcaagaaagagattgaattttggtcagactggagacgcagactccgtacctgacccccagcctctcggacagccaccagcagccccctctggtctgggaactaatacgatggcttcaggcagtggcgcaccaatggcagacaataacgagggcgccgacggagtgggtaattcctcgggaaattggcattgcgattccacatggatgggcgacagagtcatcaccaccagcacccgcacctgggctctgcccacctacaacaaccatctgtacaagcaaatttccagccagtctggagccagcaacgacaaccactactttggctacagcaccccttgggggtattttgacttcaacagattccactgccacttctccccacgtgactggcaaagactcatcaacaacaattggggattccggcccaaaagactcaacttcgagctctttaacattcaagtcaaggaggtcacgcagaatgacggtacgacgacgattgccaataaccttaccagcacggttcaggtgtttactgactcggagtaccagctcccgtacgtcctcggctcggcgcatcaaggatgcctcccgccgttcccagcagacgtcttcatggtgccacagtatggatacctcaccctgaacaacgggagtcaggcggtaggacgctcttcattttactgcctggagtactttccttctcagatgctgcgtaccggaaacaactttaccttcagctacacctttgaggacgttccttttcacagcagctacgctcacagccagagtttggaccgtctcatgaatcctctcatcgaccagtacctgtattacttgagcagaacaaacactccaagcggaaccactacgcagtccaggcttcagttttctcaagccggagcgagtgacattcgggaccagtctaggaactggcttcctggaccctgttaccgccagcagcgagtatcaaagacagctgcggacaacaacaacagtgattactcgtggactggagctaccaagtatcacctcaatggaagagactctctggtgaatccgggcacagccatggccagccacaaggacgatgaagaaaagtattttcctcagagcggggttctcatcttccggaaacaagactcgggaaaaactaatgtggacattgaaaaggtcatgattacagacgaagaggaaatcaggaccaccaatcccgtggctacggagcagtatggttctgtatctaccaatctccagagcggcaacacacaagcagctacctcagatgtcaacacacaaggcgttcttccaggcatggtctggcaggacagagacgtgtacctgcagggacccatctgggcaaagattccacacacggacggacactttcacccttctcctcttatgggaggatttggactgaagcaccctcccccgcagattctcatcaagagtaccccggtacctgcgaatccttctaccaccttcagcgcggcaaagtttgcttccttcatcacacagtactccacggggcaggtcagcgtggagatcgagtgggagctgcagaaagagaacagcaaacgctggaaccccgagatccagtatacctccaactacaacaagtctgttaatgtggactttactgtggacactaatggcgtgtattcagagcctcgccccattggcacaagatacctgactcgtaatctgtaa

SEQ ID NO: 3383 - DNA, 2208 bp, synthetic construct
  misc_feature 1..2208: note = source = /note="Description of Artificial Sequence: Synthetic polynucleotide"
  source 1..2208: mol_type = other DNA
atggctgccgatggttatcttccagattggctcgaggacactctctctgaaggaataagacagtggtggaagctcaaacctggcccaccaccaccaaagcccgcagagcggcatcaggacgacagcaggggtcttgtgcttcccgggcacaagtacctcggacccttcaacggactcgacaaaggagagccggtcaacgaggcagacgctgcggccctcgagcacgacaaggcctacgaccggcagctcgacagcggagacaacccgtacctcaagtacaaccacgccgacgcggagtttcaggagcgtcttaaagaagatacgtcttttgggggcaacctcggacgagcagtcttccaggcgaaaaagagggttcttgaacctctgggcctggttgaggagcctgttaagacggctccgggaaaaaagaggccggtagagcactctcctgcggggccagattcctcctccggaactggaaagtcgggccaacagcctgcaagaaagagattgaattttggtcagactggagacgcagactccgtacctgacccccagcctctcggacagccaccagcagccccctctggtctgggaactaatacgatggcttcaggcagtggcgcaccaatggcagacaataacgagggcgccgacggagtgggtaattcctcgggaaattggcattgcgattccacatggatgggcgacagagtcatcaccaccagcacccgcacctgggctctgcccacctacaacaaccatctgtacaagcaaatttccagccagtctggagccagcaacgacaaccactactttggctacagcaccccttgggggtattttgacttcaacagattccactgccacttctccccacgtgactggcaaagactcatcaacaacaattggggattccggcccaaaagactcaacttcgagctctttaacattcaagtcaaggaggtcacgcagaatgacggtacgacgacgattgccaataaccttaccagcacggttcaggtgtttactgactcggagtaccagctcccgtacgtcctcggctcggcgcatcaaggatgcctcccgccgttcccagcagacgtcttcatggtgccacagtatggatacctcaccctgaacaacgggagtcaggcggtaggacgctcttcattttactgcctggagtactttccttctcagatgctgcgtaccggaaacaactttaccttcagctacacctttgaggacgttccttttcacagcagctacgctcacagccagagtttggaccgtctcatgaatcctctcatcgaccagtacctgtattacttgagcagaacaaacactccaagcggaaccactacgcagtccaggcttcagttttctcaagccggagcgagtgacattcgggaccagtctaggaactggcttcctggaccctgttaccgccagcagcgagtatcaaagacagctgcggacaacaacaacagtgattactcgtggactggagctaccaagtatcacctcaatggaagagactctctggtgaatccgggcacagccatggccagccacaaggacgatgaagaaaagtattttcctcagagcggggttctcatcttcggaaaacaagactcgggaaaaactaatgtggacattgaaaaggtcatgattacagacgaagaggaaatcaggaccaccaatcccgtggctacggagcagtatggttctgtatctaccaatctccagagcggcaacacacaagcagctacctcagatgtcaacacacaaggcgttcttccaggcatggtctggcaggacagagacgtgtacctgcagggacccatctgggcaaagattccacacacggacggacactttcacccttctcctcttatgggaggatttggactgaagcaccctcccccgcagattctcatcaagagtaccccggtacctgcgaatccttctaccaccttcagcgcggcaaagtttgcttccttcatcacacagtactccacggggcaggtcagcgtggagatcgagtgggagctgcagaaagagaacagcaaacgctggaaccccgagatccagtatacctccaactacaacaagtctgttaatgtggactttactgtggacactaatggcgtgtattcagagcctcgccccattggcacaagatacctgactcgtaatctgtaa

SEQ ID NO: 3384 - DNA, 2208 bp, synthetic construct
  misc_feature 1..2208: note = source = /note="Description of Artificial Sequence: Synthetic polynucleotide"
  source 1..2208: mol_type = other DNA
atggctgccgatggttatcttccagattggctcgaggacactctctctgaaggaataagacagtggtggaagctcaaacctggcccaccaccgccaaagcccgcagagcggcataaggacgacagcaggggtcttgtgcttcctgggtacaagtacctcggacccttcaacggactcgacaaaggagagccggtcaacgaggcagacgccgcggccctcgagcacgacaaggcctacgaccggcagctcgacagcggagacaacccgtacctcaagtacaaccacgccgacgcggagtttcaggagcgccttaaagaagatacgtcttttgggggcaacctcgcaagagcagtattccaggcgaaaaagagggttcttgaacctctgggcctggttgaggagcctgttaagacggctccgggaaaaaagaggccggtagagcactctcctgcggggccagattcctcctccggaactggaaagtcgggccaacagcctgcaagaaagagattgaattttggtcagactggagacgcagactccgtacctgacccccagcctctcggacagccaccagcagccccctctggtctgggaactaatacgatggcttcaggcagtggcgcaccaatggcagacaataacgagggcgccgacggagtgggtaattcctcgggaaattggcattgcgattccacatggatgggcgacagagtcatcaccaccagcacccgcacctgggctctgcccacctacaacaaccatctgtacaagcaaatttccagccagtctggagccagcaacgacaaccactactttggctacagcaccccttgggggtattttgacttcaacagattccactgccacttctccccacgtgactggcatagactcatcaacaacaattggggattccggcccaaaagactcaacttcgagctctttaacattcaagtcaaggaggtcacgcagaatgacggtacgacgacgattgccaataaccttaccagcacggttcaggtgtttactgactcggagtaccagctcccgtacgtcctcggctcggcgcatcaaggatgcctcccgccgttcccagcagacgtcttcatggtgccacagtatggatacctcaccctgaacaacgggagtcaggcggtaggacgctcttcattttactgcctggagtactttccttctcagatgctgcgtaccggaaacaactttaccttcagctacacctttgaggacgttccttttcacagcagctacgctcacagccagagtttggaccgtctcatgaatcctctcatcgaccagtacctgtattacttgagcagaacaaacactccaagcggaaccactacgcagtccaggcttcagttttctcaagccggagcgagtgacattcgggaccagtctaggaactggcttcctggaccctgttaccgccagcagcgagtatcaaagacagctgcggacaacaacaacagtgattactcgtggactggagctaccaagtatcacctcaatggaagagactctctggtgaatccgggcacagccatggccagccacaaggacgatgaagaaaagtattttcctcagagcggggttctcatcttcggaaaacaagactcgggaaaaactaatgtggacattgaaaaggtcatgattacagacgaagaggaaatcaggaccaccaatcccgtggctacggagcagtatggttctgtatctaccaatctccagagcggcaacacacaagcagctacctcagatgtcaacacacaaggcgttcttccaggcatggtctggcaggacagagacgtgtacctgcagggacccatctgggcaaagattccacacacggacggacactttcacccttctcctcttatgggaggatttggactgaagcaccctcccccgcagattctcatcaagagtaccccggtacctgcgaatccttctaccaccttcagcgcggcaaagtttgcttccttcatcacacagtactccacggggcaggtcagcgtggagatcgagtgggagctgcagaaagagaacagcaaacgctggaaccccgagatccagtatacctccaactacaacaagtctgttaatgtggactttactgtggacactaatggcgtgtattcagagcctcgccccattggcacaagatacctgactcgtaatctgtaa

SEQ ID NO: 3385 - DNA, 2208 bp, synthetic construct
  misc_feature 1..2208: note = source = /note="Description of Artificial Sequence: Synthetic polynucleotide"
  source 1..2208: mol_type = other DNA
atggctgccgatggttatcttccagattggctcgaggacactctctctgaaggaataagacagtggtggaagctcaaacctggcccaccaccgccaaagcccgcagagcggcataaggacgacagcaggggtcttgtgcttcctgggtacaagtacctcggacccttcaacggactcgacaagggggagccggtcaacgaggcagacgccgcggccctcgagcacgacaaggcctacgaccggcagctcgacagcggagacaacccgtacctcaagtacaaccacgccgacgcggagtttcaggagcgtcttaaagaagatacgtcttttgggggcaacctcggacgagcagtcttccaggcgaaaaagagggttcttgaacctctgggcctggttgaggaacctgttaagacggctccgggaaaaaagaggccggtagagcactctcctgtggagccagactcctcctcgggaaccggaaaggcgggccagcagcctgcaagaaaaagattgaatttcggtcagactggagacgcagactccgtacctgacccccagcctctcggacagccaccagcagccccctctggtctgggaactaatacgatggctacaggcagtggcgcaccaatggcagacaataacgagggcgccgacggagtgggtaattcctcgggaaattggcattgcgattccacatggatgggcgacagagtcatcaccaccagcacccgcacctgggctctgcccacctacaacaaccatctgtacaagcaaatttccagccaatcaggagcatcgaacgacaaccactactttggctacagcaccccctgggggtattttgacttcaacagattccactgccacttttcgccacgtgactggcaaagactcatcaacaacaactggggattccggcccaagagactcagcttcaagctctttaacattcaagtcaaggaggtcacgcagaatgacggtacgacgacgattgccaataaccttaccagcacggttcaggtctttactgactcggagtaccagctcccgtacgtcctcggctcggcgcatcaaggatgcctcccgccgttcccagcagacgtcttcatggtgccacagtatggatacctcaccctgaacaacgggagtcaggcggtaggacgctcttcattttactgcctggagtacttcccttctcagatgcttcgcacgggaaacaactttaccttcagctacacctttgaggacgtgccttttcacagcggctacgctcacagccaaagtctggaccgtctcatgaatcctctcatcgaccaatacctgtattacttgagcaaaacaaacgctccaagcggaaccaccacgatgtccaggcttcagttttctcaggccggagcgagtgacattcgggaccagtctagaaactggcttcctggaccctgttaccgccagcagcgagtatcaaagacagctgcggacaacaacaacagtgattactcgtggactggagctaccaagtaccacctcaatggaagagactctctggtgaacccgggcccagctatggccagccacaaggatgatgaagaaaaatattttcctcagagcggggttctcatcttcgggaaacaaggctcaaataaaactaatgtggacattgaaaaggttatgattacagacgaagaggaaatcaggaccaccaatcccgtggctacggagcagtatggttctgtatctaccaaccttcaaagcggcaacacacaagcagctacctcagatgtcaacacacaaggcgttcttcctggcatggtctggcaggacagagatgtgtacctgcaggggcccatctgggcaaagattcctcacacggacggacactttcacccttctcccctcatgggcggatttggattgaagcaccctcccccacagattctcatcaagaataccccggtacctgcgaatccttcgaccaccttcagtgcggcaaagtttgcttccttcatcacacagtattccacgggacaggtcagcgtggagatagagtgggagctgcagaaggagaacagcaaacgctggaaccccgagatccagtatacttccaactacaacaaatctgttaatgtggactttactgtggacactaatggtgtgtattcagagcctcgccccattggcaccagatacctgactcgtaatctgtaa

SEQ ID NO: 3386 - DNA, 2208 bp, synthetic construct
  misc_feature 1..2208: note = source = /note="Description of Artificial Sequence: Synthetic polynucleotide"
  source 1..2208: mol_type = other DNA
atggctgccgatggttatcttccagattggctcgaggacactctctctgaaggaataagacagtggtggaagctcaaacctggcccaccaccaccaaggcccgcagagcggcatcaggacgacagcaggggtcttgtgcttcctgggtacaagtacctcggacccttcaacggactcgacaaaggagagccggtcaacgaggcagacgctgcggccctcgagcacgacaaggcctacgaccggcagctcgacagcggagacaacccgtacctcaagtacaaccacgccgacgcggagtttcaggagcgtcttaaagaagatacgtcttttgggggcaacctcggacgagcagtcttccaggcgaaaaagagggttcttgaacctctgggcctggttgaggaacctgttaagacggctccgggaaaaaagaggccggtagagcactctcctgcggagccagactcctcctcgggaaccggaaaagcgggccagcagcctgcaagaaagagattgaatttcggtcagactggagacgcagactccgtacctgacccccagcctctcggacagccaccagcagcccccacaagtttgggatctactacaatggctacaggcagtggcgcaccaatggcagacaataacgagggcgccgacggagtgggtaattcctcgggaaattggcattgcgattccacatggatgggcgacagagtcatcaccaccagcacccgcacctgggctctgcccacctacaacaaccatctgtacaagcaaatttccagccagtctggagccagcaacgacaaccactactttggctacagcaccccttgggggtattttgacttcaacagattccactgccacttctccccacgtgactggcaaagactcatcaacaacaattggggattccggcccaaaagactcaacttcgagctctttaacattcaagtcaaggaggtcacgcagaatgacggtacgacgacgattgccaataaccttaccagcacggttcaggtgtttactgactcggagtaccagctcccgtacgtcctcggctcggcgcatcaaggatgcctcccgccgttcccagcagacgtcttcatggtgccacagtatggatacctcaccctgaacaacgggagtcaggcggtaggacgctcttcattttactgcctggagtactttccttctcagatgctgcgtaccggaaacaactttaccttcagctacacctttgaggacgttccttttcacagcagctacgctcacagccagagtttggaccgtctcatgaatcctctcatcgaccagtacctgtattacttgagcagaacaaacactccaagcggaaccactacgcagtccaggcttcagttttctcaagccggagcgagtgacattcgggaccagtctaggaactggcttcctggaccctgttaccgccagcagcgagtatcaaagacagctgcggacaacaacaacagtgattactcgtggactggagctaccaagtatcacctcaatggaagagactctctggtgaatccgggcacagccatggccagccacaaggacgatgaagaaaagtattttcctcagagcggggttctcatcttcggaaaacaagactcgggaaaaactaatgtggacattgaaaaggtcatgattacagacgaagaggaaatcaggaccaccaatcccgtggctacggagcagtatggttctgtatctaccaatctccagagcggcaacacacaagcagctacctcagatgtcaacacacaaggcgttcttccaggcatggtctggcaggacagagacgtgtacctgcagggacccatctgggcaaagattccacacacggacggacactttcacccttctcctcttatgggaggatttggactgaagcaccctcccccgcagattctcatcaagagtaccccggtacctgcgaatccttctaccaccttcagcgcggcaaagtttgcttccttcatcacacagtactccacggggcaggtcagcgtggagatcgagtgggagctgcagaaagagaacagcaaacgctggaaccccgagatccagtatacctccaactacaacaagtctgttaatgtggactttactgtggacactaatggcgtgtattcagagcctcgccccattggcacaagatacctgactcgtaatctgtaa

SEQ ID NO: 3387 - DNA, 2208 bp, synthetic construct
  misc_feature 1..2208: note = source = /note="Description of Artificial Sequence: Synthetic polynucleotide"
  source 1..2208: mol_type = other DNA
atggctgccgatggttatcttccagattggctcgaggacactctctctgaaggaataagacagtggtggaagctcaaacctggcccaccaccaccaaagcccgcagagcggcatcaggacgacagcaggggtcttgtgcttcccgggcacaagtacctcggacccttcaacggactcgacaaaggagagccggtcaacgaggcagacgctgcggccctcgagcacgacaaggcctacgaccggcagctcgacagcggagacaacccgtacctcaagtacaaccacgccgacgcggagtttcaggagcgtcttaaagaagatacgtcttttgggggcaacctcggacgagcagtcttccaggcgaaaaagagggttcttgaacctctgggcctggttgaggaacctgttaagacggctccgggaaaaaagaggccggtagagcactctcctgcggagccagactcctcctcgggaaccggaaaagcgggccagcagcctgcaagaaagagattgaatttcggtcagactggagacgcagactccgtacctgacccccagcctctcggacagccaccagcagccccctctggtctgggaactaatacgatggcttcaggcagtggcgcaccaatggcagacaataacgagggcgccgacggagtgggtaattcctcgggaaattggcattgcgattccacatggatgggcgacagagtcatcaccaccagcacccgcacctgggctctgcccacctacaacaaccatctgtacaagcaaatttccagccagtctggagccagcaacgacaaccactactttggctacagcaccccttgggggtattttgacttcaacagattccactgccacttctccccacgtgactggcaaagactcatcaacaacaattggggattccggcccaaaagactcaacttcgagctctttaacattcaagtcaaggaggtcacgcagaatgacggtacgacgacgattgccaataaccttaccagcacggttcaggtgtttactgactcggagtaccagctcccgtacgtcctcggctcggcgcatcaaggatgcctcccgccgttcccagcagacgtcttcatggtgccacagtatggatacctcaccctgaacaacgggagtcaggcggtaggacgctcttcattttactgcctggagtactttccttctcagatgctgcgtaccggaaacaactttaccttcagctacacctttgaggacgttccttttcacagcagctacgctcacagccagagtttggaccgtctcatgaatcctctcatcgaccagtacctgtattacttgagcagaacaaacactccaagcggaaccactacgcagtccaggcttcagttttctcaagccggagcgagtgacattcgggaccagtctaggaactggcttcctggaccctgttaccgccagcagcgagtatcaaagacagctgcggacaacaacaacagtgattactcgtggactggagctaccaagtatcacctcaatggaagagactctctggtgaatccgggcacagccatggccagccacaaggacgatgaagaaaagtattttcctcagagcggggttctcatcttcggaaaacaagactcgggaaaaactaatgtggacattgaaaaggtcatgattacagacgaagaggaaatcaggaccaccaatcccgtggctacggagcagtatggttctgtatctaccaatctccagagcggcaacacacaagcagctacctcagatgtcaacacacaaggcgttcttccaggcatggtctggcaggacagagacgtgtacctgcagggacccatctgggcaaagattccacacacggacggacactttcacccttctcctcttatgggaggatttggactgaagcaccctcccccgcagattctcatcaagagtaccccggtacctgcgaatccttctaccaccttcagcgcggcaaagtttgcttccttcatcacacagtactccacggggcaggtcagcgtggagatcgagtgggagctgcagaaagagaacagcaaacgctggaaccccgagatccagtatacctccaactacaacaagtctgttaatgtggactttactgtggacactaatggcgtgtattcagagcctcgccccattggcacaagatacctgactcgtaatctgtaa

SEQ ID NO: 3388 - DNA, 2208 bp, synthetic construct
  misc_feature 1..2208: note = source = /note="Description of Artificial Sequence: Synthetic polynucleotide"
  source 1..2208: mol_type = other DNA
atggctgccgatggttatcttccagattggctcgaggacactctctctgaaggaataagacagtggtggaagctcaaacctggcccaccaccgccaaagcccgcagagcggcataaggacgacagcaggggtcttgtgcttcctgggtacaagtacctcggacccttcaacggactcgacaaaggagagccggtcaacgaggcagacgccgcggccctcgagcacgacaaggcctacgaccggcagctcgacagcggagacaacccgtacctcaagtacaaccacgccgacgcggagtttcaggagcgccttaaagaagatacgtcttttgggggcaacctcgcaagagcagtattccaggcgaaaaagagggttcttgaacctctgggcctggttgaggagcctgttaagacggctccgggaaaaaagaggccggtagagcactctcctgcggagccagattcctcctccggaactggaaagtcgggccaacagcctgcaagaaagagattgaattttggtcagactggagacgcagactccgtacctgacccccagcctctcggacagccaccagcagccccctctggtctgggaactaatacgatggcttcaggcagtggcgcaccaatggcagacaataacgagggcgccgacggagtgggtaattcctcgggaaattggcattgcgattccacatggatgggcgacagagtcatcaccaccagcacccgcacctgggctctgcccacctacaacaaccatctgtacaagcaaatttccagccagtctggagccagcaacgacaaccactactttggctacagcaccccttgggggtattttgacttcaacagattccactgccacttctccccacgtgactggcaaagactcatcaacaacaattggggattccggcccaaaagactcaacttcaagctctttaacattcaagtcaaggaggtcacgcagaatgacggtacgacgacgattgccaataaccttaccagcacggttcaggtgtttactgactcggagtaccagctcccgtacgtcctcggctcggcgcatcaaggatgcctcccgccgttcccagcagacgtcttcatggtgccacagtatggatacctcaccctgaacaacgggagtcaggcggtaggacgctcttcattttactgcctggagtactttccttctcagatgctgcgtaccggaaacaactttaccttcagctacacctttgaggacgttccttttcacagcagctacgctcacagccagagtttggaccgtctcatgaatcctctcatcgaccagtacctgtattacttgagcagaacaaacactccaagcggaaccactacgcagtccaggcttcggttttctcaagccggagcgagtgacattcgggaccagtctaggaactggcttcctggaccctgttaccgccagcagcgagtatcaaagacagctgcggacaacaacaacagtgattactcgtggactggagctaccaagtatcacctcaatggaagagactctctggtgaatccgggcacagccatggccagccacaaggacgatgaagaaaagtattttcctcagagcggggttctcatcttcggaaaacaagactcggaaaaaactaatgtggacattgaaagggtcatgattacagacgaagaggaaatcaggaccaccaatcccgtggctacggagcagtatggttctgtatctaccaatctccagagcggcaacacacaagcagctacctcagatgtcaacacacaaggcgttcttccaggcatggtctggcaggacagagacgtgtacctgcagggacccatctgggcaaagattccacacacggacggacattttcacccttctcctcttatgggaggatttggactgaagcaccctcccccgcagattctcatcaagaataccccggtacctgcgaatccttctaccaccttcagcgcggcaaagtttgcttccttcatcacacagtactccacggggcaggtcagcgtggagatcgagtgggagctgcagaaagagaacagcaaacgctggaaccccgagatccagtatacctccaactacaacaagtctgttaatgtggactttactgtggacactaatggcgtgtattcagagcctcgccccattggcacaagatacctgactcgtaatctgtaa

SEQ ID NO: 3389 - DNA, 2208 bp, synthetic construct
  misc_feature 1..2208: note = source = /note="Description of Artificial Sequence: Synthetic polynucleotide"
  source 1..2208: mol_type = other DNA
atggctgccgatggttatcttccagattggctcgaggacactctctctgaaggaataagacagtggtggaagctcaaacctggcccaccaccaccaaagcccgcagagcggcatcaggacgacagcaggggtcttgtgcttcctgggtacaagtacctcggacccttcaacggactcgacaaaggagagccggtcaacgaggcagacgccgcggccctcgagcacgacaaggcctacgaccggcagctcgacagcggagacaacccgtacctcaagtacaaccacgccgacgcggagtttcaggagcgtcttaaagaagatacgtcttttgggggcaacctcggacgagcagtcttccaggcgaaaaagagggttcttgaacctctgggcctggttgaggaacctgttaagacggctccgggaaaaaagaggccggtagagcactctcctgtggagccagactcctcctcgggaaccggaaaggcgggccagcagcctgcaagaaaaagattgaatttcggtcagactggagacgcagactccgtacctgacccccagcctctcggacagccaccagcagccccctctggtctgggaactaatacgatggctacaggcagtggcgcaccaatggcagacaataacgagggcgccgacggagtgggtaattcctcgggaaattggcattgcgattccacatggatgggcgacagagtcatcaccaccagcacccgcacctgggctctgcccacctacaacaaccatctgtacaagcaaatttccagccaatcaggagcatcgaacgacaaccactactttggctacagcaccccctgggggtattttgacttcaacagattccactgccacttttcgccacgtgactggcaaagactcatcaacaacaactggggattccggcccaagagactcagcttcaagctctttaacattcaagtcaaggaggtcacgcagaatgacggtacgacgacgattgccaataaccttaccagcacggttcaggtctttactgactcggagtaccagctcccgtacgtcctcggctcggcgcatcaaggatgcctcccgccgttcccagcagacgtcttcatggtgccacagtatggatacctcaccctgaacaacgggagtcaggcggtaggacgctcttcattttactgcctggagtacttcccttctcagatgcttcgcacgggaaacaactttaccttcagctacacctttgaggacgtgccttttcacagcagctacgctcacagccaaagtctggaccgtctcatgaatcctctcatcgaccaatacctgtattacttgagcaaaacaaacgctccaagcggaaccaccacgatgtccaggcttcagttttctcaggccggagcgagtgacattcgggaccagtctagaaactggcttcctggaccctgttaccgccagcagcgagtatcaaagacagctgcggacaacaacaacagtgattactcgtggactggagctaccaagtaccacctcaatggaagagactctctggtgaacccgggcccagctatggccagccacaaggatgatgaagaaaaatattttcctcagagcggggttctcatcttcgggaaacaaggctcaaataaaactaatgtggacattgaaaaggttatgattacagacgaagaggaaatcaggaccaccaatcccgtggctacggagcagtatggttctgtatctaccaaccttcaaagcggcaacacacaagcagctacctcagatgtcaacacacaaggcgttcttcctggcatggtctggcaggacagagatgtgtacctgcaggggcccatctgggcaaagattcctcacacggacggacactttcacccttctcccctcatgggcggatttggattgaagcaccctcccccacagattctcatcaagaataccccggtacctgcgaatccttcgaccaccttcagtgcggcaaagtttgcttccttcatcacacagtattccacgggacaggtcagcgtggagatagagtgggagctgcagaaggagaacagcaaacgctggaaccccgagatccagtatacttccaactacaacaaatctgttaatgtggactttactgtggacactaatggtgtgtattcagagcctcgccccattggcaccagatacctgactcgtaatctgtaa

SEQ ID NO: 3390 - DNA, 2208 bp, synthetic construct
  misc_feature 1..2208: note = source = /note="Description of Artificial Sequence: Synthetic polynucleotide"
  source 1..2208: mol_type = other DNA
atggctgccgatggttatcttccagattggctcgaggacactctctctgaaggaataagacagtggtggaagctcaaacctggcccaccaccaccaaggcccgcagagcggcatcaggacgacagcaggggtcttgtgcttcctgggtacaagtacctcggacccttcaacggactcgacaaaggagagccggtcaacgaggcagacgctgcggccctcgagcacgacaaggcctacgaccggcagctcgacagcggagacaacccgtacctcaagtacaaccacgccgacgcggagtttcaggagcgtcttaaagaagatacgtcttttgggggcaacctcggacgagcagtcttccaggcgaaaaagagggttcttgaacctctgggcctggttgaggaacctgttaagacggctccgggaaaaaagaggccggtagagcactctcctgcggggccagattcctcctccggaactggaaagtcgggccaacagcctgcaagaaagagattgaattttggtcagactggagacgcagactccgtacctgacccccagcctctcggacagccaccagcagccccctctggtctgggaactaatacgatggcttcaggcagtggcgcaccaatggcagacaataacgagggcgccgacggagtgggtaattcctcgggaaattggcattgcgattccacatggatgggcgacagagtcatcaccaccagcacccgcacctgggctctgcccacctacaacaaccatctgtacaagcaaatttccagccagtctggagccagcaacgacaaccactactttggctacagcaccccttgggggtattttgacttcaacagattccactgccacttctccccacgtgactggcaaagactcatcaacaacaattggggattccgggccaaaagactcaacttcgagctctttaacattcaagtcaaggaggtcacgcagaatgacggtacgacgacgattgccaataaccttaccagcacggttcaggtgtttactgactcggagtaccagctcccgtacgtcctcggctcggcgcatcaaggatgcctcccgccgttcccagcagacgtcttcatggtgccacagtatggatacctcaccctgaacaacgggagtcaggcggtaggacgctcttcattttactgcctggagtactttccttctcagatgctgcgtaccggaaacaactttaccttcagctacacctttgaggacgttccttttcacagcagctacgctcacagccagagtttggaccgtctcatgaatcctctcatcgaccagtacctgtattacttgagcagaacaaacactccaagcggaaccactacgcagtccaggcttcagttttctcaagccggagcgagtgacattcgggaccagtctaggaactggcttcctggaccctgttaccgccagcagcgagtatcaaagacagctgcggacaacaacaacagtgattactcgtggactggagctaccaagtatcacctcaatggaagagactctctggtgaatccgggcacagccatggccagccacaaggacgatgaagaaaagtattttcctcagagcggggttctcatcttcggaaaacaagactcgggaaaaactaatgtggacattgaaaaggtcatgattacagacgaagaggaaatcaggaccaccaatcccgtggctacggagcagtatggttctgtatctaccaatctccagagcggcaacacacaagcagctacctcagatgtcaacacacaaggcgttcttccaggcatggtctggcaggacagagacgtgtacctgcagggacccatctgggcaaagattccacacacggacggacactttcacccttctcctcttatgggaggatttggactgaagcaccctcccccgcagattctcatcaagagtaccccggtacctgcgaatccttctaccaccttcagcgcggcaaagtttgcttccttcatcacacagtactccacggggcaggtcagcgtggagatcgagtgggagctgcagaaagagaacagcaaacgctggaaccccgagatccagtatacctccaactacaacaagtctgttaatgtggactttactgtggacactaatggcgtgtattcagagcctcgccccattggcacaagatacctgactcgtaatctgtaa

SEQ ID NO: 3391 - DNA, 2208 bp, synthetic construct
  misc_feature 1..2208: note = source = /note="Description of Artificial Sequence: Synthetic polynucleotide"
  source 1..2208: mol_type = other DNA
atggctgccgatggttatcttccagattggctcgaggacactctctctgaaggaataagacagtggtggaagctcaaacctggcccaccaccgccaaagcccgcagagcggcataaggacgacagcaggggtcttgtgcttcctgggtacaagtacctcggacccttcaacggactcgacaaaggagagccggtcaacgaggcagacgccgcggccctcgagcacgacaaggcctacgaccggcagctcgacagcggagacaacccgtacctcaagtacaaccacgccgacgcggagtttcaggagcgccttaaagaagatacgtcttttgggggcaacctcgcaagagcagtattccaggcgaaaaagagggttcttgaacctctgggcctggttgaggagcctgttaagacggctccgggaaaaaagaggccggtagagcactctcctgcggggccagattcctcctccggaactggaaagtcgggccaacagcctgcaagaaagagattgaattttggtcagactggagacgcagactccgtacctgacccccagcctctcggacagccaccagcagccccctctggtctgggaactaatacgatggcttcaggcagtggcgcaccaacggcagacaataacgagggcgccgacggagtgggtaattcctcgggaaattggcattgcgattccacatggatgggcgacagagtcatcaccaccagcacccgcacctgggctctgcccacctacaacaaccatctgtacaagcaaatttccagccagtctggagccagcaacgacaaccactactttggctacagcaccccttgggggtattttgacttcaacagattccactgccacttctccccacgtgactggcaaagactcatcaacaacaattggggattccggcccaaaagactcaacttcgagctctttaacattcaagtcaaggaggtcacgcagaatgacggtacgacgacgattgccaataaccttaccagcacggttcaggtgtttaccgactcggagtaccagctcccgtacgtcctcggctcggcgcatcaaggatgcctcccgccgttcccagcagacgtcttcatggtgccacagtatggatacctcaccctgaacaacgggagtcaggcggtaggacgctcttcattttactgcctggagtactttccttctcagatgctgcgtaccggaaacaactttaccttcagctacacctttgaggacgttccttttcacagcagctacgctcacagccagagtttggaccgtctcatgaatcctctcatcgaccagtacctgtattacttgagcagaacaaacactccaagcggaaccactacgcagtccaggcttcagttttctcaagccggagcgagtgacattcgggaccagtctaggaactggcttcctggaccctgttaccgccagcagcgagtatcaaagacagctgcggacaacaacaacagtgattactcgtggactggagctaccaagtatcacctcaatggaagagactctctggtgaatccgggcacagccatggccagccacaaggacgatgaagaaaagtattttcctcagagcggggttctcatcttcggaaaacaagactcgggaaaaactaatgtggacattgaaaaggtcatgattacagacgaagaggaaatcaggaccaccaatcccgtggctacggagcagtatggttctgtatctaccaatctccagagcggcaacacacaagcagctacctcagatgtcaacacacaaggcgttcttccaggcatggtctggcaggacagagacgtgtacctgcagggacccatctgggcaaagattccacacacggacggacactttcacccttctcctcttatgggaggatttggactgaagcaccctcccccgcagattctcatcaagagtaccccggtacctgcgaatccttctaccaccttcagcgcggcaaagtttgcttccttcatcacacagtactccacggggcaggtcagcgtggagatcgagtgggagctgcagaaagagaacagcaaacgctggaaccccgagatccagtatacctccaactacaacaagtctgttaatgtggactttactgtggacactaatggcgtgtattcagagcctcgccccattggcacaagatacctgactcgtaatctgtaa

SEQ ID NO: 3392 - DNA, 2208 bp, synthetic construct
  misc_feature 1..2208: note = source = /note="Description of Artificial Sequence: Synthetic polynucleotide"
  source 1..2208: mol_type = other DNA
atggctgccgatggttatcttccagattggctcgaggacactctctctgaaggaataagacagtggtggaagctcaaacctggcccaccaccgccaaagcccgcagagcggcataaggacgacagcaggggtcttgtgcttcctgggtacaagtacctcggacccttcaacggactcgacaaaggagagccggtcaacgaggcagacgccgcggccctcgagcacgacaaggcctacgaccggcagctcgacagcggagacaacccgtacctcaagtacaaccacgccgacgcggagtttcaggagcgccttaaagaagatacgtcttttgggggcaacctcgcaagagcagtattccaggcgaaaaagagggttcttgaacctctgggcctggttgaggagcctgttaagacggctccgggaaaaaagaggccggtagagcactctcctgcggggccagattcctcctccggaactggaaagtcgggccaacagcctgcaagaaagagattgaattttggtcagactggagacgcagactccgtacctgacccccagcctctcggacagccaccagcagccccctctggtctgggaactaatacgatggcttcaggcagtggcgcaccaatggcagacaataacgagggcgccgacggagtgggtaattcctcgggaaattggcattgcgattccacatggatgggcgacagagtcatcaccaccagcacccgcacctgggctctgcccacctacaacaaccatctgtacaagcaaatttccagccagtctggagccagcaacgacaaccactactttggctacagcaccccttgggggtattttgacttcaacagattccactgccacttctccccacgtgactggcaaagactcatcaacaacaattggggattccggcccaaaagactcaacttcgagctctttaacattcaagtcaaggaggtcacgcagaatgacggtacgacgacgattgccaataaccttaccagcacggttcaggtgtttactgactcggagtaccagctcccgtacgtcctcggctcggcgcatcaaggatgcctcccgccgttcccagcagacgtcttcatggtgccacagtatggatacctcaccctgaacaacgggagtcaggcggtaggacgctcttcattttactgcctggagtactttccttctcagatgctgcgtaccggaaacaactttaccttcagctacacctttgaggacgttccttttcacagcagctacgctcacagccagagtttggaccgtctcatgaatcctctcatcgaccagtacctgtattacttgagcagaacaaacactccaagcggaaccactacgcagtccaggcttcagttttctcaagccggagcgagtgacattcgggaccagtctaggaactggcttcctggaccctgttaccgccagcagcgagtatcaaagacagctgcggacaacaacaacagtgattactcgtggactggagctaccaagtatcacctcaatggaagagactctctggtgaatccgggcacagccatggccagccacaaggacgatgaagaaaagtattttcctcagagcggggttctcatcttccggaaacaagactcgggaaaaactaatgtggacattgaaaaggtcatgattacagacgaagaggaaatcaggaccaccaatcccgtggctacggagcagtatggttctgtatctaccaatctccagagcggcaacacacaagcagctacctcagatgtcaacacacaaggcgttcttccaggcatggtctggcaggacagagacgtgtacctgcagggacccatctgggcaaagattccacacacggacggacactttcacccttctcctcttatgggaggatttggactgaagcaccctcccccgcagattctcatcaagagtaccccggtacctgcgaatccttctaccaccttcagcgcggcaaagtttgcttccttcatcacacagtactccacggggcaggtcagcgtggagatcgagtgggagctgcagaaagagaacagcaaacgctggaaccccgagatccagtatacctccaactacaacaagtctgttaatgtggactttactgtggacactaatggcgtgtattcagagcctcgccccattggcacaagatacctgactcgtaatctgtaa

SEQ ID NO: 3393 - DNA, 2208 bp, synthetic construct
  misc_feature 1..2208: note = source = /note="Description of Artificial Sequence: Synthetic polynucleotide"
  source 1..2208: mol_type = other DNA
atggctgccgatggttatcttccagattggctcgaggacactctctctgaaggaataagacagtggtggaagctcaaacctggcccaccaccgccaaagcccgcagagcggcataaggacgacagcaggggtcttgtgcttcctgggtacaagtacctcggacccttcaacggactcgacaaaggagagccggtcaacgaggcagacgccgcggccctcgagcacgacaaggcctacgaccggcagctcgacagcggagacaacccgtacctcaagtacaaccacgccgacgcggagtttcaggagcgccttaaagaagatacgtcttttgggggcaacctcgcaagagcagtattccaggcgaaaaagagggttcttgaacctctgggcctggttgaggagcctgttaagacggctccgggaaaaaagaggccggtagagcactctcctgcggagccagattcctcctccggaactggaaagtcgggccaacagcctgcaagaaagagattgaattttggtcagactggagacgcagactccgtacctgaccctcagcctctcggacagccaccagcagccccctctggtctgggaactaatacgatggcttcaggcagtggcgcaccaatggcagacaataacgagggcgccgacggagtgggtaattcctcgggaaattggcattgcgattccacatggatgggcgacagagtcatcaccaccagcacccgcacctgggctctgcccacctacaacaaccatctgtacaagcaaatttccagccagtctggagccagcaacgacaaccactactttggctacagcaccccttgggggtattttgacttcaacagattccactgccacttctccccacgtgactggcaaagactcatcaacaacaattggggattccggcccaaaagactcaacttcaagctctttaacattcaagtcaaggaggtcacgcagaatgacggtacgacgacgattgccaataaccttaccagcacggttcaggtgtttactgactcggagtaccagctcccgtacgtcctcggctcggcgcatcaaggatgcctcccgccgttcccagcagacgtcttcatggtgccacagtatggatacctcaccctgaacaacgggagtcaggcggtaggacgctcttcattttactgcctggagtactttccttctcagatgctgcgtaccggaaacaactttaccttcagctacacctttgaggacgttccttttcacagcagctacgctcacagccagagtttggaccgtctcatgaatcctctcatcgaccagtacctgtattacttgagcagaacaaacactccaagcggaaccactacgcagtccaggcttcagttttctcaagccggagcgagtgacattcgggaccagtctaggaactggcttcctggaccctgttaccgccagcagcgagtatcaaagacagctgcggacaacaacaacagtgattactcgtggactggagctaccaagtatcacctcaatggaagagactctctggtgaatccgggcacagccatggccagccacaaggacgatgaagaaaagtattttcctcagagcggggctctcatcttcggaaaacaagactcgggaaaaactaatgtggacattgaaaaggtcatgattacagacgaagaggaaatcaggaccaccaatcccgtggctacggagcagtatggttctgtatctaccaatctccagagcggcaacacacaagcagctacctcagatgtcaacacacaaggcgttcttccaggcatggtctggcaggacagagacgtgtacctgcagggacccatctgggcaaagattccacacacggacggacattttcacccttctcctcttatgggaggatttggactgaagcaccctcccccgcagattctcatcaagaataccccggtacctgcgaatccttctaccaccttcagcgcggcaaagtttgcttccttcatcacacagtactccacggggcaggtcagcgtggagatcgagtgggagctgcagaaagagaacagcaaacgctggaaccccgagatccagtatacctccaactacaacaagtctgttaatgtggactttactgtggacactaatggcgtgtattcagagcctcgccccattggcacaagatacctgactcgtaatctgtaa

SEQ ID NO: 3394 - DNA, 2208 bp, synthetic construct
  misc_feature 1..2208: note = source = /note="Description of Artificial Sequence: Synthetic polynucleotide"
  source 1..2208: mol_type = other DNA
atggctgccgatggttatcttccagattggctcgaggacactctctctgaaggaataagacagtggtggaagctcaaacctggcccaccaccgccaaagcccgcagagcggcataaggacgacagcaggggtcttgtgcttcctgggtacaagtacctcggacccttcaacggactcgacaaaggagagccggtcaacgaggcagacgccgcggccctcgagcacgacaaggcctacgaccggcagctcgacagcggagacaacccgtacctcaagtacaaccacgccgacgcggagtttcaggagcgccttaaagaagatacgtcttttgggggcaacctcgcaagagcagtattccaggcgaaaaagagggttcttgaacctctgggcctggttgaggagcctgttaagacggctccgggaaaaaagaggccggtagagcactctcctgcggagccaggttcctcctccggaactggaaagtcgggccaacagcctgcaagaaagagattgaattttggtcagactggagacgcagactccgtacctgacccccagcctctcggacagccaccagcagccccctctggtctgggaactaatacgatggcttcaggcagtggcgcaccaatggcagacaataacgagggcgccgacggagtgggtaattcctcgggaaattggcattgcgattccacatggatgggcgacagagtcatcaccaccagcacccgcacctgggctctgcccacctacaacaaccatctgtacaagcaaatttccagccagtctggagccagcaacgacaaccactactttggctacagcaccccttgggggtattttgacttcaacagattccactgccacttctccccacgtgactggcaaagactcatcaacaacaattggggattccggcccaaaagactcaacttcaagctctttaacattcaagtcaaggaggtcacgcagaatgacggtacgacgacgattgccaataaccttaccagcacggttcaggtgtttactgactcggagtaccagctcccgtacgtcctcggctcggcgcatcaaggatgcctcccgccgttcccagcagacgtcttcatggtgccacagtatggatacctcaccctgaacaacgggagtcaggcggtaggacgctcttcattttactgcctggagtactttccttctcagatgctgcgtaccggaaacaactttaccttcagctacacctttgaggacgttccttttcacagcagctacgctcgcagccagagtttggaccgtctcatgaatcctctcatcgaccagtacctgtattacttgagcagaacaaacactccaagcggaaccactacgcagtccaggcttcggttttctcaagccggagcgagtgacattcgggaccagtctaggaactggcttcctggaccctgttaccgccagcagcgagtatcaaagacagctgcggacaacaacaacagtgattactcgtggactggagctaccaagtatcacctcaatggaagagactctctggtgaatccgggcacagccatggccagccacaaggacgatgaagaaaagtattttcctcagagcggggttctcatcttcggaaaacaagactcgggaaaaactaatgtggacattgaaagggtcatgattacagacgaagaggaaatcaggaccaccaatcccgtggctacggagcagtatggttctgtatctaccaatctccagagcggcaacacacaagcagctacctcagatgtcaacacacaaggcgttcttccaggcatggtctggcaggacagagacgtgtacctgcagggacccatctgggcaaagattccacacacggacggacattttcacccttctcctcttatgggaggatttggactgaagcaccctcccccgcagattctcatcaagaataccccggtacctgcgaatccttctaccaccttcagcgcggcaaagtttgcttccttcatcacacagtactccacggggcaggtcagcgtggagatcgagtgggagctgcagaaagagaacagcaaacgctggaaccccgagatccagtatacctccaactacaacaagtctgttaatgtggactttactgtggacactaagggcgtgtattcagagcctcgccccattggcacaagatacctgactcgtaatctgtaa

SEQ ID NO: 3395 - DNA, 2208 bp, synthetic construct
  misc_feature 1..2208: note = source = /note="Description of Artificial Sequence: Synthetic polynucleotide"
  source 1..2208: mol_type = other DNA
atggctgccgatggttatcttccagattggctcgaggacactctctctgaaggaataagacagtggtggaagctcaaacctggcccaccaccgccaaagcccgcagagcggcataaggacgacagcaggggtcttgtgcttcctgggtacaagtacctcggacccttcaacggactcgacaaaggagagccggtcaacgaggcagacgccgcggccctcgagcacgacaaggcctacgaccggcagctcgacagcggagacaacccgtacctcaagtacaaccacgccgacgcggagtttcaggagcgccttaaagaagatacgtcttttgggggcaacctcgcaagagcagtattccaggcgaaaaagagggttcttgaacctctgggcctggttgaggagcctgttaagacggctccgggaaaaaagaggccggtagagcactctcctgcggagccagattcctcctccggaactggaaagtcgggccaacagcctgcaagaaagagattgaattttggtcagactggagacgcagactccgtacctgacccccagcctctcggacagccaccagcagccccctctggtctgggaactaatacgatggcttcaggcagtggcgcaccaatggcagacaataacgagggcgccgacggagtgggtaattcctcgggaaattggcattgcgattccacatggatgggcgacagagtcatcaccaccagcacccgcacctgggctctgcccacctacaacaaccatctgtacaagcaaatttccagccagtctggagccagcaacgacaaccactactttggctacagcaccccttgggggtattttgacttcaacagattccactgccacttctccccacgtgactggcaaagactcatcaacaacaattggggattccggcccaaaagactcaacttcaagctctttaacattcaagtcaaggaggtcacgcagaatgacggtacgacgacgattgccaataaccttaccagcacggttcaggtgtttactgactcggagtaccagctcccgtacgtcctcggctcggcgcatcaaggatgcctcccgccgttcccagcagacgtcttcatggtgccacagtatggatacctcaccctgaacaacgggagtcaggcggtaggacgctcttcattttactgcctggagtactttccttctcagatgctgcgtaccggaaacaactttaccttcagctacacctttgaggacgttccttttcacagcagctacgctcacagccagagtttggaccgtctcatgaatcctctcatcgaccagtacctgtattacttgagcagaacaaacactccaagcggaaccactacgcagtccaggcttcagttttctcaagccggagcgagtgacattcgggaccagtctaggaactggcttcctggaccctgttaccgccagcagcgagtatcaaagacagctgcggacaacaacaacagtgattactcgtggactggagctaccaagtatcacctcaatggaagagactctctggtgaatccgggcacagccatggccagccacaaggacgatgaagaaaagtattttcctcagagcggggttctcatcttcggaaaacaagactcgggaaaaactaatgtggacattgaaaaggtcatgattacagacgaagaggaaatcaggaccaccaatcccgtggctacggagcagtatggttctgtatctaccaatctccagagcggcaacacacaagcagctacctcagatgtcaacacacaaggcgttcttccaggcatggtctggcaggacagagacgtgtacctgcagggacccatctgggcaaagattccacacacggacggacactttcacccttctcctcttatgggaggatttggactgaagcaccctcccccgcagattctcatcaagagtaccccggtacctgcgaatccttctaccaccttcagcgcggcaaagtttgcttccttcatcacacagtactccacggggcaggtcagcgtggagatcgagtgggagctgcagaaagagaacagcaaacgctggaaccccgagatccagtatacctccaactacaacaagtctgttaatgtggactttactgtggacactaatggcgtgtattcagagcctcgccccattggcacaagatacctgactcgtaatctgtaa

SEQ ID NO: 3396 - DNA, 2208 bp, synthetic construct
  misc_feature 1..2208: note = source = /note="Description of Artificial Sequence: Synthetic polynucleotide"
  source 1..2208: mol_type = other DNA
atggctgccgatggttatcttccagattggctcgaggacactctctctgaaggaataagacagtggtggaagctcaaacctggcccaccaccgccaaagcccgcagagcggcataaggacgacagcaggggtcttgtgcttcctgggtacaagtacctcggacccttcaacggactcgacaaaggagagccggtcaacgaggcagacgccgcggccctcgagcacgacaaggcctacgaccggcagctcgacagcggagacaacccgtacctcaagtacaaccacgccgacgcggagtttcaggagcgccttaaagaagatacgtcttttgggggcaacctcgcaagagcagtattccaggcgaaaaagagggttcttgaacctctgggcctggttgaggagcctgttaagacggctccgggaaaaaagaggccggtagagcactctcctgcggagctagattcctcctccggaactggaaagtcgggccaacagcctgcaagaaagagattgaattttggtcagactggagacgcagactccgtacctgacccccagcctctcggacagccaccagcagccccctctggtctgggaactaatacgatggcttcaggcagtggcgcaccaatggcagacaataacgagggcgccgacggagtgggtaattcctcgggaaattggcattgcgattccacatggatgggcgacagagtcatcaccaccagcacccgcacctgggctctgcccacctacaacaaccatctgtacaagcaaatttccagccagtctggggccagcaacgacaaccactactttggctacagcaccccttgggggtattttgacttcaacagattccactgccacttctccccacgtgactggcaaagactcatcaacaacaattggggattccggcccaaaagactcaacttcaagctctttaacattcaagtcaaggaggtcacgcagaatgacggtacgacgacgattgccaataaccttaccagcacggttcaggtgtttactgactcggagtaccagctcccgtacgtcctcggctcggcgcatcaaggatgcctcccgccgttcccagcagacgtcttcatggtgccacagtatggatacctcaccctgaacaacgggagtcaggcggtaggacgctcttcattttactgcctggagtactttccttctcagatgctgcgtaccggaaacaactttaccttcagctacacctttgaggacgttccttttcacagcagctacgctcacagccagagtttggaccgtctcatgaatcctctcatcgaccagtacctgtattacttgagcagaacaaacactccaagcggaaccactacgcagtccaggcttcagttttctcaagccggagcgagtgacattcgggaccagtctaggaactggcttcctggaccctgttaccgccagcagcgagtatcaaagacagctgcggacaacaacaacagtgattactcgtggactggagctaccaagtatcacctcaatggaagagactctctggtgaatccgggcacagccatggccagccacaaggacgatgaagaaaagtattttcctcagagcggggttctcatcttcggaaaacaagactcgggaaaaactaatgtggacattgaaaaggtcatgattacagacgaagaggaaatcaggaccaccaatcccgtggctacggagcagtatggttctgtatctaccaatctccagagcggcaacacacaagcagctacctcagatgtcaacacacaaggcgttcttccaggcatggtctggcaggacagagacgtgtacctgcagggacccatctgggcaaagattccacacacggacggacattttcacccttctcctcttatgggaggatttggaccgaagcaccctcccccgcagattctcatcaagaataccccggtacctgcgaatccttctaccaccttcagcgcggcaaagtttgcttccttcatcacacagtactccacggggcaggtcagcgtggagatcgagtgggagctgcagaaagagaacagcaaacgctggaaccccgagatccagtatacctccaactacaacaagtctgttaatgtggactttactgtggacgctaatggcgtgtattcagagcctcgccccattggcacaagatacctgactcgtaatctgtaa

SEQ ID NO: 3397 - DNA, 2208 bp, synthetic construct
  misc_feature 1..2208: note = source = /note="Description of Artificial Sequence: Synthetic polynucleotide"
  source 1..2208: mol_type = other DNA
atggctgccgatggttatcttccagattggctcgaggacactctctctgaaggaataagacagtggtggaagctcaaacctggcccaccaccgccaaagcccgcagagcggcataaggacgacagcaggggtcttgtgcttcctgggtacaagtacctcggacccttcaacggactcgacaaaggagagccggtcaacgaggcagacgccgcggccctcgagcacgacaaggcctacgaccggcagctcgacagcggagacaacccgtacctcaagtacaaccacgccgacgcggagtttcaggagcgccttaaagaagatacgtcttttgggggcaacctcgcaagagcagtattccaggcgaaaaagagggttcttgaacctctgggcctggttgaggagcctgttaagacggctccgggaaaaaagaggccggtagagcactctcctgcggagctagattcctcctccggaactggaaagtcgggccaacagcctgcaagaaagagattgaattttggtcagactggagacgcagactccgtacctgacccccagcctctcggacagccaccagcagccccctctggtctgggaactaatacgatggcttcaggcagtggcgcaccaatggcagacaataacgagggcgccgacggagtgggtaattcctcgggaaattggcattgcgattccacatggatgggcgacagagtcatcaccaccagcacccgcacctgggctctgcccacctacaacaaccatctgtacaagcaaatttccagccagtctggggccagcaacgacaaccactactttggctacagcaccccttgggggtattttgacttcaacagattccactgccacttctccccacgtgactggcaaagactcatcaacaacaattggggattccggcccaaaagactcaacttcaagctctttaacattcaagtcaaggaggtcacgcagaatgacggtacgacgacgattgccaataaccttaccagcacggttcaggtgtttactgactcggagtaccagctcccgtacgtcctcggctcggcgcatcaaggatgcctcccgccgttcccagcagacgtcttcatggtgccacagtatggatacctcaccctgaacaacgggagtcaggcggtaggacgctcttcattttactgcctggagtactttccttctcagatgctgcgtaccggaaacaactttaccttcagctacacctttgaggacgttccttttcacagcagctacgctcacagccagagtttggaccgtctcatgaatcctctcatcgaccagtacctgtattacttgagcagaacaaacactccaagcggaaccactacgcagtccaggcttcagttttctcaagccggagcgagtgacattcgggaccagtctaggaactggcttcctggaccctgttaccgccagcagcgagtatcaaagacagctgcggacaacaacaacagtgattactcgtggactggagctaccaagtatcacctcaatggaagagactctctggtgaatccgggcacagccatggccagccacaaggacgatgaagaaaagtattttcctcagagcggggttctcatcttcggaaaacaagactcgggaaaaactaatgtggacattgaaaaggtcatgattacagacgaagaggaaatcaggaccaccaatcccgtggctacggagcagtatggttctgtatctaccaatctccggagcggcaacacacaagcagctacctcagatgtcaacacacaaggcgttcttccaggcatggtctggcaggacagagacgtgtacctgcagggacccatctgggcaaagattccacacacggacggacattttcacccttctcctcttatgggaggatttggaccgaagcaccctcccccgcagattctcatcaagaataccccggtacctgcgaatccttctaccaccttcagcgcggcaaagtttgcttccttcatcacacagtactccacggggcaggtcagcgtggagatcgagtgggagctgcagaaagagaacagcaaacgctggaaccccgagatccagtatacctccaactacaacaagtctgttaatgtggactttactgtggacactaatggcgtgtattcagagcctcgccccattggcacaagatacctgactcgtaatctgtaa

SEQ ID NO: 3398 - DNA, 2208 bp, synthetic construct
  misc_feature 1..2208: note = source = /note="Description of Artificial Sequence: Synthetic polynucleotide"
  source 1..2208: mol_type = other DNA
atggctgccgatggttatcttccagattggctcgaggacactctctctgaaggaataagacagtggtggaagctcaaacctggcccaccaccgccaaagcccgcagagcggcataaggacgacagcaggggtcttgtgcttcctgggtacaagtacctcggacccttcaacggactcgacaaaggagagccggtcaacgaggcagacgccgcggccctcgagcacgacaaggcctacgaccggcagctcgacagcggagacaacccgtacctcaagtacaaccacgccgacgcggagtttcaggagcgccttaaagaagatacgccttttgggggcaacctcgcaagagcagtattccaggcgaaaaagagggttcttgaacctctgggcctggttgaggagcctgttaagacggctccgggaaaaaagaggccggtagagcactctcctgcggagctagattcctcctccggaactggaaagtcgggccaacagcctgcaagaaagagattgaattttggtcagactggagacgcagactccgtacctgacccccagcctctcggacagccaccagcagccccctctggtctgggaactaatacgatggcttcaggcagtggcgcaccaatggcagacaataacgagggcgccgacggagtgggtaattcctcgggaaattggcattgcgattccacatggatgggcgacagagtcatcaccaccagcacccgcacctgggctctgcccacctacaacaaccatctgtacaagcaaatttccagccagtctggggccagcaacgacaaccactactttggctacagcaccccttgggggtattttgacttcaacagattccactgccacttctccccacgtgactggcaaagactcatcaacaacaattggggattccggcccaaaggactcaacttcaagctctttaacattcaagtcaaggaggtcacgcagaatgacggtacgacgacgattgccaataaccttaccagcacggttcaggtgtttactgactcggagtaccagctcccgtacgtcctcggctcggcgcatcaaggatgcctcccgccgttcccagcagacgtcttcatggtgccacagtatggatacctcaccctgaacaacgggagtcaggcggtaggacgctcttcattttactgcctggagtactttccttctcagatgctgcgtaccggaaacaactttaccttcagctacacctttgaggacgttccttttcacagcagctacgctcacagccagagtttggaccgtctcatgaatcctctcatcgaccagtacctgtattacttgagcagaacaaacactccaagcggaaccactacgcagtccaggcttcagttttctcaagccggagcgagtgacattcgggaccagtctaggaactggcttcctggaccctgttaccgccagcagcgagtatcaaagacagctgcggacaacaacaacagtgattactcgtggactggagctaccaagtatcacctcaatggaagagactctctggtgaatccgggcacagccatggccagccacaaggacgatgaagaaaagtattttcctcagagcggggttctcatcttcggaaaacaagactcgggaaaaactaatgtggacattgaaaaggtcatgattacagacgaagaggaaatcaggaccaccaatcccgtggctacggagcagtatggttctgtatctaccaatctccagagcggcaacacacaagcagctacctcagatgtcaacacacaaggcgttcttccaggcatggtctggcaggacagagacgtgtacctgcagggacccatctgggcaaagattccacacacggacggacattttcacccttctcctcttatgggaggatttggaccgaagcaccctcccccgcagattctcatcaagaataccccggtacctgcgaatccttctaccaccttcagcgcggcaaagtttgcttccttcatcacacagtactccacggggcaggtcagcgtggagatcgagtgggagctgcagaaagagaacagcaaacgctggaaccccgagatccagtatacctccaactacaacaagtctgttaatgtggactttactgtggacactaatggcgtgtattcagagcctcgccccattggcacaagatacctgactcgtaatctgtaa

SEQ ID NO: 3399 - DNA, 2208 bp, synthetic construct
  misc_feature 1..2208: note = source = /note="Description of Artificial Sequence: Synthetic polynucleotide"
  source 1..2208: mol_type = other DNA
atggctgccgatggttatcttccagattggctcgaggacactctctctgaaggaataagacagtggtggaagctcaaacctggcccaccaccgccaaagcccgcagagcggcataaggacgacagcaggggtcttgtgcttcctgggtacaagtacctcggacccttcaacggactcgacaaaggagagccggtcaacgaggcagacgccgcggccctcgagcacgacaaggcctacgaccggcagctcgacagcggagacaacccgtacctcaagtacaaccacgccgacgcggagtttcaggagcgccttaaagaagatacgtcttttgggggcaacctcgcaagagcagtattccaggcgaaaaagagggttcttgaacctctgggcctggttgaggagcctgttaagacggctccgggaaaaaagaggccggtagagcactctcctgcggagctagattcctcctccggaactggaaagtcgggccaacagcctgcaagaaagagattgaattttggtcagactggagacgcagactccgtacctgacccccagcctctcggacagccaccagcagccccctctggtctgggaactaatacgatggcttcaggcagtggcgcaccaatggcagacaataacgagggcgccgacggggtgggtaattcctcgggaaattggcattgcgattccacatggatgggcgacagagtcatcaccaccagcacccgcacctgggctctgcccacctacaacaaccatctgtacaagcaaatttccagccagtctggggccagcaacgacaaccactaccttggctacagcaccccttgggggtattttgacttcaacagattccactgccacttctccccacgtgactggcaaagactcatcaacaacaattggggattccggcccaaaagactcaacttcaagctctttaacattcaagtcaaggaggtcacgcagaatgacggtacgacgacgattgccaataaccttaccagcacggttcaggtgtttactgactcggagtaccagctcccgtacgtcctcggctcggcgcatcaaggatgcctcccgccgttcccagcagacgtcttcatggtgccacagtatggatacctcaccctgaacaacgggagtcaggcggtaggacgctcttcattttactgcctggagtactttccttctcagatgctgcgtaccggaaacaactttaccttcagctacacctttgaggacgttccttttcacagcagctacgctcacagccagagtttggaccgtctcatgaatcctctcatcgaccagtacctgtattacttgagcagaacaaacactccaagcggaaccactacgcagtccaggcttcagttttctcaagccggagcgagtggcattcgggaccagtctaggaactggcttcctggaccctgttaccgccagcagcgagtatcaaagacagctgcggacaacaacaacagtgattactcgtggactggagctaccaagtatcacctcaatggaagagactctctggtgaatccgggcacagccatggccagccacaaggacgatgaagaaaagtattttcctcagagcggggttctcatcttcggaaaacaagactcgggaaaaactaatgtggacattgaaaaggtcatgattacagacgaagaggaaatcaggaccaccaatcccgtggctacggagcagtatggttctgtatctaccaatctccagagcggcaacacacaagcagctacctcagatgtcaacacacaaggcgttcttccaggcatggtctggcaggacagagacgtgtacctgcagggacccatctgggcaaagattccacacacggacggacattttcacccttctcctcttatgggaggatttggaccgaagcaccctcccccgcagattctcatcaagaataccccggtacctgcgaatccttctaccaccttcagcgcggcaaagtttgcttccttcatcacacagtactccacggggcaggtcagcgtggagatcgagtgggagctgcagaaagggaacagcaaacgctggaaccccgagatccagtatacctccaactacaacaagtctgttaatgtggactttactgtggacactaatggcgtgtattcagagcctcgccccattggcacaagatacctgactcgtaatctgtaa

SEQ ID NO: 3400 - DNA, 2208 bp, synthetic construct
  misc_feature 1..2208: note = source = /note="Description of Artificial Sequence: Synthetic polynucleotide"
  source 1..2208: mol_type = other DNA
atggctgccgatggttatcttccagattggctcgaggacactctctctgaaggaataagacagtggtggaagctcaaacctggcccaccaccgccaaagcccgcagagcggcataaggacgacagcaggggtcttgtgcttcctgggtacaagtacctcggacccttcaacggactcgacaaaggagagccggtcaacgaggcagacgccgcggccctcgagcacgacaaggcctacgaccggcagctcgacagcggagacaacccgtacctcaagtacaaccacgccgacgcggagtttcaggagcgccttaaagaagatacgtcttttgggggcaacctcgcaagagcagtattccaggcgaaaaagagggttcttgaacctctgggcctggttgaggagcctgttaagacggctccgggaaaaaagaggccggtagagcactctcctgcggagctagattcctcctccggaactggaaagtcgggccaacagcctgcaagaaagagattgaattttggtcagactggagacgcagactccgtacctgacccccagcctctcggacagccaccagcagccccctctggtctgggaactaatacgatggcttcaggcagtggcgcaccaatggcagacaataacgagggcgccgacggagtgggtaattcctcgggaaattggcattgcgattccacatggatgggcgacagagtcatcaccaccagcacccgcacctgggctctgcccacctacaacaaccatctgtacaagcaaatttccagccagtctggggccagcaacgacaaccactactttggctacagcaccccttgggggtattttgacttcaacagattccactgccacttctccccacgtgactggcaaagactcatcaacaacaattggggattccggcccaaaagactcaacttcaagctctttaacattcaagtcaaggaggtcacgcagaatgacggtacgacgacgattgccaataaccttaccagcacggttcaggtgtttactgactcggagtaccagctcccgtacgtcctcggctcggcgcatcaaggatgcctcccgccgttcccagcagacgtcttcatggtgccacagtatggatacctcaccctgaacaacgggagtcaggcggtaggacgctcttcattttactgcctggagtactttccttctcagatgctgcgtaccggaaacaactttaccttcagctacacctttgaggacgttccttttcacagcagctacgctcacagccagagtttggaccgtctcatgaatcctctcatcgaccagtacctgtattacttgagcagaacaaacactccaagcggaaccactacgcagtccaggcttcagttttctcaagccggagcgagtgacattcgggaccagtctaggaactggcttcctggaccctgttaccgccagcagcgagtatcaaagacagctgcggacaacaacaacagtgattactcgtggactggagctaccaagtatcacctcaatggaagagactctctggtgaatccgggcacagccatggccagccacaaggacgatgaagaaaagtattttcctcagagcggggttctcatcttcggaaaacaagactcgggaaaaactaatgtggacattgaaaaggtcatgattacagacgaagaggaaatcaggaccaccaatcccgtggctacggagcagtatggttctgtatctaccaatctccagagcggcaacacacaagcagctacctcagatgtcaacacacaaggcgttcttccaggcatggtctggcaggacagagacgtgtacctgcagggacccatctgggcaaagattccacacacggacggacattttcacccttctcctcttatgggaggatttggaccgaagcaccctcccccgcagattctcatcaagaataccccggtacctgcgaatccttctaccaccttcagcgcggcaaagtttgcttccttcatcacacagtactccacggggcaggtcagcgtggagatcgagtgggagctgcagaaagagaacagcaaacgctggaaccccgagatccagtatacctccaactacaacaagtctgttaatgtggactttactgtggacactaatggcgtgtattcagagcctcgccccattggcacaagatacccgactcgtaatctgtaa

SEQ ID NO: 3401 - DNA, 2208 bp, synthetic construct
  misc_feature 1..2208: note = source = /note="Description of Artificial Sequence: Synthetic polynucleotide"
  source 1..2208: mol_type = other DNA
atggctgccgatggttatcttccagattggctcgaggacactctctctgaaggaataagacagtggtggaagctcaaacctggcccaccaccgccaaagcccgcagagcggcataaggacgacagcaggggtcttgtgcttcctgggtacaagtacctcggacccttcaacggactcgacaaaggagagccggtcaacgaggcagacgccgcggccctcgagcacgacaaggcctacgaccggcagctcgacagcggagacaacccgtacctcaagtacaaccacgccgacgcggagtttcaggagcgccttaaagaagatacgtcttttgggggcaacctcgcaagagcagtattccaggcgaaaaagagggttcttgaacctctgggcctggttgaggagcctgttaagacggctccgggaaaaaagaggccggtagagcactctcctgcggagctagattcctcctccggaactggaaagtcgggccaacagcctgcaagaaagagattgaattttggtcagactggagacgcagactccgtacctgacccccagcctctcggacagccaccagcagccccctctggtctgggaactaatacgatggcttcaggcagtggcgcaccaatggcagacaataacgagggcgccgacggagtgggtaattcctcgggaaattggcattgcgattccacatggatgggcgacagagtcatcaccaccagcacccgcacctgggctctgcccacctacaacaaccatctgtacaagcaaatttccagccagtctggggccagcaacgacaaccactactttggctacagcaccccttgggggtattttgacttcaacagattccactgccacttctccccacgtgactggcaaagactcatcaacaacaattggggattccggcccaaaagactcaacttcaagctctttaacattcaagtcaaggaggtcacgcagaatgacggtacgacgacgattgccaataaccttaccagcacggttcaggtgtttactgactcggagtaccagctcccgtacgtcctcggctcggcgcatcaaggatgcctcccgccgttcccagcagacgtcttcatggtgccacagtatggatacctcaccctgaacaacgggagtcaggcggtaggacgctcttcattttactgcctggagtactttccttctcagatgctgcgtaccggaaacaactttaccttcagctacacctttgaggacgttccttttcacagcagctacgctcacagccagagtttggaccgtctcatgaatcctctcatcgaccagtacctgtattacttgagcagaacaaacactccaagcggaaccactacgcagtccaggcttcagttttctcaagccggagcgagtgacattcgggaccagtctaggaactggcttcctggaccctgttaccgccagcagcgagtatcaaagacagctgcggacaacaacaacagtgattactcgtggactggagctaccaagtatcacctcaatggaagagactctctggtgaatccgggcacagccatggccagccacaaggacgatgaagaaaagtattttcctcagagcggggttctcatcttcggaaaacaagactcgggaaaaactaatgtggacattgaaaaggtcatgattacagacgaagaggaaatcaggaccaccaatcccgtggctacggagcagtatggttctgtatctaccaatctccagagcggcaacacacaagcagctacctcagatgtcaacacacaaggcgttcttccaggcatggtctggcaggacagagacgtgtacctgcagggacccatctgggcaaagattccacacacggacggacattttcacccttctcctcttatgggaggatttggaccgaagcaccctcccccgcagattctcatcaagaataccccggtacctgcgaatccttctaccaccttcagcgcggcaaagcttgcttccttcatcacacagtactccacggggcaggtcagcgtggagatcgagtgggagctgcagaaagagaacagcaaacgctggaaccccgagatccagtatacctccaactacaacaagtctgttaatgtggactttactgtggacactaatggcgtgtattcagagcctcgccccattggcacaagatacctgactcgtaatctgtaa

SEQ ID NO: 3402 - DNA, 2208 bp, synthetic construct
  misc_feature 1..2208: note = source = /note="Description of Artificial Sequence: Synthetic polynucleotide"
  source 1..2208: mol_type = other DNA
atggctgccgatggttatcttccagattggctcgaggacactctctctgaaggaataagacagtggtggaagctcaaacctggcccaccaccgccaaagcccgcagagcggcataaggacgacagcaggggtcttgtgcttcctgggtacaagtacctcggacccttcaacggactcgacaaaggagagccggtcaacgaggcagacgccgcggccctcgagcacgacaaggcctacgaccggcagctcgacagcggagacaacccgtacctcaagtacaaccacgccgacgcggagtttcaggagcgccttaaagaagatacgtcttttgggggcaacctcgcaagagcagtattccaggcgaaaaagagggttcttgaacctctgggcctggttgaggagcctgttaagacggctccgggaaaaaagaggccggtagagcactctcctgcggagctagattcctcctccggaactggaaagtcgggccaacagcctgcaagaaagagattgaattttggtcagactggagacgcagactccgtacctgacccccagcctctcggacagccaccagcagccccctctggtctgggaactaatacgatggcttcaggcagtggcgcaccaatggcagacaataacgagggcgccgacggagtgggtaattcctcgggaaattggcattgcgattccacatggatgggcgacagagtcatcaccaccagcacccgcacctgggctctgcccacctacaacaaccatctgtacaagcaaatttccagccagtctggggccagcaacgacaaccactactttggctacagcaccccttgggggtattttgacttcaacagattccactgccacttctccccacgtgactggcaaagactcatcaacaacaattggggattccggcccaaaagactcaacttcaagctctttaacattcaagtcaaggaggtcacgcagaatgacggtacgacgacgattgccaataaccttaccagcacggttcaggtgtttactgactcggagtaccagctcccgtacgtcctcggctcggcgcatcaaggatgcctcccgccgttcccagcagacgtcttcatggtgccacagtatggatacctcaccctgaacaacgggagtcaggcggtaggacgctcttcattttactgcctggagtactttccttctcagatgctgcgtaccggaaacaactttaccttcagctacacctttgaggacgttccttttcacagcagctacgctcacagccagagtttggaccgtctcatgaatcctctcatcgaccagtacctgtattacttgagcagaacaaacactccaagcggaaccactacgcagtccaggcttcagttttctcaagccggagcgagtgacattcgggaccagtctaggaactggcttcctggaccctgttaccgccagcagcgagtatcaaagacagctgcggacaacaacaacagtgattactcgtggactggagctaccaagtatcacctcaatggaagagactctctggtgaatccgggcacagccatggccagccacaaggacgatgaagaaaagtattttcctcagagcggggttctcatcttcggaaaacaagactcgggaaaaactaatgtggacattgaaaaggtcatgattacagacgaagaggaaatcaggaccaccaatcccgtggctacggagcagtatggttctgtatctaccaatctccagagcggcaacacacaagcagctacctcagatgtcaacacacaaggcgttcttccaggcatggtctggcaggacagagacgtgtacctgcagggacccatctgggcaaagattccacacacggacggacattttcacccttctcctcttatgggaggatttggaccgaagcaccctcccccgcagattctcatcaagaataccccggtacctgcgaatccttctaccaccttcagcgcggcaaagtttgcttccttcaccacacagtactccacggggcaggtcagcgtggagatcgagtgggagctgcagaaagagaacagcaaacgctggaaccccgagatccagtatacctccaactacaacaagtctgttaatgtggactttactgtggacactaatggcgtgtattcagagcctcgccccattggcacaagatacctgactcgtaatctgtaa

SEQ ID NO: 3403 - DNA, 2208 bp, synthetic construct
  misc_feature 1..2208: note = source = /note="Description of Artificial Sequence: Synthetic polynucleotide"
  source 1..2208: mol_type = other DNA
atggctgccgatggttatcttccagattggctcgaggacactctctctgaaggaataagacagtggtggaagctcaaacctggcccaccaccgccaaagcccgcagagcggcataaggacgacagcaggggtcttgtgcttcctgggtacaagtacctcggacccttcaacggactcgacaaaggagagccggtcaacgaggcagacgccgcggccctcgagcacgacaaggcctacgaccggcagctcgacagcggagacaacccgtacctcaagtacaaccacgccgacgcggagtttcaggagcgccttaaagaagatacgtcttttgggggcaacctcgcaagagcagtattccaggcgaaaaagagggttcttgaacctctgggcctggttgaggagcctgttaagacggctccgggaaaaaagaggccggtagagcactctcctgcggagctagattcctcctccggaactggaaagtcgggccaacagcctgcaagaaagagattgaattttggtcagactggagacgcagactccgtacctgacccccagcctctcggacagccaccagcagccccctctggtctgggaactaatacgatggcttcaggcagtggcgcaccaatggcagacaataacgagggcgccgacggagtgggtaattcctcgggaaattggcattgcgattccacatggatgggcgacagagtcatcaccaccagcacccgcacctgggctctgcccacctacaacaaccatctgtacaagcaaatttccagccagtctggggccagcaacgacaaccactactttggctacagcaccccttgggggtattttgacttcaacagattccactgccacttctccccacgtgactggcaaagactcatcaacaacaattggggattccggcccaaaagactcaacttcaagctctttaacattcaagtcaaggaggtcacgcagaatgacggtacgacgacgattgccaataaccttaccagcacggttcaggtgtttactgactcggagtaccagctcccgtacgtcctcggctcggcgcatcaaggatgcctcccgccgttcccagcagacgtcttcatggtgccacagtatggatacctcaccctgaacaacgggagtcaggcggtaggacgctcttcattttactgcctggagtactttccttctcagatgctgcgtaccggaaacaactttaccttcagctacacctttgaggacgttccttttcacagcagctacgctcacagccagagtttggaccgtctcatgaatcctctcatcgaccagtacctgtattacttgagcagaacaaacactccaagcggaaccactacgcagtccaggcttcagttttctcaagccggagcgagtgacattcgggaccagtctaggaactggcttcctggaccctgttaccgccagcagcgagtatcaaagacagctgcggacaacaacaacagtgattactcgtggactggagctaccaagtatcacctcaatggaagagactctctggtgaatccgggcacagccatggccagccacaaggacgatgaagaaaagtattttcctcggagcggggttctcatcttcggaaaacaagactcgggaaaaactaatgtggacattgaaaaggtcatgattacagacgaagaggaaatcaggaccaccaatcccgtggctacggagcagtatggttctgtatctaccaatctccagagcggcaacacacaagcagctacctcagatgtcaacacacaaggcgttcttccaggcatggtctggcaggacagagacgtgtacctgcagggacccatctgggcaaagattccacacacggacggacattttcacccttctcctcttatgggaggatttggaccgaagcaccctcccccgcagattctcatcaagaataccccggtacctgcgaatccttctaccaccttcagcgcggcaaagtttgcttccttcatcacacagtactccacggggcaggtcagcgtggagatcgagtgggagctgcagaaagagaacagcaaacgctggaaccccgagatccagtatacctccaactacaacaagtctgttaatgtggactttactgtggacactaatggcgtgtattcagagcctcgccccattggcacaagatacctgactcgtaatctgtaa

SEQ ID NO: 3404 - DNA, 2208 bp, synthetic construct
  misc_feature 1..2208: note = source = /note="Description of Artificial Sequence: Synthetic polynucleotide"
  source 1..2208: mol_type = other DNA
atggctgccgatggttatcttccagattggctcgaggacactctctctgaaggaataagacagtggtggaagctcaaacctggcccaccaccgccaaagcccgcagagcggcataaggacgacagcaggggtcttgtgcttcctgggtacaagtacctcggacccttcaacggactcgacaaaggagagccggtcaacgaggcagacgccgcggccctcgagcacgacaaggcctacgaccggcagctcgacagcggagacaacccgtacctcaagtacaaccacgccgacgcggagtttcaggagcgccttaaagaagatacgtcttttgggggcaacctcgcaagagcagtattccaggcgaaaaagagggttcttgaacctctgggcctggttgaggagcctgttaagacggctccgggaaaaaagaggccggtagagcactctcctgcggagctagattcctcctccggaactggaaagtcgggccaacagcctgcaagaaagagattgaattttggtcagactggagacgcagactccgtacctgacccccagcctctcggacagccaccagcagccccctctggtctgggaactaatacgatggcttcaggcagtggcgcaccaatggcagacaataacgagggcgccgacggagtgggtaattcctcgggaaattggcattgcgattccacatggatgggcgacagagtcatcaccaccagcacccgcacctgggctctgcccacctacaacaaccatctgtacaagcaaatttccagccagtctggggccagcaacgacaaccactactttggctacagcaccccttgggggtattttgacttcaacagattccactgccacttctccccacgtgactggcaaagactcatcaacaacaattggggattccggcccaaaagactcaacttcaagctctttaacattcaagtcaaggaggtcacgcagaatgacggtacggcgacgattgccaataaccttaccagcacggttcaggtgtttactgactcggagtaccagctcccgtacgtcctcggctcggcgcatcaaggatgcctcccgccgttcccagcagacgtcttcatggtgccacagtatggatacctcaccctgaacaacgggagtcaggcggtaggacgctcttcattttactgcctggagtactttccttctcagatgctgcgtaccggaaacaactttaccttcagctacacctttgaggacgttccttttcacagcagctacgctcacagccagagtttggaccgtctcatgaatcctctcatcgaccagtacctgtattacttgagcagaacaaacactccaagcggaaccactacgcagtccaggcttcagttttctcaagccggagcgagtgacattcgggaccagtctaggaactggcttcctggaccctgttaccgccagcagcgagtatcaaagacagctgcggacaacaacaacagtgattactcgtggactggagctaccaagtatcacctcaatggaagagactctctggtgaatccgggcacagccatggccagccacaaggacgatgaagaaaagtattttcctcagagcggggttctcatcttcggaaaacaagactcgggaaaaactaatgtggacattgaaaaggtcatgattacagacgaagaggaaatcaggaccaccaatcccgtggctacggagcagtatggttctgtatctaccaatctccagagcggcaacacacaagcagctacctcagatgtcaacacacaaggcgttcttccaggcatggtctggcaggacagagacgtgtacctgcagggacccatctgggcaaagattccacacacggacggacattttcacccttctcctcttatgggaggatttggaccgaagcaccctcccccgcagattctcatcaagaataccccggtacctgcgaatccttctaccaccttcagcgcggcaaagtttgcttccttcatcacacagtactccacggggcaggtcagcgtggagatcgagtgggagctgcagaaagagaacagcaaacgctggaaccccgagatccagtatacctccaactacaacaagtctgttaatgtggactttactgtggacactaatggcgtgtattcagagcctcgccccattggcacaagatacctgactcgtaatctgtaa

SEQ ID NO: 3405 - DNA, 2208 bp, synthetic construct
  misc_feature 1..2208: note = source = /note="Description of Artificial Sequence: Synthetic polynucleotide"
  source 1..2208: mol_type = other DNA
atggctgccgatggttatcttccagattggctcgaggacactctctctgaaggaataagacagtggtggaagctcaaacctggcccaccaccgccaaagcccgcagagcggcataaggacgacagcaggggtcttgtgcttcctgggtacaagtacctcggacccttcaacggactcgacaaaggagagccggtcaacgaggcagacgccgcggccctcgagcacgacaaggcctacgaccggcagcccgacagcggagacaacccgtacctcaagtacaaccacgccgacgcggagtttcaggagcgccttaaagaagatacgtcttttgggggcaacctcgcaagagcagtattccaggcgaaaaagagggttcttgaacctctgggcctggttgaggagcctgttaagacggctccgggaaaaaagaggccggtagagcactctcctgcggagctagattcctcctccggaactggaaagtcgggccaacagcctgcaagaaagagattgaattttggtcagactggagacgcagactccgtacctgacccccagcctctcggacagccaccagcagccccctctggtctgggaactaatacgatggcttcaggcagtggcgcaccaatggcagacaataacgagggcgccgacggagtgggtaattcctcgggaaattggcattgcgattccacatggatgggcgacagagtcatcaccaccagcacccgcacctgggctctgcccacctacaacaaccatctgtacaagcaaatttccagccagtctggggccagcaacgacaaccactactttggctacagcaccccttgggggtattttgacttcaacagattccactgccacttctccccacgtgactggcaaagactcatcaacaacaattggggattccggcccaaaagactcaacttcaagctctttaacattcaagtcaaggaggtcacgcagaatgacggtacgacgacgattgccaataaccttaccagcacggttcaggtgtttactgactcggagtaccagctcccgtacgtcctcggctcggcgcatcaaggatgcctcccgccgttcccagcagacgtcttcatggtgccacagtatggatacctcaccctgaacaacgggagtcaggcggtaggacgctcttcattttactgcctggagtactttccttctcagatgctgcgtaccggaaacaactttaccttcagctacacctttgaggacgttccttttcacagcagctacgctcacagccagagtttggaccgtctcatgaatcctctcatcgaccagtacctgtattacttgagcagaacaaacactccaagcggaaccactacgcagtccaggcttcagttttctcaagccggagcgagtgacattcgggaccagtctaggaactggcttcctggaccctgttaccgccagcagcgagtatcaaagacagctgcggacaacaacaacagtgattactcgtggactggagctaccaagtatcacctcaatggaagagactctctggtgaatccgggcacagccatggccagccacaaggacgatgaagaaaagtattttcctcagagcggggttctcatcttcggaaaacaagactcgggaaaaactaatgtggacattgaaaaggtcatgattacagacgaagaggaaatcaggaccaccaatcccgtggctacggagcagtatggttctgtatctaccaatctccagagcggcaacacacaagcagctacctcagatgtcaacacacaaggcgttcttccaggcatggtctggcaggacagagacgtgtacctgcagggacccatctgggcaaagattccacacacggacggacattttcacccttctcctcttatgggaggatttggaccgaagcaccctcccccgcagattctcatcaagaataccccggtacctgcgaatccttctaccaccttcagcgcggcaaagtttgcttccttcatcacacagtactccacggggcaggtcagcgtggagatcgagtgggagctgcagaaagagaacagcaaacgctggaaccccgagatccagtatacctccaactacaacaagtctgttaatgtggactttactgtggacactaatggcgtgtattcagagcctcgccccattggcacaagatacctgactcgtaatctgtaa

SEQ ID NO: 3406 - DNA, 2208 bp, synthetic construct
  misc_feature 1..2208: note = source = /note="Description of Artificial Sequence: Synthetic polynucleotide"
  source 1..2208: mol_type = other DNA
atggctgccgatggttatcttccagattggctcgaggacactctctctgaaggaataagacagtggtggaagctcgaacctggcccaccaccgccaaagcccgcagagcggcataaggacgacagcaggggtcttgtgcttcctgggtacaagtacctcggacccttcaacggactcgacaaaggagagccggtcaacgaggcagacgccgcggccctcgagcacgacaaggcctacgaccggcagctcgacagcggagacaacccgtacctcaagtacaaccacgccgacgcggagtttcaggagcgccttaaagaagatacgccttttgggggcaacctcgcaagagcagtattccaggcgaaaaagagggttcttgaacctctgggcctggttgaggagcctgttaagacggctccgggaaaaaagaggccggtagagcactctcctgcggagctagattcctcctccggaactggaaagtcgggccaacagcctgcaagaaagagattgaattttggtcagactggagacgcagactccgtacctgacccccagcctctcggacagccaccagcagccccctctggtctgggaactaatacgatggcttcaggcagtggcgcaccaatggcagacaataacgagggcgccgacggagtgggtaattcctcgggaaattggcattgcgattccacatggatgggcgacagagtcatcaccaccagcacccgcacctgggctctgcccacctacaacaaccatctgtacaagcaaatttccagccagtctggggccagcaacgacaaccactactttggctacagcaccccttgggggtattttgacttcaacagattccactgccacttctccccacgtgactggcaaagactcatcaacaacaattggggattccggcccaaaagactcaacttcaagctctttaacattcaagtcaaggaggtcacgcagaatgacggtacgacgacgattgccaataaccttaccagcacggttcaggtgtttactgactcggagtaccagctcccgtacgtcctcggctcggcgcatcaaggatgcctcccgccgttcccagcagacgtcttcatggtgccacagtatggatacctcaccctgaacaacgggagtcaggcggtaggacgctcttcattttactgcctggagtactttccttctcagatgctgcgtaccggaaacaactttaccttcagctacacctttgaggacgttccttttcacagcagctacgctcacagccagagtttggaccgtctcatgaatcctctcatcgaccagtacctgtattacttgagcagaacaaacactccaagcggaaccactacgcagtccaggcttcagttttctcaagccggagcgagtgacattcgggaccagtctaggaactggcttcctggaccctgttatcgccagcagcgagtatcaaagacagctgcggacaacaacaacagtgattactcgtggactggagctaccaagtatcacctcaatggaagagactctctggtgaatccgggcacagccatggccagccacgaggacgatgaagaaaagtattttcctcagagcggggttctcatcttcggaaaacaagactcgggaaaaactaatgtggacattgaaaaggtcatgattacagacgaagaggaaatcaggaccaccaatcccgtggctacggagcagtatggttctgtatctaccaatctccagagcggcaacacacaagcagctacctcagatgtcaacacacaaggcgttcttccaggcatggtctggcaggacagagacgtgtacctgcagggacccatctgggcaaagattccacacacggacggacattttcacccttctcctcttatgggaggatttggaccgaagcaccctcccccgcagattctcatcaagaataccccggtacctgcgaatccttctaccaccttcagcgcggcaaagtttgcttccttcatcacacagtactccacggggcaggtcagcgtggagatcgagtgggagctgcagaaagagaacagcaaacgctggaaccccgagatccagtatacctccaactacaacaagtctgttaatgtggactttactgtggacactaatggcgtgtattcagagcctcgccccattggcacaagatacctgactcgtaatctgtaa

SEQ ID NO: 3407 - DNA, 2205 bp, synthetic construct
  misc_feature 1..2205: note = source = /note="Description of Artificial Sequence: Synthetic polynucleotide"
  source 1..2205: mol_type = other DNA
atggctgccgatggttatcttccagattggctcgaggacactctctctgaaggaataagacagtggtggaagctcaaacctggcccaccaccgccaaagcccgcagagcggcataaggacgacagcaggggtcttgtgcttcctgggtacaagtacctcggacccttcaacggactcgacaaaggagagccggtcaacgaggcagacgccgcggccctcgagcacgacaaggcctacgaccggcagctcgacagcggagacaacccgtacctcaagtacaaccacgccgacgcggagtttcaggagcgccttaaagaagatacgtcttttgggggcaacctcgcaagagcagtattccaggcgaaaaagagggttcttgaacctctgggcctggttgaggagcctgttaagacggctccgggaaaaaagaggccggtagagcactctcctgcggagctagattcctcctccggaactggaaagtcgggccaacagcctgcaagaaagagattgaattttggtcagactggagacgcagactccgtacctgacccccagcctctcggacagccaccagcagccccctctggtctgggaactaatacgatggcttcaggcagtggcgcaccaatggcagacaataacgagggcgccgacggagtgggtaattcctcgggaaattggcattgcgattccacatggatgggcgacagagtcatcaccaccagcacccgcacctgggctctgcccacctacaacaaccatctgtacaagcaaatttccagccagtctggggccagcaacgacaaccactactttggctacagcaccccttgggggtattttgacttcaacagattccactgccacttctccccacgtgactggcaaagactcatcaacaacaattggggattccggcccaaaagactcaacttcaagctctttaacattcaagtcaaggaggtcacgcagaatgacggtacgacgacgattgccaataaccttaccagcacggttcaggtgtttactgactcggagtaccagctcccgtacgtcctcggctcggcgcatcaaggatgcctcccgccgttcccagcagacgtcttcatggtgccacagtatggatacctcaccctgaacaacgggagtcaggcggtaggacgctcttcattttactgcctggagtactttccttctcagatgctgcgtaccggaaacaactttaccttcagctacacctttgaggacgttccttttcacagcagctacgctcacagccagagtttggaccgtctcatgaatcctctcatcgaccagtacctgtattacttgagcagaacaaacactccaagcggaaccactacgcagtccaggcttcagttttctcaagccggagcgagtgacattcgggaccagtctaggaactggcttcctggaccctgttaccgccagcagcgagtatcaaagacagctgcggacaacaacagtgattactcgtggactggagctaccaagtatcacctcaatggaagagactctctggtgaatccgggcacagccatggccagccacaaggacgatgaagaaaagtattttcctcagagcggggttctcatcttcggaaaacaagactcgggaaaaactaatgtggacattgaaaaggtcatgattacagacgaagaggaaatcaggaccaccaatcccgtggctacggagcagtatggttctgtatctaccaatctccagagcggcaacacacaagcagctacctcagatgtcaacacacaaggcgttcttccaggcatggtctggcaggacagagacgtgtacctgcagggacccatctgggcaaagattccacacacggacggacattttcacccttctcctcttatgggaggatttggaccgaagcaccctcccccgcagattctcatcaagaataccccggtacctgcgaatccttctaccaccttcagcgcggcaaagtttgcttccttcatcacacagtactccacggggcaggtcagcgtggagatcgagtgggagctgcagaaagagaacagcaaacgctggaaccccgagatccagtatacctccaactacaacaagtctgttaatgtggactttactgtggacactaatggcgtgtattcagagcctcgccccattggcacaagatacctgactcgtaatctgtaa

SEQ ID NO: 3408 - DNA, 2208 bp, synthetic construct
  misc_feature 1..2208: note = source = /note="Description of Artificial Sequence: Synthetic polynucleotide"
  source 1..2208: mol_type = other DNA
atggctgccgatggttatcttccagattggctcgaggacactctctctgaaggaataagacagtggtggaagctcaaacctggcccaccaccgccaaagcccgcagagcggcataaggacgacagcaggggtcttgtgcttcctgggtacaagtacctcggacccttcaacggactcgacaaaggagagccggtcaacgaggcagacgccgcggccctcgagcacgacaaggcctacgaccggcagctcgacagcggagacaacccgtacctcaagtacaaccacgccgacgcggagtttcaggagcgccttaaagaagatacgccttttgggggcaacctcgcaagagcagtattccaggcgaaaaagagggttcttgaacctctgggcctggttgaggagcctgttaagacggctccgggaaaaaagaggccggtagagcactctcctgcggagctagattcctcctccggaactggaaagtcgggccaacagcctgcaagaaagagattgaattttggtcagactggagacgcagactccgtacctgacccccagcctctcggacagccaccagcagccccctctggtctgggaactaatacgatggcttcaggcagtggcgcaccaatggcagacaataacgagggcgccgacggagtgggtaattcctcgggaaattggcattgcgattccacatggatgggcgacagagtcatcaccaccagcacccgcacctgggctctgcccacctacaacaaccatctgtacaagcaaatttccagccagtctggggccagcaacgacaaccactactttggctacagcaccccttgggggtattttgacttcaacagattccactgccacttctccccacgtgactggcaaagactcatcaacaacaattggggattccggcccaaaagactcaacttcaagctctttaacattcaagtcaaggaggtcacgcagaatggcggtacgacgacgattgccaataaccttaccagcacggttcaggtgtttactgactcggagtaccagctcccgtacgtcctcggctcggcgcatcaaggatgcctcccgccgttcccagcagacgtcttcatggtgccacagtatggatacctcaccctgaacaacgggagtcaggcggtaggacgctcttcattttactgcctggagtactttccttctcagatgctgcgtaccggaaacaactttaccttcagctacacctttgaggacgttccttttcacagcagctacgctcacagccagagtttggaccgtctcatgaatcctctcatcgaccagtacctgtattacttgagcagaacaaacactccaagcggaaccactacgcagtccaggcttcagttttctcaagccggagcgagtgacattcgggaccagtctaggaactggcttcctggaccctgttaccgccagcagcgagtatcaaagacagctgcggacaacaacaacagtgattactcgtggactggagctaccaagtatcacctcaatggaagagactctctggtgaatccgggcacagccatggccagccacaaggacgatgaagaaaagtattttcctcagagcggggttctcatcttcggaaaacaagactcgggaaaaactaatgtggacattgaaaaggtcatgattacagacgaagaggaaatcaggaccaccaatcccgtggctacggagcagtatggttctgtatctaccaatctccagagcggcaacacacaagcagctacctcagatgtcaacacacaaggcgttcttccaggcatggtctggcaggacagagacgtgtacctgcagggacccatctgggcaaagattccacacacggacggacattttcacccttctcctcttatgggaggatttggaccgaagcaccctcccccgcagattctcatcaagaataccccggtacctgcgaatccttctaccaccttcagcgcggcaaagtttgcttccttcatcacacagtactccacggggcaggtcagcgtggagatcgagtgggagctgcagaaagagaacagcaaacgctggaaccccgagatccagtatacctccaactacaacaagtctgttaatgtggactttactgtggacactaatggcgtgtattcagagcctcgccccattggcacaagatacctgactcgtaatctgtaa

SEQ ID NO: 3409 - DNA, 2208 bp, synthetic construct
  misc_feature 1..2208: note = source = /note="Description of Artificial Sequence: Synthetic polynucleotide"
  source 1..2208: mol_type = other DNA
atggctgccgatggttatcttccagattggctcgaggacactctctctgaaggaataagacagtggtggaagctcaaacctggcccaccaccgccaaagcccgcagagcggcataaggacgacagcaggggtcttgtgcttcctgggtacaagtacctcggacccttcaacggactcgacaaaggagagccggtcaacgaggcagacgccgcggccctcgagcacgacaaggcctacgaccggcagctcgacagcggagacaacccgtacctcaagtacaaccacgccgacgcggagtttcaggagcgccttaaagaagatacgtcttttgggggcaacctcgcaagagcagtattccaggcgaaaaagggggttcttgaacctctgggcctggttgaggagcctgttaagacggctccgggaaaaaagaggccggtagagcactctcctgcggagctagattcctcctccggaactggaaagtcgggccaacagcctgcaagaaagagattgaattttggtcagactggagacgcagactccgtacctgacccccagcctctcggacagccaccagcagccccctctggtctgggaactaatacgatggcttcaggcagtggcgcaccaatggcagacaataacgagggcgccgacggagtgggtaattcctcgggaaattggcattgcgattccacatggatgggcgacagagtcatcaccaccagcacccgcacctgggctctgcccacctacaacaaccatctgtacaagcaaatttccagccagtctggggccagcaacgacaaccactactttggctacagcaccccttgggggtattttgacttcaacagattccactgccacttctccccacgtgactggcaaagactcatcaacaacaattggggattccggcccaaaagactcaacttcaagctctttaacattcaagtcaaggaggtcacgcagaatgacggtacgacgacgattgccaataaccttaccagcacggttcaggtgtttactgactcggagtaccagctcccgtacgtcctcggctcggcgcatcaaggatgcctcccgccgttcccagcagacgtcttcatggtgccacagtatggatacctcaccctgaacaacgggagtcaggcggtaggacgctcttcattttactgcctggagtactttccttctcagatgctgcgtaccggaaacaactttaccttcagctacacctttgaggacgttccttttcacagcagctacgctcacagccagagtttggaccgtctcatgaatcctctcatcgaccagtacctgtattacttgagcagaacaaacactccaagcggaaccactacgcagtccaggcttcagttttctcaagccggagcgagtgacattcgggaccagtctaggaactggcttcctggaccctgttaccgccagcagcgagtatcaaagacagctgcggacaacaacaacagtgattactcgtggactggagctaccaagtatcacctcaatggaagagactctctggtgaatccgggcacagccatggccagccacaaggacgatgaagaaaagtattttcctcagagcggggttctcatcttcggaaaacaagactcgggaaaaactaatgtggacattgaaaaggtcatgattacagacgaagaggaaatcaggaccaccaatcccgtggctacggagcagtatggttctgtatctaccaatctccagagcggcaacacacaagcagctacctcagatgtcaacacacaaggcgttcttccaggcatggtctggcaggacagagacgtgtacctgcagggacccatctgggcaaagattccacacacggacggacattttcacccttctcctcttatgggaggatttggaccgaagcaccctcccccgcagattctcatcaagaataccccggtacctgcgaatccttctaccaccttcagcgcggcaaagtttgcttccttcatcacacagtactccacggggcaggtcagcgtggagatcgagtgggagctgcagaaagagaacagcaaacgctggaaccccgagatccagtatacctccaactacaacaagtctgttaatgtggactttactgtggacactaatggcgtgtattcagagcctcgccccattggcacaagatacctgactcgtaatctgtaa

SEQ ID NO: 3410 - DNA, 2208 bp, synthetic construct
  misc_feature 1..2208: note = source = /note="Description of Artificial Sequence: Synthetic polynucleotide"
  source 1..2208: mol_type = other DNA
atggctgccgatggttatcttccagattggctcgaggacactctctctgaaggaataagacagtggtggaagctcaaacctggcccaccaccgccaaagcccgcagagcggcataaggacgacagcaggggtcttgtgcttcctgggtacaagtacctcggacccttcaacggactcgacaaaggagagccggtcaacgaggcagacgccgcggccctcgagcacgacaaggcctacgaccggcagctcgacagcggagacaacccgtacctcaagtacaaccacgccgacgcggagtttcaggagcgccttaaagaagatacgtcttttgggggcaacctcgcaagagcagtattccaggcgaaaaagagggttcttgaacctctgggcctggttgaggagcctgttaagacggctccgggaaaaaagaggccggtagagcactctcctgcggagctagattcctcctccggaactggaaagtcgggccaacagcctgcaagaaagagattgaattttggtcagactggagacgcagactccgtacctgacccccagcctctcggacagccaccagcagccccctctggtctgggaactaatacgatggcttcaggcagtggcgcaccaatggcagacaataacgagggcgccgacggagtgggtaattcctcgggaaattggcattgcgattccacatggatgggcgacagagtcatcaccaccagcacccgcacctgggctctgcccacctacaacaaccatctgtacaagcaaatttccagccagtctggggccagcaacgacaaccactactttggctacagcaccccttgggggtattttgacttcaacagattccactgccacttctccccacgtgactggcaaagactcatcaacaacaattggggattccggcccaaaagactcaacttcaagctctttaacattcaagtcaaggaggtcacgcagaatgacggtacgacgacgattgccaataaccttaccagcacggttcaggtgtttactgactcggagtaccagctcccgtacgtcctcggctcggcgcatcaaggatgcctcccgccgttcccagcagacgtcttcatggtgccacagtatggatacctcaccctgaacaacgggagtcaggcggtaggacgctcttcattttactgcctggagtactttccttctcagatgctgcgtaccggaaacaactttaccttcagctacacctttgaggacgttccttttcacagcagctacgctcacagccagagtttggaccgtctcatgaatcctctcatcgaccagtacctgtattacttgagcagaacaaacactccaagcggaaccactacgcagtccaggcttcagttttctcaagccggagcgagtgacattcgggaccagtctaggaactggcttcctggaccctgttaccgccagcagcgagtatcaaagacagctgcggacaacaacaacagtgattactcgtggactggagctaccaagtatcacctcaatggaagagactctctggtgaatccgggcacagccatggccagccacaaggacgatgaagaaaagtattttcctcagagcggggttctcatcttcggaaaacaagactcgggaaaaactaatgtggacattgaaaaggtcatgattacagacgaagaggaaatcaggaccaccaatcccgtggctacggagcagtatggttctgtatctaccaatctccagagcggcaacacacaagcagctacctcagatgtcaacacacaaggcgttcttccaggcatggtctggcaggacagagacgtgtacctgcagggacccatctgggcaaggattccacacacggacggacattttcacccttctcctcttatgggaggatttggaccgaagcaccctcccccgcagattctcatcaagaataccccggtacctgcgaatccttctaccaccttcagcgcggcaaagtttgcttccttcatcacacagtactccacggggcaggtcagcgtggagatcgagtgggagctgcagaaagagaacagcaaacgctggaaccccgagatccagtatacctccaactacaacaagtctgttaatgtggactttactgtggacactaatggcgtgtattcagagcctcgccccattggcacaagatacctgactcgtaatctgtaa

SEQ ID NO: 3411 - DNA, 2208 bp, synthetic construct
  misc_feature 1..2208: note = source = /note="Description of Artificial Sequence: Synthetic polynucleotide"
  source 1..2208: mol_type = other DNA
atggctgccgatggttatcttccagattggctcgaggacactctctctgaaggaataagacagtggtggaagctcaaacctggcccaccaccgccaaagcccgcagagcggcataaggacgacagcaggggtcttgtgcttcctgggtacaagtacctcggacccttcaacggactcgacaaaggagagccggtcaacgaggcagacgccgcggccctcgagcacgacaaggcctacgaccggcagctcgacagcggagacaacccgtacctcaagtacaaccacgccgacgcggagtttcaggagcgccttaaagaagatacgtcttttgggggcaacctcgcaagagcagtattccaggcgaaaaagagggttcttgaacctctgggcctggttgaggagcctgttaagacggctccgggaaaaaagaggccggtagggcactctcctgcggagctagattcctcctccggaactggaaagtcgggccaacagcctgcaagaaagagattgaattttggtcagactggagacgcagactccgtacctgacccccagcctctcggacagccaccagcagccccctctggtctgggaactaatacgatggcttcaggcagtggcgcaccaatggcagacaataacgagggcgccgacggagtgggtaattcctcgggaaattggcattgcgattccacatggatgggcgacagagtcatcaccaccagcacccgcacctgggctctgcccacctacaacaaccatctgtacaagcaaatttccagccagtctggggccagcaacgacaaccactactttggctacagcaccccttgggggtattttgacttcaacagattccactgccacttctccccacgtgactggcaaagactcatcaacaacaattggggattccggcccaaaagactcaacttcaagctctttaacattcaagtcaaggaggtcacgcagaatgacggtacgacgacgattgccaataaccttaccagcacggttcaggtgtttactgactcggagtaccagctcccgtacgtcctcggctcggcgcatcaaggatgcctcccgccgttcccagcagacgtcttcatggtgccacagtatggatacctcaccctgaacaacgggagtcaggcggtaggacgctcttcattttactgcctggagtactttccttctcagatgctgcgtaccggaaacaactttaccttcagctacacctttgaggacgttccttttcacagcagctacgctcacagccagagtttggaccgtctcatgaatcctctcatcgaccagtacctgtattacttgagcagaacaaacactccaagcggaaccactacgcagtccaggcttcagttttctcaagccggagcgagtgacattcgggaccagtctaggaactggcttcctggaccctgttaccgccagcagcgagtatcaaagacagctgcggacaacaacaacagtgattactcgtggactggagctaccaagtatcacctcaatggaagagactctctggtgaatccgggcacagccatggccagccacaaggacgatgaagaaaagtattttcctcagagcggggttctcatcttcggaaaacaagactcgggaaaaactaatgtggacattgaaaaggtcatgattacagacgaagaggaaatcaggaccaccaatcccgtggctacggagcagtatggttctgtatctaccaatctccagagcggcaacacacaagcagctacctcagatgtcaacacacaaggcgttcttccaggcatggtctggcaggacagagacgtgtacctgcagggacccatctgggcaaagattccacacacggacggacattttcacccttctcctcttatgggaggatttggaccgaagcaccctcccccgcagattctcatcaagaataccccggtacctgcgaatccttctaccaccttcagcgcggcaaagtttgcttccttcatcacacagtactccacggggcaggtcagcgtggagatcgagtgggagctgcagaaagagaacagcaaacgctggaaccccgagatccagtatacctccaactacaacaagtctgttaatgtggactttactgtggacactaatggcgtgtattcagagcctcgccccattggcacaagatacctgactcgtaatctgtaa

SEQ ID NO: 3412 - DNA, 2208 bp, synthetic construct
  misc_feature 1..2208: note = source = /note="Description of Artificial Sequence: Synthetic polynucleotide"
  source 1..2208: mol_type = other DNA
atggctgccgatggttatcttccagattggctcgaggacactctctctgaaggaataagacagtggtggaagctcaaacctggcccaccaccgccaaagcccgcagagcggcataaggacgacagcaggggtcttgtgcttcctgggtacaagtacctcggacccttcaacggactcgacaaaggagagccggtcaacgaggcagacgccgcggccctcgagcacgacaaggcctacgaccggcagctcgacagcggagacaacccgtacctcaagtacaaccacgccgacgcggagtttcaggagcgccttaaagaagatacgtcttttgggggcaacctcgcaagagcagtattccaggcgaaaaagagggttcttgaacctctgggcctggttgaggagcctgttaagacggctccgggaaaaaagaggccggtagagcactctcctgcggagctagattcctcctccggaactggaaagtcgggccaacagcctgcaagaaagagattgaattttggtcagactggagacgcagactccgtacctgacccccagcctctcggacagccaccagcagccccctctggtctgggaactaatacgatggcttcaggcagtggcgcaccaatggcagacaataacgagggcgccgacggagtgggtaattcctcgggaaattggcattgcgattccacatggatgggcgacagagtcatcaccaccagcacccgcacctgggctctgcccacctacaacaaccatctgtacaagcaaatttccagccagtctggggccagcaacgacaaccactactttggctacagcaccccttgggggtattttgacttcaacagattccactgccacttctccccacgtgactggcaaagactcatcaacaacaattggggattccggcccaaaagactcaacttcaagctctttaacattcaagtcaaggaggtcacgcagaatgacggtacgacgacgattgccaataaccttaccagcacggttcaggtgtttactgactcggagtaccagctcccgtacgtcctcggctcggcgcatcaaggatgcctcccgccgttcccagcagacgtcttcatggtgccacagtatggatacctcaccctgaacaacgggagtcaggcggtaggacgctcttcattttactgcctggagtactttccttctcagatgctgcgtaccggaaacaactttaccttcagctacacctttgaggacgttccttttcacagcagctacgctcacagccagagtttggaccgtctcatgaatcctctcatcgaccagtacctgtattacttgagcagaacaaacactccaagcggaaccactacgcagtccaggcttcagttttctcaagccggagcgagtgacattcgggaccagtctaggaactggcttcctggaccctgttaccgccagcagcgagtatcaaagacagctgcggacaacaacaacagtgattactcgtggactggagctaccaagtatcacctcaatggaagagactctctggtgaatccgggcacagccatggccagccacaaggacgatgaagaaaagtattttcctcagagcggggttctcatcttcggaaaacaagactcgggaaaaactaatgtggacattgaaaaggtcatgattacagacgaagaggaaatcaggaccaccaatcccgtggctacggagcagtatggttctgtatctaccaatctccagagcggcaacacacaagcagctacctcagatgtcaacacacaaggcgttcttccaggcatggtctggcaggacagagacgtgtacctgcagggacccatctgggcaaagattccacacacggacggacattttcacccttctcctcttatgggaggatttggaccgaagcaccctcccccgcagattctcatcaagaataccccggtacctgcgaatccttctaccaccttcagcgcggcaaagtttgcttccttcatcacacagtactccacggggcaggtcagcgtggagatcgagtgggagctgcagaaagggaacagcaaacgctggaaccccgagatccagtatacctccaactacaacaagtctgttaatgtggactttactgtggacactaatggcgtgtattcagagcctcgccccattggcacaagatacctgactcgtaatctgtaa

SEQ ID NO: 3413 - DNA, 2208 bp, synthetic construct
  misc_feature 1..2208: note = source = /note="Description of Artificial Sequence: Synthetic polynucleotide"
  source 1..2208: mol_type = other DNA
atggctgccgatggttatcttccagattggctcgaggacactctctctgaaggaataagacagtggtggaagctcaaacctggcccaccaccgccaaagcccgcagagcggcataaggacgacagcaggggtcttgtgcttcctgggtacaagtacctcggacccttcaacggactcgacaaaggagagccggtcaacgaggcagacgccgcggccctcgagcacgacaaggcctacgaccggcagctcgacagcggagacaacccgtacctcaagtacaaccacgccgacgcggagtttcaggagcgccttaaagaagatacgccttttgggggcaacctcgcaagagcagtattccaggcgaaaaagagggttcttgaacctctgggcctggttgaggagcctgttaagacggctccgggaaaaaaggggccggtagagcactctcctgcggagctagattcctcctccggaactggaaagtcgggccaacagcctgcaagaaagagattgaattttggtcagactggagacgcagactccgtacctgacccccagcctctcggacagccaccagcagccccctctggtctgggaactaatacgatggcttcaggcagtggcgcaccaatggcagacaataacgagggcgccgacggagtgggtaattcctcgggaaattggcattgcgattccacatggatgggcgacagagtcatcaccaccagcacccgcacctgggctctgcccacctacaacaaccatctgtacaagcaaatttccagccagtctggggccagcaacgacaaccactactttggctacagcaccccttgggggtattttgacttcaacagattccactgccacttctccccacgtgactggcaaagactcatcaacaacaattggggattccggcccaaaagactcaacttcaagctctttaacattcaagtcaaggaggtcacgcagaatgacggtacgacgacgattgccaataaccttaccagcacggttcaggtgtttactgactcggagtaccagctcccgtacgtcctcggctcggcgcatcaaggatgcctcccgccgttcccagcagacgtcttcatggtgccacagtatggatacctcaccctgaacaacgggagtcaggcggtaggacgctcttcattttactgcctggagtactttccttctcagatgctgcgtaccggaaacaactttaccttcagctacacctttgaggacgttccttttcacagcagctacgctcacagccagagtttggaccgtctcatgaatcctctcatcgaccagtacctgtattacttgagcagaacaaacactccaagcggaaccactacgcagtccaggcttcagttttctcaagccggagcgagtgacattcgggaccagtctaggagctggcttcctggaccctgttaccgccagcagcgagtatcaaagacagctgcggacaacaacaacagtgattactcgtggactggagctaccaagtatcacctcaatggaagagactctctggtgaatccgggcacagccatggccagccacaaggacgatgaagaaaagtattttcctcagagcggggttctcatcttcggaaaacaagactcgggaaaaactaatgtggacattgaaaaggtcatgattacagacgaagaggaaatcaggaccaccaatcccgtggctacggagcagtatggttctgtatctaccaatctccagagcggcaacacacaagcagctacctcagatgtcaacacacaaggcgttcttccaggcatggtctggcaggacagagacgtgtacctgcagggacccatctgggcaaagattccacacacggacggacattttcacccttctcctcttatgggaggatttggaccgaagcaccctcccccgcagattctcatcaagaataccccggtacctgcgaatccttctaccaccttcagcgcggcaaagtttgcttccttcatcacacagtactccacggggcaggtcagcgtggagatcgagtgggagctgcagaaagagaacagcaaacgctggaaccccgagatccagtatacctccaactacaacaagtctgttaatgtggactttactatggacactaatggcgtgtattcagagcctcgccccattggcacaagatacctgactcgtaatctgtaa

SEQ ID NO: 3414 - DNA, 2208 bp, synthetic construct
  misc_feature 1..2208: note = source = /note="Description of Artificial Sequence: Synthetic polynucleotide"
  source 1..2208: mol_type = other DNA
atggctgccgatggttatcttccagattggctcgaggacactctctctgaaggaataagacagtggtggaagctcaaacctggcccaccaccgccaaagcccgcagagcggcataaggacgacagcaggggtcttgtgcttcctgggtacaagtacctcggacccttcaacggactcgacaaaggagagccggtcaacgaggcagacgccgcggccctcgagcacgacaaggcctacgaccggcagctcgacagcggagacaacccgtacctcaagtacaaccacgccgacgcggagtttcaggagcgccttaaagaagatacgtcttttgggggcaacctcgcaagagcagtattccaggcgaaaaagagggttcttgaacctctgggcctggttgaggagcctgttaagacggctccgggaaaaaagaggccggtagagcactctcctgcggagctagattcctcctccggaactggaaagtcgggccaacagcctgcaagaaagagattgaattttggtcagactggagacgcagactccgtacctgacccccagcctctcggacagccaccagcagccccctctggtctgggaactaatacgatggcttcaggcagtggcgcaccaatggcagacaataacgagggcgccgacggagtgggtaattcctcgggaaattggcattgcgattccacatggatgggcgacagagtcatcaccaccagcacccgcacctgggctctgcccacctacaacaaccatctgtacaagcaaatttccagccagtctggggccagcaacgacaaccactactttggctacagcaccccttgggggtattttgacttcaacagattccactgccacttctccccacgtgactggcaaagactcatcaacaacaattggggattccggcccaaaagactcaacttcaagctctttaacattcaagtcaaggaggtcacgcagaatgacggtacgacgacgattgccaataaccttaccagcacggttcaggtgtttactgactcggagtaccagctcccgtacgtcctcggctcggcgcatcaaggatgcctcccgccgttcccagcagacgtcttcatggtgccacagtatggatacctcaccctgaacaacgggagtcaggcggtaggacgctcttcattttactgcctggagtactttccttctcagatgctgcgtaccggaaacaactttaccttcagctacacctttgaggacgttccttttcacagcagctacgctcacagccagagtttggaccgtctcatgaatcctctcatcgaccagtacctgtattacttgagcagaacaaacactccaagcggaaccactacgcagtccaggcttcagttttctcaagccggagcgagtgacattcgggaccagtctaggaactggcttcctggaccctgttaccgccagcagcgagtatcaaagacagctgcggacaacaacaacagtgattactcgtggactggagctaccaagtatcacctcaatggaagggactctctggtgaatccgggcacagccatggccagccacaaggacgatgaagaaaagtattttcctcagagcggggttctcatcttcggaaaacaagactcgggaaaaactaatgcggacattgaaaaggtcatgattacagacgaagaggaaatcaggaccaccaatcccgtggctacggagcagtatggttctgtatctaccaatctccagagcggcaacacacaagcagctacctcagatgtcaacacacaaggcgttcttccaggcatggtctggcaggacagagacgtgtacctgcagggacccatctgggcaaagattccacacacggacggacattttcacccttctcctcttatgggaggatttggaccgaagcaccctcccccgcagattctcatcaagaataccccggtacctgcgaatccttctaccaccttcagcgcggcaaagtttgcttccttcatcacacagtactccacggggcaggtcagcgtggagatcgagtgggagctgcagaaagagaacagcaaacgctggaaccccgagatccagtatacctccaactacaacaagtctgttaatgtggactttactgtggacactaatggcgtgtattcagagcctcgccccattggcacaagatacctgactcgtaatctgtaa

SEQ ID NO: 3415 - DNA, 2208 bp, synthetic construct
  misc_feature 1..2208: note = source = /note="Description of Artificial Sequence: Synthetic polynucleotide"
  source 1..2208: mol_type = other DNA
atggctgccgatggttatcttccagattggctcgaggacactctctctgaaggaataagacagtggtggaagctcaaacctggcccaccaccgccaaagcccgcagagcggcataaggacgacagcaggggtcttgtgcttcctgggtacaagtacctcggacccttcaacggactcgacaaaggagagccggtcaacgaggcagacgccgcggccctcgagcacgacaaggcctacgaccggcagctcgacagcggagacaacccgtacctcaagtacaaccacgccgacgcggagtttcaggagcgccttaaagaagatacgtcttttgggggcaacctcgcaagagcagtattccaggcgaaaaagagggttcttgaacctctgggcctggttgaggagcctgttaagacggctccgggaaaaaagaggccggtagagcactctcctgcggagctagattcctcctccggaactggaaagtcgggccaacagcctgcaagaaagagattgaattttggtcagactggagacgcagactccgtacctgacccccagcctctcggacagccaccagcagccccctctggtctgggaactaatacgatggcttcaggcagtggcgcaccaatggcagacaataacgagggcggcgacggagtgggtaattcctcgggaaattggcattgcgattccacatggatgggcgacagagtcatcaccaccagcacccgcacctgggctctgcccacctacaacaaccatctgtacaagcaaatttccagccagtctggggccagcaacgacaaccactactttggctacagcaccccttgggggtattttgacttcaacagattccactgccacttctccccacgtgactggcaaagactcatcaacaacaattggggattccggcccaaaagactcaacttcaagctctttaacattcaagtcaaggaggtcacgcagaatgacggtacgacgacgattgccaataaccttaccagcacggttcaggtgtttactgactcggagtaccagctcccgtacgtcctcggctcggcgcatcaaggatgcctcccgccgttcccagcagacgtcttcatggtgccacagtatggatacctcaccctgaacaacgggagtcaggcggtaggacgctcttcattttactgcctggagtactttccttctcagatgctgcgtaccggaaacaactttaccttcagctacacctttgaggacgttccttttcacagcagctacgctcacagccagagtttggaccgtctcatgaatcctctcatcgaccagtacctgtattacttgagcagaacaaacactccaagcggaaccactacgcagtccaggcttcagttttctcaagccggagcgagtgacattcgggaccagtctaggaactggcttcctggaccctgttaccgccagcagcgagtatcaaagacagctgcggacaacaacaacagtgattactcgtggactggagctaccaagtatcacctcaatggaagggactctctggtgaatccgggcacagccatggccagccacaaggacgatgaagaaaagtattttcctcagagcggggttctcatcttcggaaaacaagactcgggaaaaactaatgtggacattgaaaaggtcatgattacagacgaagaggaaatcaggaccaccaatcccgtggctacggagcagtatggttctgtatctaccaatctccagagcggcaacacacaagcagctacctcagatgtcaacacacaaggcgttcttccaggcatggtctggcaggacagagacgtgtacctgcagggacccatctgggcaaagattccacacacggacggacattttcacccttctcctcttatgggaggatttggaccgaagcaccctcccccgcagattctcatcaagaataccccggtacctgcgaatccttctaccaccttcagcgcggcaaagtttgcttccttcatcacacagtactccacggggcaggtcagcgtggagatcgagtgggagctgcagaaagagaacagcaaacgctggaaccccgagatccagtatacctccaactacaacaagtctgttaatgtggactttactgtggacactaatggcgtgtattcagagcctcgccccattggcacaagatacctgactcgtaatctgtaa

SEQ ID NO: 3416 - DNA, 2208 bp, synthetic construct
  misc_feature 1..2208: note = source = /note="Description of Artificial Sequence: Synthetic polynucleotide"
  source 1..2208: mol_type = other DNA
atggctgccgatggttatcttccagattggctcgaggacactctctctgaaggaataagacagtggtggaagctcaaacctggcccaccaccgccaaagcccgcagagcggcataaggacgacagcaggggtcttgtgcttcctgggtacaagtacctcggacccttcaacggactcgacaaaggagagccggtcaacgaggcagacgccgcggccctcgagcacgacaaggcctacgaccggcagctcgacagcggagacaacccgtacctcaagtacaaccacgccgacgcggagtttcaggagcgccttaaagaagatacgtcttttgggggcaacctcgcaagagcagtattccaggcgaaaaagagggttcttgaacctctgggcctggttgaggagcctgttaagacggctccgggaaaaaagaggccggtagagcactctcctgcggagctagattcctcctccggaactggaaagtcgggccaacagcctgcaagaaagagattgaattttggtcagactggagacgcagactccgtacctgacccccagcctctcggacagccaccagcagccccctctggtctgggaactaatacgatggcttcaggcagtggcgcaccaatggcagacaataacgagggcgccgacggagtgggtaattcctcgggaaattggcattgcgattccacatggatgggcgacagagtcatcaccaccagcacccgcacctgggctctgcccacctacaacaaccatctgtacaagcaaatttccagccagtctggggccagcaacgacaaccactactttggctacagcaccccttgggggtattttgacttcaacagattccactgccacttccccccacgtgactggcaaagactcatcaacaacaattggggattccggcccaaaagactcaacttcaagctctttaacattcaagtcaaggaggtcacgcagaatgacggtacgacgacgattgccaataaccttaccagcacggttcaggtgtttactgactcggagtaccagctcccgtacgtcctcggctcggcgcatcaaggatgcctcccgccgttcccagcagacgtcttcatggtgccacagtatggatacctcaccctgaacaacgggagtcaggcggtaggacgctcttcattttactgcctggagtactttccttctcagatgctgcgtaccggaaacaactttaccttcagctacacctttgaggacgttccttttcacagcagctacgctcacagccagagtttggaccgtctcatgaatcctctcatcgaccagtacctgtattacttgagcagaacaaacactccaagcggaaccactacgcagtccaggcttcagttttctcaagccggagcgagtgacattcgggaccagtctaggaactggcttcctggaccctgttaccgccagcagcgagtatcaaagacagctgcggacaacaacaacagtgattactcgtggactggagctaccaagtatcacctcaatggaagagactctctggtgaatccgggcacagccatggccagccacaaggacgatgaagaaaagtattttcctcagagcggggttctcatcttcggaaaacaagactcgggaaaaactaatgtggacattgaaaaggtcatgattacagacgaagaggaaatcaggaccaccaatcccgtggctacggagcagtatggttctgtatctaccaatctccagagcggcaacacacaagcagctacctcagatgtcaacacacaaggcgttcttccaggcatggtctggcaggacagagacgtgtacctgcagggacccatctgggcaaagattccacacacggacggacattttcacccttctcctcttatgggaggatttggaccgaagcaccctcccccgcagattctcatcaagaataccccggtacctgcgaatccttctaccaccttcagcgcggcaaagtttgcttccttcatcacacagtactccacggggcaggtcagcgtggagatcgagtgggagctgcagaaagagaacagcaaacgctggaaccccgagatccagtatacctccaactacaacaagtctgttaatgtggactttactgtggacactaatggcgtgtattcagagcctcgccccattggcacaagatacctgactcgtaatctgtaa

SEQ ID NO: 3417 - DNA, 2208 bp, synthetic construct
  misc_feature 1..2208: note = source = /note="Description of Artificial Sequence: Synthetic polynucleotide"
  source 1..2208: mol_type = other DNA
atggctgccgatggttatcttccagattggctcgaggacactctctctgaaggaataagacagtggtggaagctcaaacctggcccaccaccgccaaagcccgcagagcggcataaggacgacagcaggggtcttgtgcttcctgggtacaagtacctcggacccttcaacggactcgacaaaggagagccggtcaacgaggcagacgccgcggccctcgagcacgacaaggcctacgaccggcagctcgacagcggagacaacccgtacctcaagtacaaccacgccgacgcggagtttcaggagcgccttaaagaagatacgtcttttgggggcaacctcgcaagagcagtattccaggcgaaaaagagggttcttgaacctctgggcctggttgaggagcctgttaagacggctccgggaaaaaagaggccggtagagcactctcctgcggagctagattcctcctccggagctggaaagtcgggccaacagcctgcaagaaagagattgaattttggtcagactggagacgcagactccgtacctgacccccagcctctcggacagccaccagcagccccctctggtctgggaactaatacgatggcttcaggcagtggcgcaccaatggcagacaataacgagggcgccgacggagtgggtaattcctcgggaaattggcattgcgattccacatggatgggcgacagagtcatcaccaccagcacccgcacctgggctctgcccacctacaacaaccatctgtacaagcaaatttccagccagtctggggccagcaacgacaaccactaccttggctacagcaccccttgggggtattttgacttcaacagattccactgccacttctccccacgtgactggcaaagactcatcaacaacaattggggattccggcccaaaagactcaacttcaagctctttaacattcaagtcaaggaggtcacgcagaatgacggtacgacgacgattgccaataaccttaccagcacggttcaggtgtttactgactcggagtaccagctcccgtacgtcctcggctcggcgcatcaaggatgcctcccgccgttcccagcagacgtcttcatggtgccacagtatggatacctcaccctgaacaacgggagtcaggcggtaggacgctcttcattttactgcctggagtactttccttctcagatgctgcgtaccggaaacaactttaccttcagctacacctttgaggacgttccttttcacagcagctacgctcacagccagagtttggaccgtctcatgaatcctctcatcgaccagtacctgtattacttgagcagaacaaacactccaagcggaaccactacgcagtccaggcttcagttttctcaagccggagcgagtgacattcgggaccagtctaggaactggcttcctggaccctgttaccgccagcagcgagtatcaaagacagctgcggacaacaacaacagtgattactcgtggactggagctaccaagtatcacctcaatggaagagactctctggtgaatccgggcacagccatggccagccacaaggacgatgaagaaaagtattttcctcagagcggggttctcatcttcggaaaacaagactcgggaaaaactaatgtggacattgaaaaggtcatgattacagacgaagaggaaatcaggaccaccaatcccgtggctacggagcagtatggttctgtatctaccaatctccagagcggcaacacacaagcagctacctcagatgtcaacacacaaggcgttcttccaggcatggtctggcaggacagagacgtgtacctgcagggacccatctgggcaaagattccacacacggacggacattttcacccttctcctcttatgggaggatttggaccgaagcaccctcccccgcagattctcatcaagaataccccggtacctgcgaatccttctaccaccttcagcgcggcaaagtttgcttccttcatcacacagtactccacggggcaggtcagcgtggagatcgagtgggagctgcagaaagagaacagcaaacgctggaaccccgagatccagtatacctccaactacaacaagtctgttaatgtggactttactgtggacactaatggcgtgtattcagagcctcgccccattggcacaagatacctgactcgtaatctgtaa

SEQ ID NO: 3418 - DNA, 2208 bp, synthetic construct
  misc_feature 1..2208: note = source = /note="Description of Artificial Sequence: Synthetic polynucleotide"
  source 1..2208: mol_type = other DNA
atggctgccgatggttatcttccagattggctcgaggacactctctctgaaggaataagacagtggtggaagctcaaacctggcccaccaccgccaaagcccgcagagcggcataaggacgacagcaggggtcttgtgcttcctgggtacaagtacctcggacccttcaacggactcgacaaaggagagccggtcaacgaggcagacgccgcggccctcgagcacgacaaggcctacgaccggcagctcgacagcggagacaacccgtacctcaagtacaaccacgccgacgcggagtttcaggagcgccttaaagaagatacgccttttgggggcaacctcgcaagagcagtattccaggcgaaaaagagggttcttgaacctctgggcctggttgaggagcctgttaagacggctccgggaaaaaagaggccggtagagcactctcctgcggagctagattcctcctccggaactggaaagtcgggccaacagcctgcaagaaagagattgaattttggtcagactggagacgcagactccgtacctgacccccagcctctcggacagccaccagcagccccctctggtctgggaactaatacgatggtttcaggcagtggcgcaccaatggcagacaataacgagggcgccgacggagtgggtaattcctcgggaaattggcattgcgattccacatggatgggcgacagagtcatcaccaccagcacccgcacctgggctctgcccacctacaacaaccatctgtacaagcaaatttccagccagtctggggccagcaacgacaaccactactttggctacagcaccccttgggggtattttgacttcaacagattccactgccacttctccccacgtgactggcaaagactcatcaacaacaattggggattccggcccaaaagactcaacttcaagctctttaacattcaagtcaaggaggtcacgcagaatgacggtacgacgacgattgccaataaccttaccagcacggttcaggtgtttactgactcggagtaccagctcccgtacgtcctcggctcggcgcatcaaggatgcctcccgccgttcccagcagacgtcttcatggtgccacagtatggatacctcaccctgaacaacgggagtcaggcggtaggacgctcttcattttactgcctggagtactttccttctcagatgctgcgtaccggaaacaactttaccttcagctacacctttgaggacgttccttttcacagcagctacgctcacagccagagtttggaccgtctcatgaatcctctcatcgaccagtacctgtattacttgagcagaacaaacactccaagcggaaccactacgcagtccaggcttcagttttctcaagccggagcgagtgacattcgggaccagtctaggaactggcttcctggaccctgttaccgccagcagcgagtatcaaagacagctgcggacaacaacaacagtgattactcgtggactggagctaccaagtatcacctcaatggaagagactctctggtgaatccgggcacagccatggccagccacaaggacgatgaagaaaagtattttcctcagagcggggttctcatcttcggaaaacaagactcgggaaaaactaatgtggacattgaaaaggtcatgattacagacgaagaggaaatcaggaccaccaatcccgtggctacggagcagtatggttctgtatctaccaatctccagagcggcaacacacaagcagctacctcagatgtcaacacacaaggcgttcttccaggcatggtctggcaggacagagacgtgtacctgcagggacccatctgggcaaagattccacacacggacggacattttcacccttctcctcttatgggaggatttggaccgaagcaccctcccccgcagattctcatcaagaataccccggtacctgcgaatccttctaccaccttcagcgcggcaaagtttgcttccttcatcacacaatactccacggggcaggtcagcgtggagatcgagtgggagctgcagaaagagaacagcaaacgctggaaccccgagatccagtatacctccaactacaacaagtctgttaatgtggactttactgtggacactaatggcgtgtattcagagcctcgccccattggcacaagatacctgactcgtaatctgtaa

SEQ ID NO: 3419 - DNA, 2208 bp, synthetic construct
  misc_feature 1..2208: note = source = /note="Description of Artificial Sequence: Synthetic polynucleotide"
  source 1..2208: mol_type = other DNA
atggctgccgatggttatcttccagattggctcgaggacactctctctgaaggaataagacagtggtgggagctcaaacctggcccaccaccgccaaagcccgcagagcggcataaggacgacagcaggggtcttgtgcttcctgggtacaagtacctcggacccttcaacggactcgacaaaggagagccggtcaacgaggcagacgccgcggccctcgagcacgacaaggcctacgaccggcagctcgacagcggagacaacccgtacctcaagtacaaccacgccgacgcggagtttcaggagcgccttaaagaagatacgtcttttgggggcaacctcgcaagagcagtattccaggcgaaaaagagggttcttgaacctctgggcctggttgaggagcctgttaagacggctccgggaaaaaagaggccggtagagcactctcctgcggagctagattcctcctccggaactggaaagtcgggccaacagcctgcaagaaagagattgaattttggtcagactggagacgcagactccgtacctgacccccagcctctcgggcagccaccagcagccccctctggtctgggaactaatacgatggcttcaggcagtggcgcaccaatggcagacaataacgagggcgccgacggagtgggtaattcctcgggaaattggcattgcgattccacatggatgggcgacagagtcatcaccaccagcacccgcacctgggctctgcccacctacaacaaccatctgtacaagcaaatttccagccagtctggggccagcaacgacaaccactactttggctacagcaccccttgggggtattttgacttcaacagattccactgccacttctccccacgtgactggcaaagactcatcaacaacaattggggattccggcccaaaagactcaacttcaagctctttaacattcaagtcaaggaggtcacgcagaatgacggtacgacgacgattgccaataaccttaccagcacggttcaggtgtttactgactcggagtaccagctcccgtacgtcctcggctcggcgcatcaaggatgcctcccgccgttcccagcagacgtcttcatggtgccacagtatggatacctcaccctgaacaacgggagtcaggcggtaggacgctcttcattttactgcctggagtactttccttctcagatgctgcgtaccggaaacaactttaccttcagctacacctttgaggacgttccttttcacagcagctacgctcacagccagagtttggaccgtctcatgaatcctctcatcgaccagtacctgtattacttgagcagaacaaacactccaagcggaaccactacgcagtccaggcttcagttttctcaagccggagcgagtgacattcgggaccagtctaggaactggcttcctggaccctgttaccgccagcagcgagtatcaaagacagctgcggacaacaacaacagtgattactcgtggactggagctaccaagtatcacctcaatggaagagactctctggtgaatccgggcacagccatggccagccacaaggacgatgaagaaaagtattttcctcagagcggggttctcatcttcggaaaacaagactcgggaaaaactaatgtggacattgaaaaggtcatgattacagacgaagaggaaatcaggaccaccaatcccgtggctacggagcagtatggttctgtatctaccaatctccagagcggcaacacacaagcagctacctcagatgtcaacacacaaggcgttcttccaggcatggtctggcaggacagagacgtgtacctgcagggacccatctgggcaaagattccacacacggacggacattttcacccttctcctcttatgggaggatttggaccgaagcaccctcccccgcagattctcatcaagaataccccggtacctgcgaatccttctaccaccttcagcgcggcaaagtttgcttccttcatcacacagtactccacggggcaggtcagcgtggagatcgagtgggagctgcagaaagagaacagcaaacgctggaaccccgagatccagtatacctccaactacaacaagtctgttaatgtggactttactgtggacactaatggcgtgtattcagagcctcgccccattggcacaagatacctgactcgtaatctgtaa

SEQ ID NO: 3420 - DNA, 2208 bp, synthetic construct
  misc_feature 1..2208: note = source = /note="Description of Artificial Sequence: Synthetic polynucleotide"
  source 1..2208: mol_type = other DNA
atggctgccgatggttatcttccagattggctcgaggacactctctctgaaggaataagacagtggtggaagctcaaacctggcccaccaccgccaaagcccgcagagcggcataaggacgacagcaggggtcttgtgcttcctgggtacaagtacctcggacccttcaacggactcgacaaaggagagccggtcaacgaggcagacgccgcggccctcgagcacgacaaggcctacgaccggcagctcgacagcggagacaacccgtacctcaagtacaaccacgccgacgcggagtttcaggagcgccttaaagaagatacgccttttgggggcaacctcgcaagagcagtattccaggcgaaaaagagggttcttgaacctctgggcctggttgaggagcctgttaagacggctccgggaaaaaagaggccggtagggcactctcctgcggagctagattcctcctccggaactggaaagtcgggccaacagcctgcaagaaagagattgaattttggtcagactggagacgcagactccgtacctgacccccagcctctcggacagccaccagcagccccctctggtctgggaactaatacgatggcttcaggcagtggcgcaccaatggcagacaataacgagggcgtcgacggagtgggtaattcctcgggaaattggcattgcgattccacatggatgggcgacagagtcatcaccaccagcacccgcacctgggctctgcccacctacaacaaccatctgtacaagcaaatttccagccagtctggggccagcaacgacaaccactactttggctacagcaccccttgggggtattttgacttcaacagattccactgccacttctccccacgtgactggcaaagactcatcaacaacaattggggattccggcccaaaagactcaacttcaagctctttaacattcaagtcaaggaggtcacgcagaatgacggtacgacgacgattgccaataaccttaccagcacggttcaggtgtttactgactcggagtaccagctcccgtacgtcctcggctcggcgcatcaaggatgcctcccgccgttcccagcagacgtcttcatggtgccacagtatggatacctcaccctgaacaacgggagtcaggcggtaggacgctcttcattttactgcctggagtactttccttctcagatgctgcgtaccggaaacaactttaccttcagctacacctttgaggacgttccttttcacagcagctacgctcacagccagagtttggaccgtctcatgaatcctctcatcgaccagtacctgtattacttgagcagaacaaacactccaagcggaaccactacgcagtccaggcttcagttttctcaagccggagcgagtgacattcgggaccagtctaggaactggcttcctggaccctgttaccgccagcagcgagtatcaaagacagctgcggacaacaacaacagtgattactcgtggactggagctaccaagtatcacctcaatggaagagactctctggtgaatccgggcacagccatggccagccacaaggacgatgaagaaaagtattttcctcagagcggggttctcatcttcggaaaacaagactcgggaaaaactaatgtggacattgaaaaggtcatgattacagacgaagaggaaatcaggaccaccaatcccgtggctacggagcagtatggttctgtatctaccaatctccagagcggcaacacacaagcagctacctcagatgtcaacacacaaggcgttcttccaggcatggtctggcaggacagagacgtgtacctgcagggacccatctgggcaaagattccacacacggacggacattttcacccttctcctcttatgggaggatttggaccgaagcaccctcccccgcagattctcatcaagaataccccggtacctgcgaatccttctaccaccttcagcgcggcaaagtttgcttccttcatcacacagtactccacggggcaggtcagcgtggagatcgagtgggagctgcagaaagagaacagcaaacgctggaaccccgagatccagtatacctccaactacaacaagtctgttaatgtggactttactgtggacactaatggcgtgtattcagagcctcgccccattggcacaagatacctgactcgtaatctgtaa

SEQ ID NO: 3421 - DNA, 2208 bp, synthetic construct
  misc_feature 1..2208: note = source = /note="Description of Artificial Sequence: Synthetic polynucleotide"
  source 1..2208: mol_type = other DNA
atggctgccgatggttatcttccagattggctcgaggacactctctctgaaggaataagacagtggtgggagctcaaacctggcccaccaccgccaaagcccgcagagcggcataaggacgacagcaggggtcttgtgcttcctgggtacaagtacctcggacccttcaacggactcgacaaaggagagccggtcaacgaggcagacgccgcggccctcgagcacgacaaggcctacgaccggcagctcgacagcggagacaacccgtacctcaagtacaaccacgccgacgcggagtttcaggagcgccttaaagaagatacgtcttttgggggcaacctcgcaagagcagtattccaggcgaaaaagagggttcttgaacctctgggcctggttgaggagcctgttaagacggctccgggaaaaaagaggccggtagagcactctcctgcggagctagattcctcctccggaactggaaagtcgggccaacagcctgcaagaaagagattgaattttggtcagactggagacgcagactccgtacctgacccccagcctctcgggcagccaccagcagccccctctggtctgggaactaatacgatggcttcaggcagtggcgcaccaatggcagacaataacgagggcgccgacggagtgggtaattcctcgggaaattggcattgcgattccacatggatgggcgacagagtcatcaccaccagcacccgcacctgggctctgcccacctacaacaaccatctgtacaagcaaatttccagccagtctggggccagcaacgacaaccactactttggctacagcaccccttgggggtattttgacttcaacagattccactgccacttctccccacgtgactggcaaagactcatcaacaacaattggggattccggcccaaaagactcaacttcaagctctttaacattcaagtcaaggaggtcacgcagaatgacggtacgacgacgattgccaataaccttaccagcacggttcaggtgtttactgactcggagtaccagctcccgtacgtcctcggctcggcgcatcaaggatgcctcccgccgttcccagcagacgtcttcatggtgccacagtatggatacctcaccctgaacaacgggagtcaggcggtaggacgctcttcattttactgcctggagtactttccttctcagatgctgcgtaccggaaacaactttaccttcagctacacctttgaggacgttccttttcacagcagctacgctcacagccagagtttggaccgtctcatgaatcctctcatcgaccagtacctgtattactttagcagaacaaacactccaagcggaaccactacgcagtccaggcttcagttttctcaagccggagcgagtgacattcgggaccagtctaggaactggcttcctggaccctgttaccgccagcagcgagtatcaaagacagctgcggacaacaacaacagtgattactcgtggactggagctaccaagtatcacctcaatggaagagactctctggtgaatccgggcacagccatggccagccacaaggacgatgaagaaaagtattttcctcagagcggggttctcatcttcggaaaacaagactcgggaaaaactaatgtggacattgaaaaggtcatgattacagacgaagaggaaatcaggaccaccaatcccgtggctacggagcagtatggttctgtatctaccaatctccagagcggcaacacacaagcagctacctcagatgtcaacacacaaggcgttcttccaggcatggtctggcaggacagagacgtgtacctgcagggacccatctgggcaaagattccacacacggacggacattttcacccttctcctcttatgggaggatttggaccgaagcaccctcccccgcagattctcatcaagaataccccggtacctgcgaatccttctaccaccttcagcgcggcaaagtttgcttccttcatcacacagtactccacggggcaggtcagcgtggagatcgagtgggagctgcagaaagagaacagcaaacgctggaaccccgagatccagtatacctccaactacaacaagtctgttaatgtggactttactgtggacactaatggcgtgtattcagagcctcgccccattggcacaagatacctgactcgtaatctgtaa

SEQ ID NO: 3422 - DNA, 2208 bp, synthetic construct
  misc_feature 1..2208: note = source = /note="Description of Artificial Sequence: Synthetic polynucleotide"
  source 1..2208: mol_type = other DNA
atggctgccgatggttatcttccagattggctcgaggacactctctctgaaggaataagacagtggtggaagctcaaacctggcccaccaccgccaaagcccgcagagcggcataaggacgacagcaggggtcttgtgcttcctgggtacaagtacctcggacccttcaacggactcgacaaaggagagccggtcaacgaggcagacgccgcggccctcgagcacgacaaggcctacgaccggcagctcgacagcggagacaacccgtacctcaagtacaaccacgccgacgcggagtttcaggagcgccttaaagaagatacgtcttttgggggcaacctcgcaagagcagtattccaggcgaaaaagagggttcttgaacctctgggcctggttgaggagcctgttaagacggctccgggaaaaaagaggccggtagagcactctcctgcggagctagattcctcctccggaactggaaagtcgggccaacagcctgcaagaaagagattgaattttggtcagactggagacgcagactccgtacctgacccccagcctctcggacagccaccagcagccccctctggtctgggaactaatacgatggcttcaggcagtggcgcaccaatggcagacaataacgagggcgccgacggagtgggtaattcctcgggaaattggcattgcgattccacatggatgggcgacagagtcatcaccaccagcacccgcacctgggctctgcccacctacaacaaccatctgtacaagcaaatttccagccagtctggggccagcaacgacaaccactactttggctacagcaccccttgggggtattttgacttcaacagattccactgccacttctccccacgtgactggcaaagactcatcaacaacaattggggattccggcccaaaagactcaacttcaagctctttaacattcaagtcaaggaggtcacgcagaatgacggtacgacgacgattgccaataaccttaccagcacggttcaggtgtttactgactcggagtaccagctcccgtacgtcctcggctcggcgcatcaaggatgcctcccgccgttcccagcagacgtcttcatggtgccacagtatggatacctcaccctgaacaacgggagtcaggcggtaggacgctcttcattttaccgcctggagtactttccttctcagatgctgcgtaccggaaacaactttaccttcagctacacctttgaggacgttccttttcacagcagctacgctcacagccagagtttggaccgtctcatgaatcctctcatcgaccagtacctgtattacttgagcagaacaaacactccaagcggaaccactacgcagtccaggcttcagttttctcaagccggagcgagtgacattcgggaccagtctaggaactggcttcctggaccctgttaccgccagcagcgagtatcaaagacagctgcggacaacaacaacagtgattactcgtggactggagctaccaagtatcacctcaatggaagagactctctggtgaatccgggcacagccatggccagccacaaggacgatgaagaaaagtattttcctcagagcggggttctcatcttcggaaaacaagactcgggaaaaactaatgtggacattgaaaaggtcatgattacagacgaagaggaaatcaggaccaccaatcccgtggctacggagcagtatggttctgtatctaccaatctccagagcggcaacacacaagcagctacctcagatgtcaacacacaaggcgttcttccaggcatggtctggcaggacagagacgtgtacctgcagggacccatctgggcaaagattccacacacggacggacattttcacccttctcctcttatgggaggatttggaccgaagcaccctcccccgcagattctcatcaagaataccccggtacctgcgaatccttctaccaccttcagcgcggcaaagtttgcttccttcatcacacagtactccacggggcaggtcagcgtggagatcgagtgggagctgcagaaagagaacagcaaacgctggaaccccgagatccagtatacctccaactacaacaagtctgttaatgtggactttactgtggacactaatggcgtgtattcagagcctcgccccattggcacaagatacctgactcgtaatctgtaa

SEQ ID NO: 3423 - DNA, 2208 bp, synthetic construct
  misc_feature 1..2208: note = source = /note="Description of Artificial Sequence: Synthetic polynucleotide"
  source 1..2208: mol_type = other DNA
atggctgccgatggttatcttccagattggctcgaggacactctctctgaaggaataagacagtggtggaagctcaaacctggcccaccaccgccaaagcccgcagagcggcataaggacgacagcaggggtcttgtgcttcctgggtacaagtacctcggacccttcaacggactcgacaaaggagagccggtcaacgaggcagacgccgcggccctcgagcacgacaaggcctacgaccggcagctcgacagcggagacaacccgtacctcaagtacaaccacgccgacgcggagtttcaggagcgccttaaagaagatacgtcttttgggggcaacctcgcaagagcagtattccaggcgaaaaagagggttcttgaacctctgggcctggttgaggagcctgttaagacggctccgggaaaaaagaggccggtagagcactctcctgcggagctagattcctcctccggaactggaaagtcgggccaacagcctgcaagaaagagattgaattttggtcagactggagacgcagactccgtacctgacccccagcctctcggacagccaccagcagccccctctggtctgggaactaatacgatggcttcaggcagtggcgcaccaatggcagacaataacgagggcgccgacggagtgggtaattcctcgggaaattggcattgcgattccacatggatgggcgacagagtcatcaccaccagcacccgcacctgggctctgcccacctacaacaaccatctgtacaagcaaatttccagccagtctggggccagcaacgacaaccactaccttggctacagcaccccttgggggtattttgacttcaacagattccactgccacttctccccacgtgactggcaaagactcatcaacaacaattggggattccggcccaaaagactcaacttcaagctctttaacattcaagtcaaggaggtcacgcagaatgacggtacgacgacgattgccaataaccttaccagcacggttcaggtgtttactgactcggagtaccagctcccgtacgtcctcggctcggcgcatcaaggatgcctcccgccgttcccagcagacgtcttcatggtgccacagtatggatacctcaccctgaacaacgggagtcaggcggtaggacgctcttcattttactgcctggagtactttccttctcagatgctgcgtaccggaaacaactttaccttcagctacacctttgaggacgttccttttcacagcagctacgctcacagccagagtttggaccgtctcatgaatcctctcatcgaccagtacctgtattacttgagcagaacaaacactccaagcggaaccactacgcagtccaggcttcagttttctcaagccggagcgagtgacattcgggaccagtctaggaactggcttcctggaccctgttaccgccagcagcgagtatcaaagacagctgcggacaacaacaacagtgattactcgtggactggagctaccaagtatcacctcaatggaagagactctctggtgaatccgggcacagccatggccagccacaaggacgatgaagaaaagtattttcctcagagcggggttctcatcttcggaaaacaagactcgggaaaaactaatgtggacattgaaaaggtcatgattacagacgaagaggaaatcaggaccaccaatcccgtggctacggagcagtatggttctgtatctaccaatctccagagcggcaacacacaagcagctacctcagatgtcaacacacaaggcgttcttccaggcatggtctggcaggacggagacgtgtacctgcagggacccatctgggcaaagattccacacacggacggacattttcacccttctcctcttatgggaggatttggaccgaagcaccctcccccgcagattctcatcaagaataccccggtacctgcgaatccttctaccaccttcagcgcggcaaagtttgcttccttcatcacacagtactccacggggcaggtcagcgtggagatcgagtgggagctgcagaaagagaacagcaaacgctggaaccccgagatccagtatacctccaactacaacaagtctgttaatgtggactttactgtggacactaatggcgtgtattcagagcctcgccccattggcacaagatacctgactcgtaatctgtaa

SEQ ID NO: 3424 - DNA, 2208 bp, synthetic construct
  misc_feature 1..2208: note = source = /note="Description of Artificial Sequence: Synthetic polynucleotide"
  source 1..2208: mol_type = other DNA
atggctgccgatggttatcttccagattggctcgaggacactctctctgaaggaataagacagtggtggaagctcaaacctggcccaccaccgccaaagcccgcagagcggcataaggacgacagcaggggtcttgtgcttcctgggtacaagtacctcggacccttcaacggactcgacaaaggagagccggtcaacgaggcagacgccgcggccctcgagcacgacaaggcctacgaccggcagctcgacagcggagacaacccgtacctcaagtacaaccacgccgacgcggagtttcaggagcgccttaaagaagatacgtcttttgggggcaacctcgcaagagcagtattccaggcgaaaaagagggttcttgaacctctgggcctggttgaggagcctgttaagacggctccgggaaaaaagaggccggtagagcactctcctgcggagctagattcctcctccggaactggaaagtcgggccaacagcctgcaagaaagagattgaattttggtcagactggagacgcagactccgtacctgacccccagcctctcggacagccaccagcagccccctctggtctgggaactaatacgatggcttcaggcagtggcgcaccaatggcagacaataacgagggcgccgacggagtgggtaattcctcgggaaattggcattgcgattccacatggatgggcgacagagtcatcaccaccagcacccgcacctgggctctgcccacctacaacaaccatctgtacaagcaaatttccagccagtctggggccagcaacgacaaccactactttggctacagcaccccttgggggtattttgacttcaacagattccactgccacttctccccacgtgactggcaaagactcatcaacaacaattggggattccggcccaaaagactcaacttcaagctctttaacattcaagtcaaggaggtcacgcagaatgacggtacgacgacgattgccaataaccttaccagcacggttcaggtgtttactgactcggagtaccagctcccgtacgtcctcggctcggcgcatcaaggatgcctcccgccgttcccagcagacgtcttcatggtgccacagtatggatacctcaccctgaacaacgggagtcaggcggtaggacgctcttcattttactgcctggagtactttcctcctcagatgctgcgtaccggaaacaactttaccttcagctacacctttgaggacgttccttttcacagcagctacgctcacagccagagtttggaccgtctcatgaatcctctcatcgaccagtacctgtattacttgagcagaacaaacactccaagcggaaccactacgcagtccaggcttcagttttctcaagccggagcgagtgacattcgggaccagtctaggaactggcttcctggaccctgttaccgccagcagcgagtatcaaagacagctgcggacaacaacaacagtgattactcgtggactggagctaccaagtatcacctcaatggaagagactctctggtgaatccgggcacagccatggccagccacaaggacgatgaagaaaagtattttcctcagagcggggttctcatcttcggaaaacaagactcgggaaaaactaatgtggacattgaaaaggtcatgattacagacgaagaggaaatcaggaccaccaatcccgtggctacggagcagtatggttctgtatctaccaatctccagagcggcaacacacaagcagctacctcagatgtcaacacacaaggcgttcttccaggcatggtctggcaggacagagacgtgtacctgcagggacccatctgggcaaagattccacacacggacggacattttcacccttctcctcttatgggaggatttggaccgaagcaccctcccccgcagattctcatcaagaataccccggtacctgcgaatccttctaccaccttcagcgcggcaaagtttgcttccttcatcacacagtactccacggggcaggtcagcgtggagatcgagtgggagctgcagaaagagaacagcaaacgctggaaccccgagatccagtatacctccaactacaacaagtctgttaatgtggactttactgtggacactaatggcgtgtattcagagcctcgccccattggcacaagatacctgactcgtaatctgtaa

SEQ ID NO: 3425 - DNA, 2208 bp, synthetic construct
  misc_feature 1..2208: note = source = /note="Description of Artificial Sequence: Synthetic polynucleotide"
  source 1..2208: mol_type = other DNA
atggctgccgatggttatcttccagattggctcgaggacactctctctgaaggaataagacagtggtggaagctcaaacctggcccaccaccgccaaagcccgcagagcggcataaggacgacagcaggggtcttgtgcttcctgggtacaagtacctcggacccttcaacggactcgacaaaggagagccggtcaacgaggcagacgccgcggccctcgagcacgacaaggcctacgaccggcagctcgacagcggagacaacccgtacctcaagtacaaccacgccgacgcggagtttcaggagcgccttaaagaagatacgtcttttgggggcaacctcgcaagagcagtattccaggcgaaaaagagggttcttgaacctctgggcctggttgaggagcctgttaagacggctccgggaaaaaagaggccggtagagcactctcctgcggagctagattcctcctccggaactggaaagtcgggccaacagcctgcaagaaagagattgaattttggtcagactggagacgcagactccgtacctgacccccagcctctcggacagccaccagcagccccctctggtctgggaactaatacgatggcttcaggcagtggcgcaccaatggcagacaataacgagggcgccgacggggtgggtaattcctcgggaaattggcattgcgattccacatggatgggcgacagagtcatcaccaccagcacccgcgcctgggctctgcccacctacaacaaccatctgtacaagcaaatttccagccagtctggggccagcaacgacaaccactaccttggctacagcaccccttgggggtattttgacttcaacagattccactgccacttctccccacgtgactggcaaagactcatcaacaacaattggggattccggcccaaaagactcaacttcaagctctttaacattcaagtcaaggaggtcacgcagaatgacggtacgacgacgattgccaataaccttaccagcacggttcaggtgtttactgactcggagtaccagctcccgtacgtcctcggctcggcgcatcaaggatgccccccgccgttcccagcagacgtcttcatggtgccacagtatggatacctcaccctgaacaacgggagtcaggcggtaggacgctcttcattttactgcctggagtactttccttctcagatgctgcgtaccggaaacaactttaccttcagctacacctttgaggacgttccttttcacagcagctacgctcacagccagagtttggaccgtctcatgaatcctctcatcgaccagtacctgtattacttgagcagaacaaacactccaagcggaaccactacgcagtccaggcttcagttttctcaagccggagcgagtgacattcgggaccagtctaggaactggcttcctggaccctgttaccgccagcagcgagtatcaaagacagctgcggacaacaacaacagtgattactcgtggactggagctaccaagtatcacctcaatggaagagactctctggtgaatccgggcacagccatggccagccacaaggacgatgaagaaaagtattttcctcagagcggggttctcatcttcggaaaacaagactcgggaaaaactaatgtggacattgaaaaggtcatgattacagacgaagaggaaatcaggaccaccaatcccgtggctacggagcagtatggttctgtatctaccaatctccagagcggcaacacacaagcagctacctcagatgtcaacacacaaggcgttcttccaggcatggtctggcaggacagagacgtgtacctgcagggacccatctgggcaaagattccacacacggacggacattttcacccttctcctcttatgggaggatttggaccgaagcaccctcccccgcagattctcatcaagaataccccggtacctgcgaatccttctaccaccttcagcgcggcaaagtttgcttccttcatcacacagtactccacggggcaggtcagcgtggagatcgagtgggagctgcagaaagagaacagcaaacgctggaaccccgagatccagtatacctccaactacaacaagtctgttaatgtggactttactgtggacactaatggcgtgtattcagagcctcgccccattggcacaagatacctgactcgtaatctgtaa

SEQ ID NO: 3426 - DNA, 2208 bp, synthetic construct
  misc_feature 1..2208: note = source = /note="Description of Artificial Sequence: Synthetic polynucleotide"
  source 1..2208: mol_type = other DNA
atggctgccgatggttatcttccagattggctcgaggacactctctctgaaggaataagacagtggtggaagctcaaacctggcccaccaccgccaaagcccgcagagcggcataaggacgacagcaggggtcttgtgcttcctgggtacaagtacctcggacccttcaacggactcgacaaaggagagccggtcaacgaggcagacgccgcggccctcgagcacgacaaggcctacgaccggcagctcgacagcggagacaacccgtacctcaagtacaaccacgccgacgcggagtttcaggagcgccttaaagaagatacgtcttttgggggcaacctcgcaagagcagtattccaggcgaaaaagagggttcttgaacctctgggcctggttgaggagcctgttaagacggctccgggaaaaaagaggccggtagagcactctcctgcggagctagattcctcctccggaactggaaagtcgggccaacagcctgcaagaaagagattgaattttggtcagactggagacgcagactccgtacctgacccccagcctctcggacagccaccagcagccccctctggtctgggaactaatacgatggcttcaggcagtggcgcaccaatggcagacaataacgagggcgccgacggagtgggtaattcctcgggaaattggcattgcgattccacatggatgggcgacagagtcatcaccaccagcacccgcacctgggctctgcccacctacaacaaccatctgtacaagcaaatttccagccagtctggggccagcaacgacaaccactactttggctacagcaccccttgggggtattttgacttcaacagattccactgccacttctccccacgtgactggcaaagactcatcaacaacaattggggattccggcccaaaagactcaacttcaagctctttaacattcaagtcaaggaggtcacgcagaatgacggtacgacgacgattgccaataaccttaccagcacggttcaggtgtttactgactcggagtaccagctcccgtacgtcctcggctcggcgcatcaaggatgcctcccgccgttcccagcagacgtcttcatggtgccacagtatggatacctcaccctgaacaacgggagtcaggcggtaggacgctcttcattttactgcctggagtactttccttctcagatgctgcgtaccggaaacaactttaccttcagctacacctttgaggacgttccttttcacagcagctacgctcacagccagagtttggaccgtctcatgaatcctctcatcgaccagtacctgtattacttgagcagaacaaacactccaagcggaaccactacgcagtccaggcttcagttttctcaagccggagcgagtgacattcgggaccagtctaggaactggcttcctggaccctgttaccgccagcagcgagtatcaaagacagctgcggacaacaacaacagtgattactcgtggactggagctaccaagtatcacctcaatggaagagactctctggtgaatccgggcacagccatggccagccacaaggacgatgaagaaaagtattttcctcagagcggggttctcatcttcggaaaacaagactcgggaaaaactaatgtggacattgaaaaggtcatgattacagacgaagaggaaatcaggaccaccaatcccgtggctacggagcagtatggttctgtatctaccaatctccagagcggcaacacacaagcagctacctcagatgtcaacacacaaggcgttcttccaggcatggtctggcaggacagagacgtgtacctgcagggacccatctgggcaaagattccacacacggacggacattttcacccttctcctcttatgggaggatttggaccgaagcaccctcccccgcagattctcatcaagaataccccggtacctgcgaatccttctaccaccttcagcgcggcaaagtttgctttcttcatcacacagtactccacggggcaggtcagcgtggagatcgagtgggagctgcagaaagagaacagcaaacgctggaaccccgagatccagtatacctccaactacaacaagtctgttaatgtggactttactgtggacactaatggcgtgtattcagagcctcgccccattggcacaagatacctgactcgtaatctgtaa

SEQ ID NO: 3427 - DNA, 2208 bp, synthetic construct
  misc_feature 1..2208: note = source = /note="Description of Artificial Sequence: Synthetic polynucleotide"
  source 1..2208: mol_type = other DNA
atggctgccgatggttatcttccagattggctcgaggacactctctctgaaggaataagacagtggtggaagctcaaacctggcccaccaccgccaaagcccgcagagcggcataaggacgacagcaggggtcttgtgcttcctgggtacaagtacctcggacccttcaacggactcgacaaaggagagccggtcaacgaggcagacgccgcggccctcgagcacgacaaggcctacgaccggcagctcgacagcggagacaacccgtacctcaagtacaaccacgccgacgcggagtttcaggagcgccttaaagaagatacgtcttttgggggcaacctcgcaagagcagtattccaggcgaaaaagagggttcttgaacctctgggcctggttgaggagcctgttaagacggctccgggaaaaaagaggccggtagagcactctcctgcggagctagattcctcctccggaactggaaagtcgggccaacagcctgcaagaaagagattgaattttggtcagactggagacgcagactccgtacctgacccccagcctctcggacagccaccagcagccccctctggtctgggaactaatacgatggcttcaggcagtggcgcaccaatggcagacaataacgagggcgccgacggagtgggtaattcctcgggaaattggcattgcgattccacatggatgggcgacagagtcatcaccaccagcacccgcacctgggctctgcccacctacaacaaccatctgtacaagcaaatttccagccagtctggggccagcaacgacaaccactaccttggctacagcaccccttgggggtattttgacttcaacagattccactgccacttctccccacgtgactggcaaagactcatcaacaacaattggggattccggcccaaaagactcaacttcaagctctttaacattcaagtcaaggaggtcacgcagaatgacggtacgacgacgattgccaataaccttaccagcacggttcaggtgtttactgactcggagtaccagctcccgtacgtcctcggctcggcgcatcaaggatgcctcccgccgttcccagcagacgtcttcatggtgccacagtatggatacctcaccctgaacaacgggagtcaggcggtaggacgctcttcattttaccgcctggagtactttccttctcagatgctgcgtaccggaaacaactttaccttcagctacacctttgaggacgttccttttcacagcagctacgctcacagccagagtttggaccgtctcatgaatcctctcatcgaccagtacctgtattacttgagcagaacaaacactccaagcggaaccactacgcagtccaggcttcagttttctcaagccggagcgagtgacattcgggaccagtctaggaactggcttcctggaccctgttaccgccagcagcgagtatcaaagacagctgcggacaacaacaacagtgattactcgtggactggagctaccaagtatcacctcaatggaagagactctctggtgaatccgggcacagccatggccagccacaaggacgatgaagaaaagtattttcctcagagcggggttctcatcttcggaaaacaagactcgggaaaaactaatgtggacattgaaaaggtcatgattacagacgaagaggaaatcaggaccaccaatcccgtggctacggagcagtatggttctgtatctaccaatctccagagcggcaacacacaagcagctacctcagatgtcaacacacaaggcgttcttccaggcatggtctggcaggacagagacgtgtacctgcagggacccatctgggcaaagattccacacacggacggacattttcacccttctcctcttatgggaggatttggaccgaagcaccctcccccgcagattctcatcaagaataccccggtacctgcgaatccttctaccaccttcagcgcggcaaagtttgcttccttcatcacacagtactccacggggcaggtcagcgtggagatcgagtgggagctgcagaaagagaacagcaaacgctggaaccccgagatccagtatacctccaactacaacaagtctgttaatgtggactttactgtggacactaatggcgtgtattcagagcctcgccccattggcacaagatacctgactcgtaatctgtaa

SEQ ID NO: 3428 - DNA, 2205 bp, synthetic construct
  misc_feature 1..2205: note = source = /note="Description of Artificial Sequence: Synthetic polynucleotide"
  source 1..2205: mol_type = other DNA
atggctgccgatggttatcttccagattggctcgaggacactctctctgaaggaataagacagtggtggaagctcaaacctggcccaccaccgccaaagcccgcagagcggcataaggacgacagcaggggtcttgtgcttcctgggtacaagtacctcggacccttcaacggactcgacaaaggagagccggtcaacgaggcagacgccgcggccctcgagcacgacaaggcctacgaccggcagctcgacagcggagacaacccgtacctcaagtacaaccacgccgacgcggagtttcaggagcgccttaaagaagatacgtcttttgggggcaacctcgcaagagcagtattccaggcgaaaaagagggttcttgaacctctgggcctggttgaggagcctgttaagacggctccgggaaaaaagaggccggtagagcactctcctgcggagctagattcctcctccggaactggaaagtcgggccaacagcctgcaagaaagagattgaattttggtcagactggagacgcagactccgtacctgacccccagcctctcggacagccaccagcagccccctctggtctgggaactaatacgatggcttcaggcagtggcgcaccaatggcagacaataacgagggcgccgacggggtgggtaattcctcgggaaattggcattgcgattccacatggatgggcgacagagtcatcaccaccagcacccgcacctgggctctgcccacctacaacaaccatctgtacaagcaaatttccagccagtctggggccagcaacgacaaccactaccttggctacagcaccccttgggggtattttgacttcaacagattccactgccacttctccccacgtgactggcaaagactcatcaacaacaattggggattccggcccaaaagactcaacttcaagctctttaacattcaagtcaaggaggtcacgcagaatgacggtacgacgacgattgccaataaccttaccagcacggttcaggtgtttactgactcggagtaccagctcccgtacgtcctcggctcggcgcatcaaggatgcctcccgccgttcccagcagacgtcttcatggtgccacagtatggatacctcaccctgaacaacgggagtcaggcggtaggacgctcttcattttactgcctggagtactttccttctcagatgctgcgtaccggaaacaactttaccttcagctacacctttgaggacgttccttttcacagcagctacgctcacagccagagtttggaccgtctcatgaatcctctcatcgaccagtacctgtattacttgagcagaacaaacactccaagcggaaccactacgcagtccaggcttcagttttctcaagccggagcgagtgacattcgggaccagtctaggaactggcttcctggaccctgttaccgccagcagcgagtatcaaagacagctgcggacaacaacagtgattactcgtggactggagctaccaagtatcacctcaatggaagagactctctggtgaatccgggcacagccatggccagccacaaggacgatgaagaaaagtattttcctcagagcggggttctcatcttcggaaaacaagactcgggaaaaactaatgtggacattgaaaaggtcatgattacagacgaagaggaaatcaggaccaccaatcccgtggctacggagcagtatggttctgtatctaccaatctccagagcggcaacacacaagcagctacctcagatgtcaacacacaaggcgttcttccaggcatggtctggcaggacagagacgtgtacctgcagggacccatctgggcaaagattccacacacggacggacattttcacccttctcctcttatgggaggatttggaccgaagcaccctcccccgcagattctcatcaagaataccccggtacctgcgaatccttctaccaccttcagcgcggcaaagtttgcttccttcatcacacagtactccacggggcaggtcagcgtggagatcgagtgggagctgcagaaagagaacagcaaacgctggaaccccgagatccagtatacctccaactacaacaagtctgttaatgtggactttactgtggacactaatggcgtgtattcagagcctcgccccattggcacaagatacctgactcgtaatctgtaa

SEQ ID NO: 3429 - DNA, 2205 bp, synthetic construct
  misc_feature 1..2205: note = source = /note="Description of Artificial Sequence: Synthetic polynucleotide"
  source 1..2205: mol_type = other DNA
atggctgccgatggttatcttccagattggctcgaggacactctctctgaaggaataagacagtggtggaagctcaaacctggcccaccaccgccaaagcccgcagagcggcataaggacgacagcaggggtcttgtgcttcctgggtacaagtacctcggacccttcaacggactcgacaaaggagagccggtcaacgaggcagacgccgcggccctcgagcacgacaaggcctacgaccggcagctcgacagcggagacaacccgtacctcaagtacaaccacgccgacgcggagtttcaggagcgccttaaagaagatacgtctttgggcaacctcgcaagagcagtattccaggcgaaaaagagggttcttgaacctctgggcctggttgaggagcctgttaagacggctccgggaaaaaagaggccggtagagcactctcctgcggagctagattcctcctccggaactggaaagtcgggccaacagcctgcaagaaagagattgaattttggtcagactggagacgcagactccgtacctgacccccagcctctcggacagccaccagcagccccctctggtctgggaactaatacgatggcttcaggcagtggcgcaccaatggcagacaataacgagggcgccgacggagtgggtaattcctcgggaaattggcattgcgattccacatggatgggcgacagagtcatcaccaccagcacccgcacctgggctctgcccacctacaacaaccatctgtacaagcaaatttccagccagtctggggccagcaacgacaaccactactttggctacagcaccccttgggggtattttgacttcaacagattccactgccacttctccccacgtgactggcaaagactcatcaacaacaattggggattccggcccaaaagactcaacttcaagctctttaacattcaagtcaaggaggtcacgcagaatgacggtacgacgacgattgccaataaccttaccagcacggttcaggtgtttactgactcggagtaccagctcccgtacgtcctcggctcggcgcatcaaggatgcctcccgccgttcccagcagacgtcttcatggtgccacagtatggatacctcaccctgaacaacgggagtcaggcggtaggacgctcttcattttactgcctggagtactttccttctcagatgctgcgtaccggaaacaactttaccttcagctacacctttgaggacgttccttttcacagcagctacgctcacagccagagtttggaccgtctcatgaatcctctcatcgaccagtacctgtattacttgagcagaacaaacactccaagcggaaccactacgcagtccaggcttcagttttctcaagccggagcgagtgacattcgggaccagtctaggaactggcttcctggaccctgttaccgccagcagcgagtatcaaagacagctgcggacaacaacaacagtgattactcgtggactggagctaccaagtatcacctcaatggaagagactctctggtgaatccgggcacagccatggccagccacaaggacgatgaagaaaagtattttcctcagagcggggttctcatcttcggaaaacaagactcgggaaaaactaatgtggacattgaaaaggtcatgattacagacgaagaggaaatcaggaccaccaatcccgtggctacggagcagtatggttctgtatctaccaatctccagagcggcaacacacaagcagctacctcagatgtcaacacacaaggcgttcttccaggcatggtctggcaggacagagacgtgtacctgcagggacccatctgggcaaagattccacacacggacggacattttcacccttctcctcttatgggaggatttggaccgaagcaccctcccccgcagattctcatcaagaataccccggtacctgcgaatccttctaccaccttcagcgcggcaaagtttgcttccttcatcacacagtactccacggggcaggtcagcgtggagatcgagtgggagctgcagaaagagaacagcaaacgctggaaccccgagatccagtatacctccaactacaacaagtctgttaatgtggactttactgtggacactaatggcgtgtattcagagcctcgccccattggcacaagatacctgactcgtaatctgtaa

SEQ ID NO: 3430 - DNA, 2208 bp, synthetic construct
  misc_feature 1..2208: note = source = /note="Description of Artificial Sequence: Synthetic polynucleotide"
  source 1..2208: mol_type = other DNA
atggctgccgatggttatcttccagattggctcgaggacactctctctgaaggaataagacagtggtggaagctcaaacctggcccaccaccgccaaagcccgcagagcggcataaggacgacagcaggggtcttgtgcttcctgggtacaagtacctcggacccttcaacggactcgacaaaggagagccggtcaacgaggcagacgccgcggccctcgagcacgacaaggcctacgaccggcagctcgacagcggagacaacccgtacctcaagtacaaccacgccgacgcggagtttcaggagcgccttaaagaagatacgtcttttgggggcaacctcgcaagagcagtattccaggcgaaaaagagggttcttgaacctctgggcctggttgaggagcctgttaagacggctccgggaaaaaagaggccggtagagcactctcctgcggagctagattcctcctccggaactggaaagtcgggccaacagcctgcaagaaagagattgaattttggtcagactggagacgcagactccgtacctgacccccagcctctcggacagccaccagcagccccctctggtctgggaactaatacgatggcttcaggcagtggcgcaccaatggcagacaataacgagggcgccgacggagtgggtaattcctcgggaaattggcattgcgattccacatggatgggcgacagagtcatcaccaccagcacccgcacctgggctctgcccacctacaacaaccatctgtacaagcaaatttccagccagtctggggccagcaacgacaaccactactttggctacagcaccccttgggggtattttgacttcaacagattccactgccacttctccccacgtgactggcaaagactcatcaacaacaattggggattccggcccaaaagactcaacttcaagctctttaacattcaagtcaaggaggtcacgcagaatgacggtacgacgacgattgccaataaccttaccagcacggttcaggtgtttactgactcggagtaccagctcccgtacgtcctcggctcggcgcatcaaggatgcctcccgccgttcccagcagacgtcttcatggtgccacagtatggatacctcaccctgaacaacgggagtcaggcggtaggacgctcttcattttactgcctggagtactttccttctcagatgctgcgtaccggaaacaactttaccttcagctacacctttgaggacgttccttttcacagcagctacgctcacagccagagtttggaccgtctcatgaatcctctcatcgaccagtacctgtattacttgagcagaacaaacactccaagcggaaccactacgcagtccaggcttcagttttctcaagccggagcgagtgacattcgggaccagtctaggaactggcttcctggaccctgttaccgccagcagcgagtatcaaagacagctgcggacaacaacaacagtgattactcgtggactggagctaccaagtatcacctcaatggaagagactctctggtgaatccgggcacagccatggccagccacaaggacgatgaagaaaagtattttcctcagagcggggttctcatcttcggaaaacaagactcgggaaaaactaatgtggacattgaaaaggtcatgattacagacgaagaggaaatcaggaccaccaatcccgtggctacggagcagtatggttctgtatctaccaatctccagagcggcaacacacaagcagctacctcagatgtcaacacacaaggcgttcttccaggcatggtctggcaggacagagacgtgtacctgcagggacccatctgggcaaagattccacacacggacggacattttcacccttctcctcttatgggaggatttggaccgaagcaccctcccccgcagattctcatcaagaataccccggtacctgcgaatccttctaccaccttcagcgcggcaaagtttgcttccttcatcacacagtactccacggggcaggtcggcgtggagatcgagtgggagctgcagaaagagaacagcaaacgctggaaccccgagatccagtatacctccaactacaacaagtctgttaatgtggactttactgtggacactaatggcgtgtattcagagcctcgccccattggcacaagatacctgactcgtaatctgtaa

SEQ ID NO: 3431 - DNA, 2208 bp, synthetic construct
  misc_feature 1..2208: note = source = /note="Description of Artificial Sequence: Synthetic polynucleotide"
  source 1..2208: mol_type = other DNA
atggctgccgatggttatcttccagattggctcgaggacactctctctgaaggaataagacagtggtggaagctcaaacctggcccaccaccgccaaagcccgcagagcggcataaggacgacagcaggggtcttgtgcttcctgggtacaagtacctcggacccttcaacggactcgacaaaggagagccggtcaacgaggcagacgccgcggccctcgagcacgacaaggcctacgaccggcagctcgacagcggagacaacccgtacctcaagtacaaccacgccgacgcggagtttcaggagcgccttaaagaagatacgtcttttgggggcaacctcgcaagagcagtattccaggcgaaaaagagggttcttgaacctctgggcctggttgaggagcctgttaagacggctccgggaaaaaagaggccggtagagcactctcctgcggagctagattcctcctccggaactggaaagtcgggccaacagcctgcaagaaagagattgaattttggtcagactggagacgcagactccgtacctgacccccagcctctcggacagccaccagcagccccctctggtctgggaactaatacgatggcttcaggcagtggcgcaccaatggcagacaataacgagggcgccgacggagtgggtaattcctcgggaaattggcattgcgattccacatggatgggcgacagagtcatcaccaccagcacccgcacctgggctctgcccacctacaacaaccatctgtacaagcaaatttccagccagtctggggccagcaacgacaaccactactttggctacagcaccccttgggggtattttgacttcaacagattccactgccacttctccccacgtgactggcaaagactcatcaacaacaattggggattccggcccaaaagactcaacttcaagctctttaacattcaagtcaaggaggtcacgcagaatgacagtacgacgacgattgccaataaccttaccagcacggttcaggtgtttactgactcggagtaccagctcccgtacgtcctcggctcggcgcatcaaggatgcctcccgccgttcccagcagacgtcttcatggtgccacagtatggatacctcaccctgaacaacgggagtcaggcggtaggacgctcttcattttactgcctggagtactttccttctcagatgctgcgtaccggaaacaactttaccttcagctacacctttgaggacgttccttttcacagcagctacgctcacagccagagtttggaccgtctcatgaatcctctcatcgaccagtacctgtattacttgagcagaacaaacactccaagcggaaccactacgcagtccaggcttcagttttctcaagccggagcgagtgacattcgggaccagtctaggaactggcttcctggaccctgttaccgccagcagcgagtatcaaagacagctgcggacaacaacaacagtgattactcgtggactggagctaccaagtatcacctcaatggaagagactctctggtgaatccgggcacagccatggccagccacaaggacgatgaagaaaagtattttcctcagagcggggttctcatcttcggaaaacaagactcgggaaaaactaatgtggacattgaaaaggtcatgattacagacgaagaggaaatcaggaccaccaatcccgtggctacggagcagtatggttctgtatctaccaatctccagagcggcaacacacaagcagctacctcagatgtcaacacacaaggcgttcttccaggcatggtctggcaggacagagacgtgtacctgcagggacccatctgggcaaagattccacacacggacggacattttcacccttctcctcttatgggaggatttggaccgaagcaccctcccccgcagattctcatcaagaataccccggtacctgcgaatccttctaccaccttcagcgcggcaaagtttgcttccttcatcacacagtactccacggggcaggtcagcgtggagatcgagtgggagctgcagaaagagaacagcaaacgctggaaccccgagatccagtatacctccaactacaacaagtctgttaatgtggactttactgtggacactaatggcgtgtattcagagcctcgccccattggcacaagatacctgactcgtaatctgtaa

SEQ ID NO: 3432 - DNA, 2208 bp, synthetic construct
  misc_feature 1..2208: note = source = /note="Description of Artificial Sequence: Synthetic polynucleotide"
  source 1..2208: mol_type = other DNA
atggctgccgatggttatcttccagattggctcgaggacactctctctgaaggaataagacagtggtggaagctcaaacctggcccaccaccgccaaagcccgcagagcggcataaggacgacagcaggggtcttgtgcttcctgggtacaagtacctcggacccttcaacggactcgacaaaggagagccggtcaacgaggcagacgccgcggccctcgagcacgacaaggcctacgaccggcagctcgacagcggagacaacccgtacctcaagtacaaccacgccgacgcggagtttcaggagcgccttaaagaagatacgtcttttgggggcaacctcgcaagagcagtattccaggcgaaaaagagggttcttgaacctctgggcctggttgaggagcctgttaagacggctccgggaaaaaagaggccggtagagcactctcctgcggagctagattcctcctccggaactggaaagtcgggccaacagcctgcaagaaagagattgaattttggtcagactggagacgcagactccgtacctgacccccagcctctcggacagccaccagcagccccctctggtctgggaactaatacgatggcttcaggcagtggcgcaccaatggcagacaataacgagggcgccgacggagtgggtaattcctcgggaaattggcattgcgattccacatggatgggcgacagagtcatcaccaccagcacccgcacctgggctctgcccacctacaacaaccatctgtacaagcaaatttccagccagtctggggccagcaacgacaaccactactttggctacagcaccccttgggggtattttgacttcaacagattccactgccacttctccccacgtgactggcaaagactcatcaacaacaattggggattccggcccaaaagactcaacttcaagctctttaacattcaagtcaaggaggtcacgcagaatgacggtacgacgacgattgccaataaccttaccagcacggttcaggtgtttactgactcggagtaccagctcccgtacgtcctcggctcggcgcatcaaggatgcctcccgccgttcccagcagacgtcttcatggtgccacagtatggatacctcaccctgaacaacgggagtcaggcggtaggacgctcttcattttactgcctggagtactttccttctcagatgctgcgtaccggaaacaactttaccttcagctacacctttgaggacgttccttttcacagcagctacgctcacagccagagtttggaccgtctcatgaatcctctcatcgaccagtacctgtattacttgagcagaacaaacactccaagcggaaccactacgcagtccaggcttcagttttctcaagccggagcgagtgacattcgggaccagtctaggaactggcttcctggaccctgttaccgccagcagcgagtatcaaagacagctgcggacaacaacaacagtgattactcgtggactggagctaccaagtatcacctcaatggaagagactctctggtgaatccgggcacagccatggccagccacaaggacgatgaagaaaagtattttcctcagagcggggttctcatcttccggaaacaagactcgggaaaaactaatgtggacattgaaaaggtcatgattacagacgaagaggaaatcaggaccaccaatcccgtggctacggagcagtatggttctgtatctaccaatctccagagcggcaacacacaagcagctacctcagatgtcaacacacaaggcgttcttccaggcatggtctggcaggacagagacgtgtacctgcagggacccatctgggcaaagattccacacacggacggacattttcacccttctcctcttatgggaggatttggaccgaagcaccctcccccgcagattctcatcaagaataccccggtacctgcgaatccttctaccaccttcagcgcggcaaagtttgcttacttcatcacacagtactccacggggcaggtcagcgtggagatcgagtgggagctgcagaaagagaacagcaaacgctggaaccccgagatccagtatacctccaactacaacaagtctgttaatgtggactttactgtggacactaatggcgtgtattcagagcctcgccccattggcacaagatacctgactcgtaatctgtaa

SEQ ID NO: 3433 - DNA, 2208 bp, synthetic construct
  misc_feature 1..2208: note = source = /note="Description of Artificial Sequence: Synthetic polynucleotide"
  source 1..2208: mol_type = other DNA
atggctgccgatggttatcttccagattggctcgaggacactctctctgaaggaataagacagtggtggaagctcaaacctggcccaccaccgccaaagcccgcagagcggcataaggacgacagcaggggtcttgtgcttcctgggtacaagtacctcggacccttcaacggactcgacaaaggagagccggtcaacgaggcagacgccgcggccctcgagcacgacaaggcctacgaccggcagctcgacagcggagacaacccgtacctcaagtacaaccacgccgacgcggagtttcaggagcgccttaaagaagatacgtcttttgggggcaacctcgcaagagcagtattccaggcgaaaaagagggttcttgaacctctgggcctggttgaggagcctgttaagacggctccgggaaaaaagaggccggtagagcactctcctgcggagctagattcctcctccggaactggaaagtcgggccaacagcctgcaagaaagagattgaattttggtcagactggagacgcagactccgtacctgacccccagcctctcggacagccaccagcagccccctctggtctgggaactaatacgatggcttcaggcagtggcgcaccaatggcagacaataacgagggcgccgacggagtgggtaattcctcgggaaattggcattgcgactccacatggatgggcgacagagtcatcaccaccagcacccgcacctgggctctgcccacctacaacaaccatctgtacaagcaaatttccagccagtctggggccagcaacgacaaccactactttggctacagcaccccttgggggtattttgacttcaacagattccactgccacttctccccacgtgactggcaaagactcatcaacaacaattggggattccggcccaaaagactcgacttcaagctctttaacattcaagtcaaggaggtcacgcagaatgacggtacgacgacgattgccaataaccttaccagcacggttcaggtgtttactgactcggagtaccagctcccgtacgtcctcggctcggcgcatcaaggatgcctcccgccgttcccagcagacgtcttcatggtgccacagtatggatacctcaccctgaacaacgggagtcaggcggtaggacgctcttcattttactgcctggagtactttccttctcagatgctgcgtaccggaaacaactttaccttcagctacacctttgaggacgttccttttcacagcagctacgctcacagccagagtttggaccgtctcatgaatcctctcatcgaccagtacctgtattacttgagcagaacaaacactccaagcggaaccactacgcagtccaggcttcagttttctcaagccggagcgagtgacattcgggaccagtctaggaactggcttcctggaccctgttaccgccagcagcgagtatcaaagacagctgcggacaacaacaacagtgattactcgtggactggagctaccaagtatcacctcaatggaagagactctctggtgaatccgggcacagccatggccagccacaaggacgatgaagaaaagtattttcctcagagcggggttctcatcttcggaaaacaagactcgggaaaaactaatgtggacattgaaaaggtcatgattacagacgaagaggaaatcaggaccaccaatcccgtggctacggagcagtatggttctgtatctaccaatctccagagcggcaacacacaagcagctacctcagatgtcaacacacaaggcgttcttccaggcatggtctggcaggacagagacgtgtacctgcagggacccatctgggcaaagattccacacacggacggacattttcacccttctcctcttatgggaggatttggaccgaagcaccctcccccgcagattctcatcaagaataccccggtacctgcgaatccttctaccaccttcagcgcggcaaagtttgcttccttcatcacacagtactccacggggcaggtcagcgtggagatcgagtgggagctgcagaaagagaacagcaaacgctggaaccccgagatccagtatacctccaactacaacaagtctgttaatgtggactttactgtggacactaatggcgtgtattcagagcctcgccccattggcacaagatacctgactcgtaatctgtaa

SEQ ID NO: 3434 - DNA, 2208 bp, synthetic construct
  misc_feature 1..2208: note = source = /note="Description of Artificial Sequence: Synthetic polynucleotide"
  source 1..2208: mol_type = other DNA
atggctgccgatggttatcttccagattggctcgaggacactctctctgaaggaataagacagtggtggaagctcaaacctggcccaccaccgccaaagcccgcagagcggcataaggacgacagcaggggtcttgtgcttcctgggtacaagtacctcggacccttcaacggactcgacaaaggagagccggtcaacgaggcagacgccgcggccctcgagcacgacaaggcctacgaccggcagctcgacagcggagacaacccgtacctcaagtacaaccacgccgacgcggagtttcaggagcgccttaaagaagatacgtcttttgggggcaacctcgcaagagcagtattccaggcgaaaaagagggttcttgaacctctgggcctggttgaggagcctgttaagacggctccgggaaaaaagaggccggtagagcactctcctgcggagctagattcctcctccggaactggaaagtcgggccaacagcctgcaagaaagagattgaattttggtcagactggaggcgcagactccgtacctgacccccagcctctcggacagccaccagcagccccctctggtctgggaactaatacgatggcttcaggcagtggcgcaccaatggcagacaataacgagggcgccgacggagtgggtaattcctcgggaaattggcattgcgattccacatggatgggcgacagagtcatcaccaccagcacccgcacctgggctctgcccacctacaacaaccatctgtacaagcaaatttccagccagtctggggccagcaacgacaaccactactttggctacagcaccccttgggggtattttgacttcaacagattccactgccacttctccccacgtgactggcaaagactcatcaacaacaattggggattccggcccaaaagactcaacttcaagctctttaacattcaagtcaaggaggtcacgcagaatgacggtacgacgacgattgccaataaccttaccagcacggttcaggtgtttactgactcggagtaccagctcccgtacgtcctcggctcggcgcatcaaggatgcctcccgccgttcccagcagacgtcttcatggtgccacagtatggatacctcaccctgaacaacgggagtcaggcggtaggacgctcttcattttactgcctggagtactttccttctcagatgctgcgtaccggaaacaactttaccttcagctacacctttgaggacgttccttttcacagcagctacgctcacagccagagtttggaccgtctcatgaatcctctcatcgaccagtacctgtattacttgagcagaacaaacactccaagcggaaccactacgcagtccaggcttcagttttctcaagccggagcgagtgacattcgggaccagtctaggaactggcttcctggaccctgttaccgccagcagcgagtatcaaagacagctgcggacaacaacaacagtgattactcgtggactggagctaccaagtatcacctcaatggaagagactctctggtgaatccgggcacagccatggccagccacaaggacgatgaagaaaagtattttcctcagagcggggttctcatcttcggaaaacaagactcgggaaaaactaatgtggacattgaaaaggtcatgattacagacgaagaggaaatcaggaccaccaatcccgtggctacggagcagtatggttctgtatctaccaatctccagagcggcaacacacaagcagctacctcagatgtcaacacacaaggcgttcttccaggcatggtctggcaggacagagacgtgtacctgcagggacccatctgggcaaagattccacacacggacggacattttcacccttctcctcttatgggaggatttggaccgaagcaccctcccccgcagattctcatcaagaataccccggtacctgcgaatccttctaccaccttcagcgcggcaaagtttgcttccttcatcacacagtactccacggggcaggtcagcgtggagatcgagtgggagctgcagaaagagaacagcaaacgctggaaccccgagatccagtatacctccaactacaacaagtctgttaatgtggactttactgtggacactaatggcgtgtattcagagcctcgccccattggcacaagatacctgactcgtaatctgtaa

SEQ ID NO: 3435 - DNA, 2208 bp, synthetic construct
  misc_feature 1..2208: note = source = /note="Description of Artificial Sequence: Synthetic polynucleotide"
  source 1..2208: mol_type = other DNA
atggctgccgatggttatcttccagattggctcgaggacactctctctgaaggaataagacagtggtggaagctcaaacctggcccaccaccgccaaagcccgcagagcggcataaggacgacagcaggggtcttgtgcttcctgggtacaagtacctcggacccttcaacggactcgacaaaggagagccggtcaacgaggcagacgccgcggccctcgagcacgacaaggcctacgaccggcagctcgacagcggagacaacccgtacctcaagtacaaccacgccgacgcggagtttcaggagcgccttaaagaagatacgtcttttgggggcaacctcgcaagagcagtattccaggcgaaaaagagggttcttgaacctctgggcctggttgaggagcctgttaagacggctccgggaaaaaagaggccggtagagcactctcctgcggagctagattcctcctccggaactggaaagtcgggccaacagcctgcaagaaagagattgaattttggtcagactggagacgcagactccgtacctgacccccagcctctcggacagccaccagcagccccctctggtctgggaactaatacgatggcttcaggcagtggcgcaccaatggcagacaataacgagggcgccgacggagtgggtaattcctcgggaaattggcattgcgattccacatggatgggcgacagagtcatcaccaccagcacccgcacctgggctctgcccacctacaacaaccatctgtacaagcaaatttccagccagtctggggccagcaacgacaaccactactttggctacagcaccccttgggggtattttgacttcaacagattccactgccacttctccccacgtgactggcaaagactcatcaacaacaattggggattccggcccaaaagactcaacttcaagctctttaacattcaagtcaaggaggtcacgcagaatgacggtacgacgacgattgccaataaccttaccagcacggttcaggtgtttactgactcggagtaccagctcccgtacgtcctcggctcggcgcatcaaggatgcctcccgccgttcccagcagacgtcttcatggtgccacagtatggatacctcaccctgaacaacgggagtcaggcggtaggacgctcttcattttactgcctggagtactttccttctcagatgctgcgtaccggaaacaaccttaccttcagctacacctttgaggacgttccttttcacagcagctacgctcacagccagagtttggaccgtctcatgaatcctctcatcgaccagtacctgtattacttgagcagaacaaacactccaagcggaaccactacgcagtccaggcttcagttttctcaagccggagcgagtgacattcgggaccagtctaggaactggcttcctggaccctgttaccgccagcagcgagtatcaaagacagctgcggacaacaacaacagtgattactcgtggactggagctaccaagtatcacctcaatggaagagactctctggtgaatccgggcacagccatggccagccacaaggacgatgaagaaaagtattttcctcagagcggggttctcatcttcggaaaacaagactcgggaaaaactaatgtggacattgaaaaggtcatgattacagacgaagaggaaatcaggaccaccaatcccgtggctacggagcagtatggttctgtatctaccaatctccagagcggcaacacacaagcagctacctcagatgtcaacacacaaggcgttcttccaggcatggtctggcaggacagagacgtgtacctgcagggacccatctgggcaaagattccacacacggacggacattttcacccttctcctcttatgggaggatttggaccgaagcaccctcccccgcagattctcatcaagaataccccggtacctgcgaatccttctaccaccttcagcgcggcaaagtttgcttccttcatcacacagtactccacggggcaggtcagcgtggagatcgagtgggagctgcagaaagagaacagcaaacgctggaaccccgagatccagtatacctccaactacaacaagtctgttaatgtggactttactgtggacactaatggcgtgtattcagagcctcgccccattggcacaagatacctgactcgtaatctgtaa

SEQ ID NO: 3436 - DNA, 2208 bp, synthetic construct
  misc_feature 1..2208: note = source = /note="Description of Artificial Sequence: Synthetic polynucleotide"
  source 1..2208: mol_type = other DNA
atggctgccgatggttatcttccagattggctcgaggacactctctctgaaggaataagacagtggtggaagctcaaacctggcccaccaccgccaaagcccgcagagcggcataaggacgacagcaggggtcttgtgcttcctgggtacaagtacctcggacccttcaacggactcgacaaaggagagccggtcaacgaggcagacgccgcggccctcgagcacgacaaggcctacgaccggcagctcgacagcggagacaacccgtacctcaagtacaaccacgccgacgcggagtttcaggagcgccttaaagaagatacgtcttttgggggcaacctcgcaagagcagtattccaggcgaaaaagagggttcttgaacctctgggcctggttgaggagcctgttaagacggctccgggaaaaaagaggccggtagagcactctcctgcggagctagattcctcctccggaactggaaagtcgggccaacagcctgcaagaaagagattgaattttggtcagactggagacgcagactccgtacctgacccccagcctctcggacagccaccagcagccccctctggtctgggaactaatacgatggcttcaggcagtggcgcaccaatggcagacaataacgagggcgccgacggagtgggtaattcctcgggaaattggcattgcgattccacatggatgggcgacagagtcatcaccaccagcacccgcacctgggctctgcccacctacaacaaccatctgtacaagcaaatttccagccagtctggggccagcaacgacaaccactactttggctacagcaccccttgggggtattttgacttcaacagattccactgccacttctccccacgtgactggcaaagactcatcaacaacaattggggattccggcccaaaagactcaacttcaagctctttaacattcaagtcaaggaggtcacgcagaatgacggtacgacgacgattgccaataaccttaccagcacggttcaggtgtttactgactcggagtaccagctcccgtacgtcctcggctcggcgcatcaaggatgcctcccgccgttcccagcagacgtcttcatggtgccacagtatggataccacaccctgaacaacgggagtcaggcggtaggacgctcttcattttactgcctggagtactttccttctcagatgctgcgtaccggaaacaactttaccttcagctacacctttgaggacgttccttttcacagcagctacgctcacagccagagtttggaccgtctcatgaatcctctcatcgaccagtacctgtattacttgagcagaacaaacactccaagcggaaccactacgcagtccaggcttcagttttctcaagccggagcgagtgacattcgggaccagtctaggaactggcttcctggaccctgttaccgccagcagcgagtatcaaagacagctgcggacaacaacaacagtgattactcgtggactggagctaccaagtatcacctcaatggaagagactctctggtgaatccgggcacagccatggccagccacaaggacgatgaagaaaagtattttcctcagagcggggttctcatcttcggaaaacaagactcgggaaaaactaatgtggacattgaaaaggtcatgattacagacgaagaggaaatcaggaccaccaatcccgtggctacggagcagtatggttctgtatctaccaatctccagagcggcaacacacaagcagctacctcagatgtcaacacacaaggcgttcttccaggcatggtctggcaggacagagacgtgtacctgcagggacccatctgggcaaagattccacacacggacggacattttcacccttctcctcttatgggaggatttggaccgaagcaccctcccccgcagattctcatcaagaataccccggtacctgcgaatccttctaccaccttcagcgcggcaaagtttgcttccttcatcacacagtactccacggggcaggtcagcgtggagatcgagtgggagctgcagaaagagaacagcaaacgctggaaccccgagatccagtatacctccaactacaacaagtctgttaatgtggactttactgtggacactaatggcgtgtattcagagcctcgccccattggcacaagatacctgactcgtaatctgtaa

SEQ ID NO: 3437 - DNA, 2208 bp, synthetic construct
  misc_feature 1..2208: note = source = /note="Description of Artificial Sequence: Synthetic polynucleotide"
  source 1..2208: mol_type = other DNA
atggctgccgatggttatcttccagattggctcgaggacactctctctgaaggaataagacagtggtggaagctcaaacctggcccaccaccgccaaagcccgcagagcggcataaggacgacagcaggggtcttgtgcttcctgggtacaagtacctcggacccttcaacggactcgacaaaggagagccggtcaacgaggcagacgccgcggccctcgagcacgacaaggcctacgaccggcagctcgacagcggagacaacccgtacctcaagtacaaccacgccgacgcggagtttcaggagcgccttaaagaagatacgtcttttgggggcaacctcgcaagagcagtattccaggcgaaaaagagggttcttgaacctctgggcctggttgaggagcctgttaagacggctccgggaaaaaagaggccggtagagcactctcctgcggagctagattcctcctccggaactggaaagtcgggccaacagcctgcaagaaagagattgaattttggtcagactggagacgcagactccgtacctgacccccagcctctcggacagccaccagcagccccctctggtctgggaactaatacgatggcttcaggcagtggcgcaccaatggcagacaataacgagggcgccgacggagtgggtaattcctcgggaaattggcattgcgattccacatggatgggcgacagagtcatcaccaccagcacccgcacctgggctctgcccacctacaacaaccatctgtacaagcaaatttccagccagtctggggccagcaacgacaaccactactttggctacagcaccccttgggggtattttgacttcaacagattccactgccacttctccccacgtgactggcaaagactcatcaacaacaattggggattccggcccaaaagactcaacttcaagctctttaacattcaagtcaaggaggtcacgcagaatgacggtacgacgacgattgccaataaccttaccagcacggttcaggtgtttactgactcggagtaccagctcccgtacgtcctcggctcggcgcatcaaggatgcctcccgccgttcccagcagacgtcttcatggtgccacagtatggatacctcaccctgaacaacgggagtcaggcggtaggacgctcttcattttactgcctggagtactttccttctcagatgctgcgtaccggaaacaactttaccttcagctacacctttgaggacgttccttttcacagcagctacgctcacagccagagtttggaccgtctcatgaatcctctcatcgaccagtacccgtattacttgagcagaacaaacactccaagcggaaccactacgcagtccaggcttcagttttctcaagccggagcgagtgacattcgggaccagtctaggaactggcttcctggaccctgttaccgccagcagcgagtatcaaagacagctgcggacaacaacaacagtgattactcgtggactggagctaccaagtatcacctcaatggaagagactctctggtgaatccgggcacagccatggccagccacaaggacgatgaagaaaagtattttcctcagagcggggttctcatcttcggaaaacaagactcgggaaaaactaatgtggacattgaaaaggtcatgattacagacgaagaggaaatcaggaccaccaatcccgtggctacggagcagtatggttctgtatctaccaatctccagagcggcaacacacaagcagctacctcagatgtcaacacacaaggcgttcttccaggcatggtctggcaggacagagacgtgtacctgcagggacccatctgggcaaagattccacacacggacggacattttcacccttctcctcttatgggaggatttggaccgaagcaccctcccccgcagattctcatcaagaataccccggtacctgcgaatccttctaccaccttcagcgcggcaaagtttgcttccttcatcacacagtactccacggggcaggtcagcgtggagatcgagtgggagctgcagaaagagaacagcaaacgctggaaccccgagatccagtatacctccaactacaacaagtctgttaatgtggactttactgtggacactaatggcgtgtattcagagcctcgccccattggcacaagatacctgactcgtaatctgtaa

SEQ ID NO: 3438 - DNA, 2208 bp, synthetic construct
  misc_feature 1..2208: note = source = /note="Description of Artificial Sequence: Synthetic polynucleotide"
  source 1..2208: mol_type = other DNA
atggctgccgatggttatcttccagattggctcgaggacactctctctgaaggaataagacagtggtggaagctcaaacctggcccaccaccgccaaagcccgcagagcggcataaggacgacagcaggggtcttgtgcttcctgggtacaagtacctcggacccttcaacggactcgacaaaggagagccggtcaacgaggcagacgccgcggccctcgagcacgacaaggcctacgaccggcagctcgacagcggagacaacccgtacctcaagtacaaccacgccgacgcggagtttcaggagcgccttaaagaagatacgtcttttgggggcaacctcgcaagagcagtattccaggcgaaaaagagggttcttgaacctctgggcctggttgaggagcctgttaagacggctccgggaaaaaagaggccggtagagcactctcctgcggagctagattcctcctccggaactggaaagtcgggccaacagcctgcaagaaagagattgaattttggtcagactggagacgcagactccgtacctgacccccagcctctcggacagccaccagcagccccctctggtctgggaactaatacgatggcttcaggcagtggcgcaccaatggcagacaataacgagggcgccgacggagtgggtaattcctcgggaaattggcattgcgattccacatggatgggcgacagagtcatcaccaccagcacccgcacctgggctctgcccacctacaacaaccatctgtacaagcaaatttccagccagtctggggccagcaacgacaaccactactttggctacagcaccccttgggggtattttgacttcaacagattccactgccacttctccccacgtgactggcaaagactcatcaacaacaattggggattccggcccaaaagactcaacttcaagctctttaacattcaagtcaaggaggtcacgcagaatgacggtacgacgacgattgccaataaccttaccagcacggttcaggtgtttactgactcggagtaccagctcccgtacgtcctcggctcggcgcatcaaggatgcctcccgccgttcccagcagacgtcttcatggtgccacagtatggatacctcaccctgaacaacgggagtcaggcggtaggacgctcttcattttactgcctggagtactttccttctcagatgctgcgtaccggaaacaactttaccttcagctacacctttgaggacgttccttttcacagcagctacgctcacagccagagtttggaccgtctcatgaatcctctcatcgaccagtacctgtattacttgagcagaacaaacactccaagcggaaccactacgcagtccaggcttcagttttctcaagccggagcgagtgacattcgggaccagtctaggaactggcttcctggaccctgttaccgccagcagcgagtatcaaagacagctgcggacaacaacaacagtgattactcgtggactggagctaccaagtatcacctcaatggaagagactctctggtgaatccgggcacagccatggccagccacaaggacgatgaagaaaagtattttcctcagagcggggttctcatcttcggaaaacaagactcgggaaaaactaatgtggacattgaaaaggtcatgattacagacgaagaggaaatcaggaccaccaatcccgtggctacggagcagtatggttctgtatctaccaatctccagagcggcaacacacaagcagctacctcagatgtcaacacacaaggcgttcttccaggcatggtctggcaggacagagacgtgtacctgcagggacccatctgggcaaagattccacacacggacggacattttcacccttctcctcttatgggaggatttggaccgaagcaccctcccccgcagattctcatcaagaataccccggtacctgcgaatcctcctaccaccttcagcgcggcaaagtttgcttccttcatcacacagtactccacggggcaggtcagcgtggagatcgagtgggagctgcagaaagagaacagcaaacgctggaaccccgagatccagtatacctccaactacaacaagtctgttaatgtggactttactgtggacactaatggcgtgtattcagagcctcgccccattggcacaagatacctgactcgtaatctgtaa

SEQ ID NO: 3439 - DNA, 2208 bp, synthetic construct
  misc_feature 1..2208: note = source = /note="Description of Artificial Sequence: Synthetic polynucleotide"
  source 1..2208: mol_type = other DNA
atggctgccgatggttatcttccagattggctcgaggacactctctctgaaggaataagacagtggtggaagctcaaacctggcccaccaccgccaaagcccgcagagcggcataaggacgacagcaggggtcttgtgcttcctgggtacaagtacctcggacccttcaacggactcgacaaaggagagccggtcaacgaggcagacgccgcggccctcgagcacgacaaggcctacgaccggcagctcgacagcggagacaacccgtacctcaagtacaaccacgccgacgcggagtttcaggagcgccttaaagaagatacgtcttttgggggcaacctcgcaagagcagtattccaggcgaaaaagagggttcttgaacctctgggcctggttgaggagcctgttaagacggctccgggaaaaaagaggccggtagagcactctcctgcggagctagattcctcctccggaactggaaagtcgggccaacagcctgcaagaaagagattgaattttggtcagactggagacgcagactccgtacctgacccccagcctctcggacagccaccagcagccccctctggtctgggaactaatacgatggcttcaggcagtggcgcaccaatggcagacaataacgagggcgccgacggagtgggtaattcctcgggaaattggcattgcgattccacatggatgggcgacagagtcatcaccaccagcacccgcacctgggctctgcccacctacaacaaccatctgtacaagcaaatttccagccagtctggggccagcaacgacaaccactactttggctacagcaccccttgggggtattttgacttcaacagattccactgccacttctccccacgtgactggcaaagactcatcaacaacaattggggattccggcccaaaagactcaacttcaagctctttaacattcaagtcaaggaggtcacgcagaatgacggtacgacgacgattgccaataaccttaccagcacggttcaggtgtttactgactcggagtaccagctcccgtacgtcctcggctcggcgcatcaaggatgcctcccgccgttcccagcagacgtcttcatggtgccacagtatggatacctcaccctgaacaacgggagtcaggcggtaggacgctcttcattttactgcctggagtactttccttctcagatgctgcgtaccggaaacaactttaccttcagctacacctttgaggacgttccttttcacagcagctacgctcacagccagagtttggaccgtctcatgaatcctctcatcgaccagtacctgtattacttgagcagaacaaacactccaagcggaaccactacgcagtccaggcttcagttttctcaagccggagcgagtgacattcgggaccagtctaggaactggcttcctggaccctgttaccgccagcagcgagtaccaaagacagctgcggacaacaacaacagtgattactcgtggactggagctaccaagtatcacctcaatggaagagactctctggtgaatccgggcacagccatggccagccacaaggacgatgaagaaaagtattttcctcagagcggggttctcatcttcggaaaacaagactcgggaaaaactaatgtggacattgaaaaggtcatgattacagacgaagaggaaatcaggaccaccaatcccgtggctacggagcagtatggttctgtatctaccaatctccagagcggcaacacacaagcagctacctcagatgtcaacacacaaggcgttcttccaggcatggtctggcaggacagagacgtgtacctgcagggacccatctgggcaaagattccacacacggacggacattttcacccttctcctcttatgggaggatttggaccgaagcaccctcccccgcagattctcatcaagaataccccggtacctgcgaatccttctaccaccttcagcgcggcaaagtttgcttccttcatcacacagtactccacggggcaggtcagcgtggagatcgagtgggagctgcagaaagagaacagcaaacgctggaaccccgagatccagtatacctccaactacaacaagtctgttaatgtggactttactgtggacactaatggcgtgtattcagagcctcgccccattggcacaagatacctgactcgtaatctgtaa

SEQ ID NO: 3440 - DNA, 2208 bp, synthetic construct
  misc_feature 1..2208: note = source = /note="Description of Artificial Sequence: Synthetic polynucleotide"
  source 1..2208: mol_type = other DNA
atggctgccgatggttatcttccagattggctcgaggacactctctctgaaggaataagacagtggtggaagctcaaacctggcccaccaccgccaaagcccgcagagcggcataaggacgacagcaggggtcttgtgcttcctgggtacaagtacctcggacccttcaacggactcgacaaaggagagccggtcaacgaggcagacgccgcggccctcgagcacgacaaggcctacgaccggcagctcgacagcggagacaacccgtacctcaagtacaaccacgccgacgcggagtttcaggagcgccttaaagaagatacgtcttttgggggcaacctcgcaagagcagtattccaggcgaaaaagagggttcttgaacctctgggcctggttgaggagcctgttaagacggctccgggaaaaaagaggccggtagagcactctcctgcggagctagattcctcctccggaactggaaagtcgggccaacagcctgcaagaaagagattgaattttggtcagactggagacgcagactccgtacctgacccccagcctctcggacagccaccagcagccccctctggtctgggaactaatacgatggcttcaggcagtggcgcaccaatggcagacaataacgagggcgccgacggagtgggtaattcctcgggaaattggcattgcgattccacatggatgggcgacagagtcatcaccaccagcacccgcacctgggctctgcccacctacaacaaccatctgtacaagcaaatttccagccagtctggggccagcaacgacaaccactactttggctacagcaccccttgggggtattttgacttcaacagattccactgccacttctccccacgtgactggcaaagactcatcaacaacaattggggattccggcccaaaagactcaacttcaagctctttaacattcaagtcaaggaggtcacgcagaatgacggtacgacgacgattgccaataaccttaccagcacggttcaggtgtttactgactcggagtaccagctcccgtacgtcctcggctcggcgcatcaaggatgcctcccgccgttcccagcagacgtcttcatggtgccacagtatggatacctcaccctgaacaacgggagtcaggcggtaggacgctcttcattttactgcctggagtactttccttctcagatgctgcgtaccggaaacaactttaccttcagctacacctttgaggacgttccttttcacagcagctacgctcacagccagagtttggaccgtctcatgaatcctctcatcgaccagtacctgtattacttgagcagaacaaacactccaagcggaaccactacgcagtccaggcttcagttttctcaagccggagcgagtgacattcgggaccagtctaggaactggcttcctggaccctgttaccgccagcagcgagtatcaaagacagctgcggacaacaacaacagtgattactcgtggactggagctaccaagtatcacctcaatggaagagactctctggtgaatccgggcacagccatggccagccacaaggacgatgaagaaaagtattttcctcagagcggggttctcatcttcggaaaacaagactcgggaaaaactaatgtggacattgaaaaggtcatgattacagacgaagaggaaatcaggaccaccaatcccgtggctacggagcagtatggttctgtatctaccaatctccagagcggcaacacacaagcagctacctcagatgtcaacacacaaggcgttcttccaggcatggtctggcaggacagagacgtgtacctgcagggacccatctgggcaaagattccacacacggacggacattttcacccttctcctcttatgggaggatttggaccgaagcaccctcccccgcagattctcatcaagaataccccggtacctgcgaatccttctaccaccttcagcgcggcaaagtttgcttccttcatcacacagtactccacggggcaggtcagcgtggagatcgagtgggagctgcagaaagagaacagcaaacgctggaaccccgagatccagtatacctccaactacaacaagtctgttaatgtggactttactgtggacactaatggcgtgtattcagagcctcgccccattggcacaagatacctgactcgtaatctgtaa

SEQ ID NO: 3441 - DNA, 2208 bp, synthetic construct
  misc_feature 1..2208: note = source = /note="Description of Artificial Sequence: Synthetic polynucleotide"
  source 1..2208: mol_type = other DNA
atggctgccgatggttatcttccagattggctcgaggacactctctctgaaggaataagacagtggtggaagctcaaacctggcccaccaccgccaaagcccgcagagcggcataaggacgacagcaggggtcttgtgcttcctgggtacaagtacctcggacccttcaacggactcgacaaaggagagccggtcaacgaggcagacgccgcggccctcgagcacgacaaggcctacgaccggcagctcgacagcggagacaacccgtacctcaagtacaaccacgccgacgcggagtttcaggagcgccttaaagaagatacgccttttgggggcaacctcgcaagagcagtattccaggcgaaaaagagggttcttgaacctctgggcctggttgaggagcctgttaagacggctccgggaaaaaagaggccggtagagcactctcctgcggagctagattcctcctccggaactggaaagtcgggccaacagcctgcaagaaagagattgaattttggtcagactggagacgcagactccgtacctgacccccagcctctcggacagccaccagcagccccctctggtctgggaactaatacgatggcttcaggcagtggcgcaccaatggcagacaataacgagggcgccgacggagtgggtaattcctcgggaaattggcattgcgattccacatggatgggcgacagagtcatcaccaccagcacccgcacctgggctctgcccacctacaacaaccatctgtacaagcaaatttccagccagtctggggccagcaacgacaaccactactttggctacagcaccccttgggggtattttgacttcaacagattccactgccacttctccccacgtgactggcaaagactcatcaacaacaattggggattccggcccaaaagactcaacttcaagctctttaacattcaagtcaaggaggtcacgcagaatgacggtacgacgacgattgccaataaccttaccagcacggttcaggtgtttactgactcggagtaccagctcccgtacgtcctcggctcggcgcatcaaggatgcctcccgccgttcccagcagacgtcttcatggtgccacagtatggatacctcaccctgaacaacgggagtcaggcggtaggacgctcttcattttactgcctggagtactttccttctcagatgctgcgtaccggaaacaactttaccttcagctacacctttgaggacgttccttttcacagcagctacgctcacagccagagtttggaccgtctcatgaatcctctcatcgaccagtacctgtattacttgagcagaacaaacactccaagcggaaccactacgcagtccaggcttcagttttctcaagccggagcgagtgacattcgggaccagtctaggaactggcttcctggaccctgttaccgccagcagcgagtatcaaagacagctgcggacaacaacaacagtgattactcgtggactggagctaccaagtatcacctcaatggaagagactctctggtgaatccgggcacagccatggccagccacaaggacgatgaagaaaagtattttcctcagagcggggttctcatcttcggaaaacaagactcgggaaaaactaatgtggacattgaaaaggtcatgattacagacgaagaggaaatcaggaccaccaatcccgtggctacggagcagtatggttctgtatctaccaatctccagagcggcaacacacaagcagctacctcagatgtcaacacacaaggcgttcttccaggcatggtctggcaggacagagacgtgtacctgcagggacccatctgggcaaagattccacacacggacggacattttcacccttctcctcttatgggaggatttggaccgaagcaccctcccccgcagattctcatcaagaataccccggtacctgcgaatccttctaccaccttcagcgcggcaaagtttgcttccttcatcacacagtactccacggggcaggtcagcgtggagatcgagtgggagctgcagaaagagaacagcaaacgctggaaccccgagatccagtatacctccaactacaacaagtctgttaatgtggactttactgtggacactaatggcgtgtattcagagcctcgccccattggcacaagatacctgactcgtaatctgtaa

SEQ ID NO: 3442 - DNA, 2208 bp, synthetic construct
  misc_feature 1..2208: note = source = /note="Description of Artificial Sequence: Synthetic polynucleotide"
  source 1..2208: mol_type = other DNA
atggctgccgatggttatcttccagattggctcgaggacactctctctgaaggaataagacagtggtggaagctcaaacctggcccaccaccgccaaagcccgcagagcggcataaggacgacagcaggggtcttgtgcttcctgggtacaagtacctcggacccttcaacggactcgacaaaggagagccggtcaacgaggcagacgccgcggccctcgagcacgacaaggcctacgaccggcagctcgacagcggagacaacccgtacctcaagtacaaccacgccgacgcggagtttcaggagcgccttaaagaagatacgtcttttgggggcaacctcgcaagagcagtattccaggcgaaaaagagggttcttgaacctctgggcctggttgaggagcctgttaagacggctccgggaaaaaagaggccggtagagcactctcctgcggagctagattcctcctccggaactggaaagtcgggccaacagcctgcaagaaagagattgaattttggtcagactggagacgcagactccgtacctgacccccagcctctcggacagccaccagcagccccctctggtctgggaactaatacgatggcttcaggcagtggcgcaccaatggcagacaataacgagggcgccgacggagtgggtaattcctcgggaaattggcattgcgattccacatggatgggcgacagagtcatcaccaccagcacccgcacctgggctctgcccacctacaacaaccatctgtacaagcaaatttccagccagtctggggccagcaacgacaaccactactttggctacagcaccccttgggggtattttgacttcaacagattccactgccacttctccccacgtgactggcaaagactcatcaacaacaattggggattccggcccaaaagactcaactccaagctctttaacattcaagtcaaggaggtcacgcagaatgacggtacgacgacgattgccaataaccttaccagcacggttcaggtgtttactgactcggagtaccagctcccgtacgtcctcggctcggcgcatcaaggatgcctcccgccgttcccagcagacgtcttcatggtgccacagtatggatacctcaccctgaacaacgggagtcaggcggtaggacgctcttcattttactgcctggagtactttccttctcagatgctgcgtaccggaaacaactttaccttcagctacacctttgaggacgttccttttcacagcagctacgctcacagccagagtttggaccgtctcatgaatcctctcatcgaccagtacctgtattacttgagcagaacaaacactccaagcggaaccactacgcagtccaggcttcagttttctcaagccggagcgagtgacattcgggaccagtctaggaactggcttcctggaccctgttaccgccagcagcgagtatcaaagacagctgcggacaacaacaacagtgattactcgtggactggagctaccaagtatcacctcaatggaagagactctctggtgaatccgggcacagccatggccagccacaaggacgatgaagaaaagtattttcctcagagcggggttctcatcttcggaaaacaagactcgggaaaaactaatgtggacattgaaaaggtcatgattacagacgaagaggaaatcaggaccaccaatcccgtggctacggagcagtatggttctgtatctaccaatctccagagcggcaacacacaagcagctacctcagatgtcaacacacaaggcgttcttccaggcatggtctggcaggacagagacgtgtacctgcagggacccatctgggcaaagattccacacacggacggacattttcacccttctcctcttatgggaggatttggaccgaagcaccctcccccgcagattctcatcaagaataccccggtacctgcgaatccttctaccaccttcagcgcggcaaagtttgcttccttcatcacacagtactccacggggcaggtcagcgtggagatcgagtgggagctgcagaaagagaacagcaaacgctggaaccccgagatccagtatacctccaactacaacaagtctgttaatgtggactttactgtggacactaatggcgtgtattcagagcctcgccccattggcacaagatacctgactcgtaatctgtaa

SEQ ID NO: 3443 - DNA, 2208 bp, synthetic construct
  misc_feature 1..2208: note = source = /note="Description of Artificial Sequence: Synthetic polynucleotide"
  source 1..2208: mol_type = other DNA
atggctgccgatggttatcttccagattggctcgaggacactctctctgaaggaataagacagtggtggaagctcaaacctggcccaccaccgccaaagcccgcagagcggcataaggacgacagcaggggtcttgtgcttcctgggtacaagtacctcggacccttcaacggactcgacaaaggagagccggtcaacgaggcagacgccgcggccctcgagcacgacaaggcctacgaccggcagctcgacagcggagacaacccgtacctcaagtacaaccacgccgacgcggagtttcaggagcgccttaaagaagatacgtcttttgggggcaacctcgcaagagcagtattccaggcgaaaaagagggttcttgaacctctgggcctggttgaggagcctgttaagacggctccgggaaaaaagaggccggtagagcactctcctgcggagctagattcctcctccggaactggaaagtcgggccaacagcctgcaagaaagagattgaattttggtcagactggagacgcagactccgtacctgacccccagcctctcggacagccaccagcagccccctctggtctgggaactaatacgatggcttcaggcagtggcgcaccaatggcagacaataacgagggcgccgacggagtgggtaattcctcgggaaattggcattgcgattccacatggatgggcgacagagtcatcaccaccagcacccgcacctgggctctgcccacctacaacaaccatctgtacaagcaaatttccagccagtctggggccagcaacgacaaccactactttggctacagcaccccttgggggtattttgacttcaacagattccactgccacttctccccacgtgactggcaaagactcatcaacaacaattggggattccggcccaaaagactcaacttcaagctctttaacattcaagtcaaggaggtcacgcagaatgacggtacgacgacgattgccaataaccttaccagcacggttcaggtgtttactgactcggagtaccagctcccgtacgtcctcggctcggcgcatcaaggatgcctcccgccgttcccagcagacgtcttcatggtgccacagtatggatacctcaccctgaacaacgggagtcaggcggtaggacgctcttcattttactgcctggagtactttccttctcagatgctgcgtaccggaaacaactttaccttcagctacacctttgaggacgttccttttcacagcagctacgctcacagccagggtttggaccgtctcatgaatcctctcatcgaccagtacctgtattacttgagcagaacaaacactccaagcggaaccactacgcagtccaggcttcagttttctcaagccggagcgagtgacattcgggaccagtctaggaactggcttcctggaccctgttaccgccagcagcgagtatcaaagacagctgcggacaacaacaacagtgattactcgtggactggagctaccaagtatcacctcaatggaagagactctctggtgaatccgggcacagccatggccagccacaaggacgatgaagaaaagtattttcctcagagcggggttctcatcttcggaaaacaagactcgggaaaaactaatgtggacattgaaaaggtcatgattacagacgaagaggaaatcaggaccaccaatcccgtggctacggagcagtatggttctgtatctaccaatctccagagcggcaacacacaagcagctacctcagatgtcaacacacaaggcgttcttccaggcatggtctggcaggacagagacgtgtacctgcagggacccatctgggcaaagattccacacacggacggacattttcacccttctcctcttatgggaggatttggaccgaagcaccctcccccgcagattctcatcaagaataccccggtacctgcgaatccttctaccaccttcagcgcggcaaagtttgcttccttcatcacacagtactccacggggcaggtcagcgtggagatcgagtgggagctgcagaaagagaacagcaaacgctggaaccccgagatccagtatacctccaactacaacaagtctgttaatgtggactttactgtggacactaatggcgtgtattcagagcctcgccccattggcacaagatacctgactcgtaatctgtaa

SEQ ID NO: 3444 - DNA, 2208 bp, synthetic construct
  misc_feature 1..2208: note = source = /note="Description of Artificial Sequence: Synthetic polynucleotide"
  source 1..2208: mol_type = other DNA
atggctgccgatggttatcttccagattggctcgaggacactctctctgaaggaataagacagtggtggaagctcaaacctggcccaccaccgccaaagcccgcagagcggcataaggacgacagcaggggtcttgtgcttcctgggtacaagtacctcggacccttcaacggactcgacaaaggagagccggtcaacgaggcagacgccgcggccctcgagcacgacaaggcctacgaccggcagctcgacagcggagacaacccgtacctcaagtacaaccacgccgacgcggagtttcaggagcgccttaaagaagatacgtcttttgggggcaacctcgcaagagcagtattccaggcgaaaaagagggttcttgaacctctgggcctggttgaggagcctgttaagacggctccgggaaaaaagaggccggtagagcactctcctgcggagctagattcctcctccggaactggaaagtcgggccaacagcctgcaagaaagagattgaattttggtcagactggagacgcagactccgtacctgacccccagcctctcggacagccaccagcagccccctctggtctgggaactaatacgatggcttcaggcagtggcgcaccaatggcagacaataacgagggcgccgacggagtgggtaattcctcgggaaattggcattgcgattccacatggatgggcgacagagtcatcaccaccagcacccgcacctgggctctgcccacctacaacaaccatctgtacaagcaaatttccagccagtctggggccagcaacgacaaccactactttggctacagcaccccttgggggtattttgacttcaacagattccactgccacttctccccacgtgactggcaaagactcatcaacaacaattggggattccggcccaaaagactcaacttcaagctctttaacattcaagtcaaggaggtcacgcagaatgacggtacgacgacgattgccaataaccttaccagcacggttcaggtgtttactgactcggagtaccagctcccgtacgtcctcggctcggcgcatcaaggatgcctcccgccgctcccagcagacgtcttcatggtgccacagtatggatacctcaccctgaacaacgggagtcaggcggtaggacgctcttcattttactgcctggagtactttccttctcagatgctgcgtaccggaaacaactttaccttcagctacacctttgaggacgttccttttcacagcagctacgctcacagccagagtttggaccgtctcatgaatcctctcatcgaccagtacctgtattacttgagcagaacaaacactccaagcggaaccactacgcagtccaggcttcagttttctcaagccggagcgagtgacattcgggaccagtctaggaactggcttcctggaccctgttaccgccagcagcgagtatcaaagacagctgcggacaacaacaacagtgattactcgtggactggagctaccaagtatcacctcaatggaagagactctctggtgaatccgggcacagccatggccagccacaaggacgatgaagaaaagtattttcctcagagcggggttctcatcttcggaaaacaagactcgggaaaaactaatgtggacattgaaaaggtcatgattacagacgaagaggaaatcaggaccaccaatcccgtggctacggagcagtatggttctgtatctaccaatctccagagcggcaacacacaagcagctacctcagatgtcaacacacaaggcgttcttccaggcatggtctggcaggacagagacgtgtacctgcagggacccatctgggcaaagattccacacacggacggacattttcacccttctcctcttatgggaggatttggaccgaagcaccctcccccgcagattctcatcaagaataccccggtacctgcgaatccttctaccaccttcagcgcggcaaagtttgcttccttcatcacacagtactccacggggcaggtcagcgtggagatcgagtgggagctgcagaaagagaacagcaaacgctggaaccccgagatccagtatacctccaactacaacaagtctgttaatgtggactttactgtggacactaatggcgtgtattcagagcctcgccccattggcacaagatacctgactcgtaatctgtaa

SEQ ID NO: 3445 - DNA, 2208 bp, synthetic construct
  misc_feature 1..2208: note = source = /note="Description of Artificial Sequence: Synthetic polynucleotide"
  source 1..2208: mol_type = other DNA
atggctgccgatggttatcttccagattggctcgaggacactctctctgaaggaataagacagtggtggaagctcaaacctggcccaccaccgccaaagcccgcagagcggcataaggacgacagcaggggtcttgtgcttcctgggtacaagtacctcggacccttcaacggactcgacaaaggagagccggtcaacgaggcagacgccgcggccctcgagcacgacaaggcctacgaccggcagctcgacagcggagacaacccgtacctcaagtacaaccacgccgacgcggagtttcaggagcgccttaaagaagatacgtcttttgggggcaacctcgcaagagcagtattccaggcgaaaaagagggttcttgaacctctgggcctggttgaggagcctgttaagacggctccgggaaaaaagaggccggtagagcactctcctgcggagctagattcctcctccggaactggaaagtcgggccaacagcctgcaagaaagagattgaattttggtcagactggagacgcagactccgtacctgacccccagcctctcggacagccaccagcagccccctctggtctgggaactaatacgatggcttcaggcagtggcgcaccaatggcagacaataacgagggcgccgacggagtgggtaattcctcgggaaattggcattgcgattccacatggatgggcgacagagtcatcaccaccagcacccgcacctgggctctgcccacctacaacaaccatctgtacaagcaaatttccagccagtctggggccagcaacgacaaccactactttggctacagcaccccttgggggtattttgacttcaacagattccactgccacttctccccacgtgactggcaaagacccatcaacaacaattggggattccggcccaaaagactcaacttcaagctctttaacattcaagtcaaggaggtcacgcagaatgacggtacgacgacgattgccaataaccttaccagcacggttcaggtgtttactgactcggagtaccagctcccgtacgtcctcggctcggcgcatcaaggatgcctcccgccgttcccagcagacgtcttcatggtgccacagtatggatacctcaccctgaacaacgggagtcaggcggtaggacgctcttcattttactgcctggagtactttccttctcagatgctgcgtaccggaaacaactttaccttcagctacacctttgaggacgttccttttcacagcagctacgctcacagccagagtttggaccgtctcatgaatcctctcatcgaccagtacctgtattacttgagcagaacaaacactccaagcggaaccactacgcagtccaggcttcagttttctcaagccggagcgagtgacattcgggaccagtctaggaactggcttcctggaccctgttaccgccagcagcgagtatcaaagacagctgcggacaacaacaacagtgattactcgtggactggagctaccaagtatcacctcaatggaagagactctctggtgaatccgggcacagccatggccagccacaaggacgatgaagaaaagtattttcctcagagcggggttctcatcttcggaaaacaagactcgggaaaaactaatgtggacattgaaaaggtcatgattacagacgaagaggaaatcaggaccaccaatcccgtggctacggagcagtatggttctgtatctaccaatctccagagcggcaacacacaagcagctacctcagatgtcaacacacaaggcgttcttccaggcatggtctggcaggacagagacgtgtacctgcagggacccatctgggcaaagattccacacacggacggacattttcacccttctcctcttatgggaggatttggaccgaagcaccctcccccgcagattctcatcaagaataccccggtacctgcgaatccttctaccaccttcagcgcggcaaagtttgcttccttcatcacacagtactccacggggcaggtcagcgtggagatcgagtgggagctgcagaaagagaacagcaaacgctggaaccccgagatccagtatacctccaactacaacaagtctgttaatgtggactttactgtggacactaatggcgtgtattcagagcctcgccccattggcacaagatacctgactcgtaatctgtaa

SEQ ID NO: 3446 - DNA, 2208 bp, synthetic construct
  misc_feature 1..2208: note = source = /note="Description of Artificial Sequence: Synthetic polynucleotide"
  source 1..2208: mol_type = other DNA
atggctgccgatggttatcttccagattggctcgaggacactctctctgaaggaataagacagtggtggaagctcaaacctggcccaccaccgccaaagcccgcagagcggcataaggacgacagcaggggtcttgtgcttcctgggtacaagtacctcggacccttcaacggactcgacaaaggagagccggtcaacgaggcagacgccgcggccctcgagcacgacgaggcctacgaccggcagctcgacagcggagacaacccgtacctcaagtacaaccacgccgacgcggagtttcaggagcgccttaaagaagatacgtcttttgggggcaacctcgcaagagcagtattccaggcgaaaaagagggttcttgaacctctgggcctggttgaggagcctgttaagacggctccgggaaaaaagaggccggtagagcactctcctgcggagctagattcctcctccggaactggaaagtcgggccaacagcctgcaagaaagagattgaattttggtcagactggagacgcagactccgtacctgacccccagcctctcggacagccaccagcagccccctctggtctgggaactaatacgatggcttcaggcagtggcgcaccaatggcagacaataacgagggcgccgacggagtgggtaattcctcgggaaattggcattgcgattccacatggatgggcgacagagtcatcaccaccagcacccgcacctgggctctgcccacctacaacaaccatctgtacaagcaaatttccagccagtctggggccagcaacgacaaccactactttggctacagcaccccttgggggtattttgacttcaacagattccactgccacttctccccacgtgactggcaaagactcatcaacaacaattggggattccggcccaaaagactcaacttcaagctctttaacattcaagtcaaggaggtcacgcagaatgacggtacgacgacgattgtcaataaccttaccagcacggttcaggtgtttactgactcggagtaccagctcccgtacgtcctcggctcggcgcatcaaggatgcctcccgccgttcccagcagacgtcttcatggtgccacagtatggatacctcaccctgaacaacgggagtcaggcggtaggacgctcttcattttactgcctggagtactttccttctcagatgctgcgtaccggaaacaactttaccttcagctacacctttgaggacgttccttttcacagcagctacgctcacagccagagtttggaccgtctcatgaatcctctcatcgaccagtacctgtattacttgagcagaacaaacactccaagcggaaccactacgcagtccaggcttcagttttctcaagccggagcgagtgacattcgggaccagtctaggaactggcttcctggaccctgttaccgccagcagcgagtatcaaagacagctgcggacaacaacaacagtgattactcgtggactggagctaccaagtatcacctcaatggaagagactctctggtgaatccgggcacagccatggccagccacaaggacgatgaagaaaagtattttcctcagagcggggttctcatcttcggaaaacaagactcgggaaaaactaatgtggacattgaaaaggtcatgattacagacgaagaggaaatcaggaccaccaatcccgtggctacggagcagtatggttctgtatctaccaatctccagagcggcaacacacaagcagctacctcagatgtcaacacacaaggcgttcttccaggcatggtctggcaggacagagacgtgtacctgcagggacccatctgggcaaagattccacacacggacggacattttcacccttctcctcttatgggaggatttggaccgaagcaccctcccccgcagattctcatcaagaataccccggtacctgcgaatccttctaccaccttcagcgcggcaaagtttgcttacttcatcacacagtactccacggggcaggtcagcgtggagatcgagtgggagctgcagaaagggaacagcaaacgctggaaccccgagatccagtatacctccaactacaacaagtctgttaatgtggactttactgtggacactaatggcgtgtattcagagcctcgccccattggcacaagatacctgactcgtaatctgtaa

SEQ ID NO: 3447 - DNA, 2208 bp, synthetic construct
  misc_feature 1..2208: note = source = /note="Description of Artificial Sequence: Synthetic polynucleotide"
  source 1..2208: mol_type = other DNA
atggctgccgatggttatcttccagattggctcgaggacactctctctgaaggaataagacagtggtggaagctcaaacctggcccaccaccgccaaagcccgcagagcggcataaggacgacagcaggggtcttgtgcttcctgggtacaagtacctcggacccttcaacggactcgacaaaggagagccggtcaacgaggcagacgccgcggccctcgagcacgacaaggcctacgaccggcagctcgacagcggagacaacccgtacctcaagtacaaccacgccgacgcggagtttcaggagcgccttaaagaagatacgtcttttgggggcaacctcgcaagagcagtattccaggcgaaaaagagggttcttgaacctctgggcctggttgaggagcctgttaagacggctccgggaaaaaagaggccggtagagcactctcctgcggagctagattcctcctccggaactggaaagtcgggccaacagcctgcaagaaagagattgaattttggtcagactggagacgcagactccgtacctgacccccagcctctcggacagccaccagcagccccctctggtctgggaactaatacgatggcttcaggcagtggcgcaccaatggcagacaataacgagggcgccgacggagtgggtaattcctcgggaaattggcattgcgattccacatggatgggcgacagagtcatcaccaccagcacccgcacctgggctctgcccacctacaacaaccatctgtacaagcaaatttccagccagtctggggccagcaacgacaaccactactttggctacagcaccccttgggggtattttgacttcaacagattccactgccacttctccccacgtgactggcaaagactcatcaacaacaattggggattccggcccaaaagactcaacttcaagctctttaacattcaagtcaaggaggtcacgcagaatgacggtacgacgacgattgccaataaccttaccagcacggttcaggtgtttactgactcggagtaccagctcccgtacgtcctcggctcggcgcatcaaggatgcctcccgccgttcccagcagacgtcttcatggtgccacagtatggatacctcaccctgaacaacgggagtcaggcggtaggacgctcttcattttactgcctggagtactttccttctcagatgctgcgtaccggaaacaactgtaccttcagctacacctttgaggacgttccttttcacagcagctacgctcacagccagagtttggaccgtctcatgaatcctctcatcgaccagtacctgtattacttgagcagaacaaacactccaagcggaaccactacgcagtccaggcttcagttttctcaagccggagcgagtgacattcgggaccagtctaggaactggcttcctggaccctgttaccgccagcagcgagtatcaaagacagctgcggacaacaacaacagtgattactcgtggactggagctaccaagtatcacctcaatggaagagactctctggtgaatccgggcacagccatggccagccacaaggacgatgaagaaaagtattttcctcagagcggggttctcatcttcggaaaacaagactcgggaaaaactaatgtggacattgaaaaggtcatgattacagacgaagaggaaatcaggaccaccaatcccgtggctacggagcagtatggttctgtatctaccaatctccagagcggcaacacacaagcagctacctcagatgtcaacacacaaggcgttcttccaggcatggtctggcaggacagagacgtgtacctgcagggacccatctgggcaaagattccacacacggacggacattttcacccttctcctcttatgggaggatttggaccgaagcaccctcccccgcagattctcatcaagaataccccggtacctgcgaatccttctaccaccttcagcgcggcaaagtttgcttccttcatcacacagtactccacggggcaggtcagcgtggagatcgagtgggagctgcagaaagagaacagcaaacgctggaaccccgagatccagtatacctccaactacaacaagtctgttaatgtggactttactgtggacactaatggcgtgtattcagagcctcgccccattggcacaagatacctgactcgtaatctgtaa

SEQ ID NO: 3448 - DNA, 2208 bp, synthetic construct
  misc_feature 1..2208: note = source = /note="Description of Artificial Sequence: Synthetic polynucleotide"
  source 1..2208: mol_type = other DNA
atggctgccgatggttatcttccagattggctcgaggacactctctctgaaggaataagacagtggtggaagctcaaacctggcccaccaccgccaaagcccgcagagcggcataaggacgacagcaggggtcttgtgcttcctgggtacaagtacctcggacccttcaacggactcgacaaaggagagccggtcaacgaggcagacgccgcggccctcgagcacgacaaggcctacgaccggcagctcgacagcggagacaacccgtacctcaagtacaaccacgccgacgcggagtttcaggagcgccttaaagaagatacgtcttttgggggcaacctcgcaagagcagtattccaggcgaaaaagagggttcttgaacctctgggcctggttgaggagcctgttaagacggctccgggaaaaaagaggccggtagagcactctcctgcggagctagattcctcctccggaactggaaagtcgggccaacagcctgcaagaaagagattgaattttggtcagactggagacgcagactccgtacctgacccccagcctctcggacagccaccagcagccccctctggtctgggaactaatacgatggcttcaggcagtggcgcaccaatggcagacaataacgagggcgccgacggagtgggtaattcctcgggaaattggcattgcgattccacatggatgggcgacagagtcatcaccaccagcacccgcacctgggctctgcccacctacaacaaccatctgtacaagcaaatttccagccagtctggggccagcaacgacaaccactactttggctacagcaccccttgggggtattttgacttcaacagattccactgccacttctccccacgtgactggcaaagactcatcaacaacaattggggattccggcccaaaagacccaacttcaagctctttaacattcaagtcaaggaggtcacgcagaatgacggtacgacgacgattgccaataaccttaccagcacggttcaggtgtttactgactcggagtaccagctcccgtacgtcctcggctcggcgcatcaaggatgcctcccgccgttcccagcagacgtcttcatggtgccacagtatggatacctcaccctgaacaacgggagtcaggcggtaggacgctcttcattttactgcctggagtactttccttctcagatgctgcgtaccggaaacaactttaccttcagctacacctttgaggacgttccttttcacagcagctacgctcacagccagagtttggaccgtctcatgaatcctctcatcgaccagtacctgtattacttgagcagaacaaacactccaagcggaaccactacgcagtccaggcttcagttttctcaagccggagcgagtgacattcgggaccagtctaggaactggcttcctggaccctgttaccgccagcagcgagtatcaaagacagctgcggacaacaacaacagtgattactcgtggactggagctaccaagtatcacctcaatggaagagactctctggtgaatccgggcacagccatggccagccacaaggacgatgaagaaaagtattttcctcagagcggggttctcatcttcggaaaacaagactcgggaaaaactaatgtggacattgaaaaggtcatgattacagacgaagaggaaatcaggaccaccaatcccgtggctacggagcagtatggttctgtatctaccaatctccagagcggcaacacacaagcagctacctcagatgtcaacacacaaggcgttcttccaggcatggtctggcaggacagagacgtgtacctgcagggacccatctgggcaaagattccacacacggacggacattttcacccttctcctcttatgggaggatttggaccgaagcaccctcccccgcagattctcatcaagaataccccggtacctgcgaatccttctaccaccttcagcgcggcaaagtttgcttccttcatcacacagtactccacggggcaggtcagcgtggagatcgagtgggagctgcagaaagagaacagcaaacgctggaaccccgagatccagtatacctccaactacaacaagtctgttaatgtggactttactgtggacactaatggcgtgtattcagagcctcgccccattggcacaagatacctgactcgtaatctgtaa

SEQ ID NO: 3449 - DNA, 2208 bp, synthetic construct
  misc_feature 1..2208: note = source = /note="Description of Artificial Sequence: Synthetic polynucleotide"
  source 1..2208: mol_type = other DNA
atggctgccgatggttatcttccagattggctcgaggacactctctctgaaggaataagacagtggtggaagctcaaacctggcccaccaccgccaaagcccgcagagcggcataaggacgacagcaggggtcttgtgcttcctgggtacaagtacctcggacccttcaacggactcgacaaaggagagccggtcaacgaggcagacgccgcggccctcgagcacgacaaggcctacgaccggcagctcgacagcggagacaacccgtacctcaagtacaaccacgccgacgcggagtttcaggagcgccttaaagaagatacgtcttttgggggcaacctcgcaagagcagtattccaggcgaaaaagagggttcttgaacctctgggcctggttgaggagcctgttaagacggctccgggaaaaaagaggccggtagagcactctcctgcggagctagattcctcctccggaactggaaagtcgggccaacagcctgcaagaaagagattgaattttggtcagactggagacgcagactccgtacctgacccccagcctctcggacagccaccagcagccccctctggtctgggaactaatacgatggcttcaggcagtggcgcaccaatggcaggcaataacgagggcgccgacggagtgggtaattcctcgggaaattggcattgcgattccacatggatgggcgacagagtcatcaccaccagcacccgcacctgggctctgcccacctacaacaaccatctgtacaagcaaatttccagccagtctggggccagcaacgacaaccactactttggctacagcaccccttgggggtattttgacttcaacagattccactgccacttctccccacgtgactggcaaagactcatcaacaacaattggggattccggcccaaaagactcaacttcaagctctttaacattcaagtcaaggaggtcacgcagaatgacggtacgacgacgattgccaataaccttaccagcacggttcaggtgtttactgactcggagtaccagctcccgtacgtcctcggctcggcgcatcaaggatgcctcccgccgttcccagcagacgtcttcatggtgccacagtatggatacctcaccctgaacaacgggagtcaggcggtaggacgctcttcattttactgcctggagtactttccttctcagatgctgcgtaccggaaacaactttaccttcagctacacctttgaggacgttccttttcacagcagctacgctcacagccagagtttggaccgtctcatgaatcctctcatcgaccagtacctgtattacttgagcagaacaaacactccaagcggaaccactacgcagtccaggcttcagttttctcaagccggagcgagtgacattcgggaccagtctaggaactggcttcctggaccctgttaccgccagcagcgagtatcaaagacagctgcggacaacaacaacagtgattactcgtggactggagctaccaagtatcacctcaatggaagagactctctggtgaatccgggcacagccatggccagccacaaggacgatgaagaaaagtattttcctcagagcggggttctcatcttcggaaaacaagactcgggaaaaactaatgtggacattgaaaaggtcatgattacagacgaagaggaaatcaggaccaccaatcccgtggctacggagcagtatggttctgtatctaccaatctccagagcggcaacacacaagcagctacctcagatgtcaacacacaaggcgttcttccaggcatggtctggcaggacagagacgtgtacctgcagggacccatctgggcaaagattccacacacggacggacattttcacccttctcctcttatgggaggatttggaccgaagcaccctcccccgcagattctcatcaagaataccccggtacctgcgaatccttctaccaccttcagcgcggcaaagtttgcttccttcatcacacagtactccacggggcaggtcagcgtggagatcgagtgggagctgcagaaagagaacagcaaacgctggaaccccgagatccagtatacctccaactacaacaagtctgttaatgtggactttactgtggacactaatggcgtgtattcagagcctcgccccattggcacaagatacctgactcgtaatctgtaa

SEQ ID NO: 3450 - DNA, 2208 bp, synthetic construct
  misc_feature 1..2208: note = source = /note="Description of Artificial Sequence: Synthetic polynucleotide"
  source 1..2208: mol_type = other DNA
atggctgccgatggttatcttccagattggctcgaggacactctctctgaaggaataagacagtggtggaagctcaaacctggcccaccaccgccaaagcccgcagagcggcataaggacgacagcaggggtcttgtgcttcctgggtacaagtacctcggacccttcaacggactcgacaaaggagagccggtcaacgaggcagacgccgcggccctcgagcacgacaaggcctacgaccggcagctcgacagcggagacaacccgtacctcaagtacaaccacgccgacgcggagtttcaggagcgccttaaagaagatacgccttttgggggcaacctcgcaagagcagtattccaggcgaaaaagagggttcttgaacctctgggcctggttgaggagcctgttaagacggctccgggaaaaaagaggccggtagagcactctcctgcggagctagattcctcctccggaactggaaagtcgggccaacagcctgcaagaaagagattgaattttggtcagactggagacgcagactccgtacctgacccccagcctctcggacagccaccagcagccccctctggtctgggaactaatacgatggcttcaggcagtggcgcaccaatggcagacaataacgagggcgccgacggagtgggtaattcctcgggaaattggcattgcgattccacatggatgggcgacagagtcatcaccaccagcacccgcacctgggctctgcccacctacaacaaccatctgtacaagcaaatttccagccagtctggggccagcaacgacaaccactactttggctacagcaccccttgggggtattttgacttcaacagattccactgccacttctccccacgtgactggcaaagactcatcaacaacaattggggattccggcccaaaagactcaacttcaagctctttaacattcaagtcaaggaggtcacgcagaatgacggtacgacgacgattgccaataaccttaccagcacggttcaggtgtttactgactcggagtaccagctcccgtacgtcctcggctcggcgcatcaaggatgcctcccgccgttcccagcagacgtcttcatggtgccacagtatggatacctcaccctgaacaacgggagtcaggcggtaggacgctcttcattttactgcctggagtactttccttctcagatgctgcgtaccggaaacaactttaccttcagctacacctttgaggacgttccttttcacagcagctacgctcacagccagagtttggaccgtctcatgaatcctctcatcgaccagtacctgtattacttgagcagaacaaacactccaagcggaaccactacgcagtccaggcttcagttttctcaagccggagcgagtgacattcgggaccagtctaggaactggcttcctggaccctgttaccgccagcagcgagtatcaaagacagctgcggacaacaacaacagtgattactcgtggactggagctaccaagtatcacctcaatggaagagactctctggtgaatccgggcacagccatggccagccacaaggacgatgaagaaaagtattttcctcagagcggggttctcatcttcggaaaacaagactcgggaaaaactaatgtggacattgaaaaggtcatgattacagacgaagaggaaatcaggaccaccaatcccgtggctacggagcagtatggttctgtatctaccaatctccagagcggcaacacacaagcagctacctcagatgtcaacacacaaggcgttcttccaggcatggtctggcaggacagagacgtgtacctgcagggacccatctgggcaaagattccacacacggacggacattttcacccttctcctcttatgggaggatttggaccgaagcaccctcccccgcagattctcatcaagaataccccggtacctgcgaatccttctaccaccttcagcgcggcaaagtttgcttccttcatcacacagtactccacggggcaggtcagcgtggagatcgagtgggagctgcagaaagagaacagcaaacgctggaaccccgagatccagtatacctccaactacaacaagtctgttaatgtggactttactatggacactaatggcgtgtattcagagcctcgccccattggcacaagatacctgactcgtaatctgtaa

SEQ ID NO: 3451 - DNA, 2208 bp, synthetic construct
  misc_feature 1..2208: note = source = /note="Description of Artificial Sequence: Synthetic polynucleotide"
  source 1..2208: mol_type = other DNA
atggctgccgatggttatcttccagattggctcgaggacactctctctgaaggaataagacagtggtggaagctcaaacctggcccaccaccgccaaagcccgcagagcggcataaggacgacagcaggggtcttgtgcttcctgggtacaagtacctcggacccttcaacggactcgacaaaggagagccggtcaacgaggcagacgccgcggccctcgagcacgacaaggcctacgaccggcagctcgacagcggagacaacccgtacctcaagtacaaccacgccgacgcggagtttcaggagcgccttaaagaagatacgtcttttgggggcaacctcgcaagagcagtattccaggcgaaaaagagggttcttgaacctctgggcctggttgaggagcctgttaagacggctccgggaaaaaagaggccggtagagcactctcctgcggagctagattcctcctccggaactggaaagtcgggccaacagcctgcaagaaagagattgaattttggtcagactggagacgcagactccgtacctgacccccagcctctcggacagccaccagcagccccctctggtctgggaactaatacgatggcttcaggcagtggcgcaccaatggcagacaataacgagggcgccgacggagtgggtaattcctcgggaaattggcattgcgattccacatggatgggcgacagagtcatcaccaccagcacccgcacctgggctctgcccacctacaacaaccatctgtacaagcaaatttccagccagtctggggccagcaacgacaaccactactttggctacagcaccccttgggggtattttgacttcaacagattccactgccacttctccccacgtgactggcaaagactcatcaacaacaattggggattccggcccaaaagactcaacttcaagctctttaacattcaagtcaaggaggtcacgcagaatgacggtacgacgacgattgccaataaccttaccagcacggttcaggtgtttactgactcggagtaccagctcccgtacgtcctcggctcggcgcatcaaggatgcctcccgccgttcccagcagacgtcttcatggtgccacagtatggatacctcaccctgaacaacgggagtcaggcggtaggacgctcttcattttactgcctggagtactttccttctcagatgctgcgtaccggaaacaactttaccttcagctacacctttgaggacgttccttttcacagcagctacgctcacagccagagtttggaccgtctcatgaatcctctcatcgaccagtacctgtattacttgagcagaacaaacactccaagcggaaccactacgcagcccaggcttcagttttctcaagccggagcgagtgacattcgggaccagtctaggaactggcttcctggaccctgttaccgccagcagcgagtatcaaagacagctgcggacaacaacaacagtgattactcgtggactggagctaccaagtatcacctcaatggaagagactctctggtgaatccgggcacagccatggccagccacaaggacgatgaagaaaagtattttcctcagagcggggttctcatcttcggaaaacaagactcgggaaaaactaatgtggacattgaaaaggtcatgattacagacgaagaggaaatcaggaccaccaatcccgtggctacggagcagtatggttctgtatctaccaatctccagagcggcaacacacaagcagctacctcagatgtcaacacacaaggcgttcttccaggcatggtctggcaggacagagacgtgtacctgcagggacccatctgggcaaagattccacacacggacggacattttcacccttctcctcttatgggaggatttggaccgaagcaccctcccccgcagattctcatcaagaataccccggtacctgcgaatccttctaccaccttcagcgcggcaaagtttgcttccttcatcacacagtactccacggggcaggtcagcgtggagatcgagtgggagctgcagaaagagaacagcaaacgctggaaccccgagatccagtatacctccaactacaacaagtctgttaatgtggactttactgtggacactaatggcgtgtattcagagcctcgccccattggcacaagatacctgactcgtaatctgtaa

SEQ ID NO: 3452 - DNA, 2208 bp, synthetic construct
  misc_feature 1..2208: note = source = /note="Description of Artificial Sequence: Synthetic polynucleotide"
  source 1..2208: mol_type = other DNA
atggctgccgatggttatcttccagattggctcgaggacactctctctgaaggaataagacagtggtggaagctcaaacctggcccaccaccgccaaagcccgcagagcggcataaggacgacagcaggggtcttgtgcttcctgggtacaagtacctcggacccttcaacggactcgacaaaggagagccggtcaacgaggcagacgccgcggccctcgagcacgacaaggcctacgaccggcagctcgacagcggagacaacccgtacctcaagtacaaccacgccgacgcggagtttcaggagcgccttaaagaagatacgtcttttgggggcaacctcgcaagagcagtattccaggcgaaaaagagggttcttgaacctctgggcctggttgaggagcctgttaagacggctccgggaaaaaagaggccggtagagcactctcctgcggagctagattcctcctccggaactggaaagtcgggccaacagcctgcaagaaagagattgaattttggtcagactggagacgcagactccgtacctgacccccagcctctcggacagccaccagcagccccctctggtctgggaactaatacgatggcttcaggcagtggcgcaccaatggcagacaataacgagggcgccgacggagtgggtaattcctcgggaaattggcattgcgattccacatggatgggcgacagagtcatcaccaccagcacccgcacctgggctctgcccacctacaacaaccatctgtacaagcaaatttccagccagtctggggccagcaacgacaaccactactttggctacagcaccccttgggggtattttgacttcaacagattccactgccacttctccccacgtgactggcaaagactcatcaacaacaattggggattccggcccaaaagactcaacttcaagctctttaacattcaagtcaaggaggtcacgcagaatgacggtacgacgacgattgccaataaccttaccagcacggttcaggtgtttactgactcggagtaccagctcccgtacgtcctcggctcggcgcatcaaggatgcctcccgccgttcccagcagacgtcttcatggtgccacagtatggatacctcaccctgaacaacgggagtcaggcggtaggacgctcttcattttactgcctggagtactttccttctcagatgctgcgtaccggaaacaactttaccttcagctacacctttgaggacgttccttttcacagcagctacgctcacagccagagtttggaccgtctcatgaatcctctcatcgaccagtacctgtattacttgagcagaacaaacactccaagcggaaccactacgcagtccaggcttcagttttctcaagccggagcgagtgacattcgggaccagtctaggaactggcttcctggaccctgttaccgccagcagcgagtatcaaagacagctgcggacaacaacaacagtgattactcgtggactggagctaccaagcatcacctcaatggaagagactctctggtgaatccgggcacagccatggccagccacaaggacgatgaagaaaagtattttcctcagagcggggttctcatcttcggaaaacaagactcgggaaaaactaatgtggacattgaaaaggtcatgattacagacgaagaggaaatcaggaccaccaatcccgtggctacggagcagtatggttctgtatctaccaatctccagagcggcaacacacaagcagctacctcagatgtcaacacacaaggcgttcttccaggcatggtctggcaggacagagacgtgtacctgcagggacccatctgggcaaagattccacacacggacggacatttccacccttctcctcttatgggaggatttggaccgaagcaccctcccccgcagattctcatcaagaataccccggtacctgcgaatccttctaccaccttcagcgcggcaaagtttgcttccttcatcacacagtactccacggggcaggtcagcgtggagatcgagtgggagctgcagaaagagaacagcaaacgctggaaccccgagatccagtatacctccaactacaacaagtctgttaatgtggactttactgtggacactaatggcgtgtattcagagcctcgccccattggcacaagatacctgactcgtaatctgtaa

SEQ ID NO: 3453 - DNA, 2208 bp, synthetic construct
  misc_feature 1..2208: note = source = /note="Description of Artificial Sequence: Synthetic polynucleotide"
  source 1..2208: mol_type = other DNA
atggctgccgatggttatcttccagattggctcgaggacactctctctgaaggaataagacagtggtggaagctcaaacctggcccaccaccgccaaagcccgcagagcggcataaggacgacagcaggggtcttgtgcttcctgggtacaagtacctcggacccttcaacggactcgacaaaggagagccggtcaacgaggcagacgccgcggccctcgagcacgacaaggcctacgaccggcagctcgacagcggagacaacccgtacctcaagtacaaccacgccgacgcggagtttcaggagcgccttaaagaagatacgtcttttgggggcaacctcgcaagagcagtattccaggcgaaaaagagggttcttgaacctctgggcctggttgaggagcctgttaagacggctccgggaaaaaagaggccggtagagcactctcctgcggagctagattcctcctccggaactggaaagtcgggccaacagcctgcaagaaagagattgaattttggtcagactggagacgcagactccgtacctgacccccagcctctcggacagccaccagcagccccctctggtctgggaactaatacgatggcttcaggcagtggcgcaccaatggcagacaataacgagggcgccgacggagtgggtaattcctcgggaaattggcattgcgattccacatggatgggcgacagagtcatcaccaccagcacccgcacctgggctctgcccacctacaacaaccatctgtacaagcaaatttccagccagtctggggccagcaacgacaaccactactttggctacagcaccccttgggggtattttgacctcaacagattccactgccacttctccccacgtgactggcaaagactcatcaacaacaattggggattccggcccaaaagactcaacttcaagctctttaacattcaagtcaaggaggtcacgcagaatgacggtacgacgacgattgccaataaccttaccagcacggttcaggtgtttactgactcggagtaccagctcccgtacgtcctcggctcggcgcatcaaggatgcctcccgccgttcccagcagacgtcttcatggtgccacagtatggatacctcaccctgaacaacgggagtcaggcggtaggacgctcttcattttactgcctggagtactttccttctcagatgctgcgtaccggaaacaactttaccttcagctacacctttgaggacgttccttttcacagcagctacgctcacagccagagtttggaccgtctcatgaatcctctcatcgaccagtacctgtattacttgagcagaacaaacactccaagcggaaccactacgcagtccaggcttcagttttctcaagccggagcgagtgacattcgggaccagtctaggaactggcttcctggaccctgttaccgccagcagcgagtatcaaagacagctgcggacaacaacaacagtgattactcgtggactggagctaccaagtatcacctcaatggaagagactctctggtgaatccgggcacagccatggccagccacaaggacgatgaagaaaagtattttcctcagagcggggttctcatcttcggaaaacaagactcgggaaaaactaatgtggacattgaaaaggtcatgattacagacgaagaggaaatcaggaccaccaatcccgtggctacggagcagtatggttctgtatctaccaatctccagagcggcaacacacaagcagctacctcagatgtcaacacacaaggcgttcttccaggcatggtctggcaggacagagacgtgtacctgcagggacccatctgggcaaagattccacacacggacggacattttcacccttctcctcttatgggaggatttggaccgaagcaccctcccccgcagattctcatcaagaataccccggtacctgcgaatccttctaccaccttcagcgcggcaaagtttgcttccttcatcacacagtactccacggggcaggtcagcgtggagatcgagtgggagctgcagaaagagaacagcaaacgctggaaccccgagatccagtatacctccaactacaacaagtctgttaatgtggactttactgtggacactaatggcgtgtattcagagcctcgccccattggcacaagatacctgactcgtaatctgtaa

SEQ ID NO: 3454 - DNA, 2208 bp, synthetic construct
  misc_feature 1..2208: note = source = /note="Description of Artificial Sequence: Synthetic polynucleotide"
  source 1..2208: mol_type = other DNA
atggctgccgatggttatcttccagattggctcgaggacactctctctgaaggaataagacagtggtggaagctcaaacctggcccaccaccgccaaagcccgcagagcggcataaggacgacagcaggggtcttgtgcttcctgggtacaagtacctcggacccctcaacggactcgacaaaggagagccggtcaacgaggcagacgccgcggccctcgagcacgacaaggcctacgaccggcagctcgacagcggagacaacccgtacctcaagtacaaccacgccgacgcggagtttcaggagcgccttaaagaagatacgtcttttgggggcaacctcgcaagagcagtattccaggcgaaaaagagggttcttgaacctctgggcctggttgaggagcctgttaagacggctccgggaaaaaagaggccggtagagcactctcctgcggagctagattcctcctccggaactggaaagtcgggccaacagcctgcaagaaagagattgaattttggtcagactggagacgcagactccgtacctgacccccagcctctcggacagccaccagcagccccctctggtctgggaactaatacgatggcttcaggcagtggcgcaccaatggcagacaataacgagggcgccgacggagtgggtaattcctcgggaaattggcattgcgattccacatggatgggcgacagagtcatcaccaccagcacccgcacctgggctctgcccacctacaacaaccatctgtacaagcaaatttccagccagtctggggccagcaacgacaaccactactttggctacagcaccccttgggggtattttgacttcaacagattccactgccacttctccccacgtgactggcaaagactcatcaacaacaattggggattccggcccaaaagactcaacttcaagctctttaacattcaagtcaaggaggtcacgcagaatgacggtacgacgacgattgccaataaccttaccagcacggttcaggtgtttactgactcggagtaccagctcccgtacgtcctcggctcggcgcatcaaggatgcctcccgccgttcccagcagacgtcttcatggtgccacagtatggatacctcaccctgaacaacgggagtcaggcggtaggacgctcttcattttactgcctggagtactttccttctcagatgctgcgtaccggaaacaactttaccttcagctacacctttgaggacgttccttttcacagcagctacgctcacagccagagtttggaccgtctcatgaatcctctcatcgaccagtacctgtattacttgagcagaacaaacactccaagcggaaccactacgcagtccaggcttcagttttctcaagccggagcgagtgacattcgggaccagtctaggaactggcttcctggaccctgttaccgccagcagcgagtatcaaagacagctgcggacaacaacaacagtgattactcgtggactggagctaccaagtatcacctcaatggaagagactctctggtgaatccgggcacagccatggccagccacaaggacgatgaagaaaagtattttcctcagagcggggttctcatcttcggaaaacaagactcgggaaaaactaatgtggacattgaaaaggtcatgattacagacgaagaggaaatcaggaccaccaatcccgtggctacggagcagtatggttctgtatctaccaatctccagagcggcaacacacaagcagctacctcagatgtcaacacacaaggcgttcttccaggcatggtctggcaggacagagacgtgtacctgcagggacccatctgggcaaagattccacacacggacggacattttcacccttctcctcttatgggaggatttggaccgaagcaccctcccccgcagattctcatcaagaataccccggtacctgcgaatccttctaccaccttcagcgcggcaaagtttgcttccttcatcacacagtactccacggggcaggtcagcgtggagatcgagtgggagctgcagaaagagaacagcaaacgctggaaccccgagatccagtatacctccaactacaacaagtctgttaatgtggactttactgtggacactaatggcgtgtattcagagcctcgccccattggcacaagatacctgactcgtaatctgtaa

SEQ ID NO: 3455 - DNA, 2208 bp, synthetic construct
  misc_feature 1..2208: note = source = /note="Description of Artificial Sequence: Synthetic polynucleotide"
  source 1..2208: mol_type = other DNA
atggctgccgatggttatcttccagattggctcgaggacactctctctgaaggaataagacagtggtggaagctcaaacctggcccaccaccgccaaagcccgcagagcggcataaggacgacagcaggggtcttgtgcttcctgggtacaagtacctcggacccttcaacggactcgacaaaggagagccggtcaacgaggcagacgccgcggccctcgagcacgacaaggcctacgaccggcagctcgacagcggagacaacccgtacctcaagtacaaccacgccgacgcggagtttcaggagcgccttaaagaagatacgtcttttgggggcaacctcgcaagagcagtattccaggcgaaaaagagggttcttgaacctctgggcctggttgaggagcctgttaagacggctccgggaaaaaagaggccggtagagcactctcctgcggagctagattcctcctccggaactggaaagtcgggccaacagcctgcaagaaagagattgaattttggtcagactggagacgcagactccgtacctgacccccagcctctcggacagccaccagcagccccctctggtctgggaactaatacgatggcttcaggcagtggcgcaccaatggcagacaataacgagggcgccgacggagtgggtaattcctcgggaaattggcattgcgattccacatggatgggcgacagagtcatcaccaccagcacccgcacctgggctctgcccacctacaacaaccatctgtacaagcaaatttccagccagtctggggccagcaacgacaaccactactttggctacagcaccccttgggggtattttgacttcaacagattccactgccacttctccccacgtgactggcaaagactcatcaacaacaattggggattccggcccaaaagactcaacttcaagctctttaacattcaagtcaaggaggtcacgcagaatgacggtacgacgacgattgccaataaccttaccagcacggttcaggtgtttactgactcggagtaccagctcccgtacgtcctcggctcggcgcatcaaggatgcctcccgccgttcccagcagacgtcttcatggtgccacagtatggatacctcaccctgaacaacgggagtcaggcggtaggacgctcttcattttactgcctggagtactttccttctcagatgctgcgtaccggaaacaactttaccttcagctacacctttgaggacgttccttttcacagcagctacgctcacagccagagtttggaccgtctcatgaatcctctcatcgaccagtacctgtattacttgagcagaacaaacactccaagcggaaccactacgcagtccaggcttcagttttctcaagccggagcgagtgacattcgggaccagtctaggaactggcttcctggaccctgttaccgccagcagcgagtatcaaagacagctgcggacaacaacaacagtgattactcgtggactggagctaccaagtatcacctcaatggaagagactctctggtgaatccgggcacagccatggccagccacaaggacgatgaagaaaagtattttcctcagagcggggttctcatcttcggaaaacaagactcgggaaaaactaatgtggacattgaaaaggtcatgattacagacgaagaggaaatcaggaccaccaatcccgtggctacggagcagtatggttctgtatctaccaatctccagagcggcaacacacaagcagctacctcagatgtcaacacacaaggcgttcttccaggcatggtctggcaggacagagacgtgtacctgcagggacccatctgggcaaagattccacacacggacggacattttcacccttctcctcttatgggaggatttggaccgaagcaccctcccccgcagattctcatcaagaataccccggtacctgcgaatccttctaccaccttcagcgcggcaaagtttgcttccttcatcacacagtactccacggggcaggtcagcgtggagatcgagtgggagctgcagaaagagaacagcaaacgctggaaccccgagatccagtatacctccaactacaacaagtctgttaatgtggactttactgtggacactaatggcgtgtattcagagcctcgccccattggcacaagatacctggctcgtaatctgtaa

SEQ ID NO: 3456 - DNA, 2208 bp, synthetic construct
  misc_feature 1..2208: note = source = /note="Description of Artificial Sequence: Synthetic polynucleotide"
  source 1..2208: mol_type = other DNA
atggctgccgatggttatcttccagattggctcgaggacactctctctgaaggaataagacagtggtggaagctcaaacctggcccaccaccgccaaagcccgcagagcggcataaggacgacagcaggggtcttgtgcttcctgggtacaagtacctcggacccttcaacggactcgacaaaggagagccggtcaacgaggcagacgccgcggccctcgagcacgacaaggcctacgaccggcagctcgacagcggagacaacccgtacctcaagtacaaccacgccgacgcggagtttcaggagcgccttaaagaagatacgtcttttgggggcaacctcgcaagagcagtattccaggcgaaaaagagggttcttgaacctctgggcctggttgaggagcctgttaagacggctccgggaaaaaagaggccggtagagcactctcctgcggagctagattcctcctccggaactggaaagtcgggccaacagcctgcaagaaagagattgaattttggtcagactggagacgcagactccgtacctgacccccagcctctcggacagccaccagcagccccctctggtctgggaactaatacgatggcttcaggcagtggcgcaccaatggcagacaataacgagggcgccgacggagtgggtaattcctcgggaaattggcattgcgattccacatggatgggcgacagagtcatcaccaccagcacccgcacctgggctctgcccacctacaacaaccatctgtacaagcaaatttccagccagtctggggccagcaacgacaaccactactttggctacagcaccccttgggggtattttgacttcaacagattccactgccacttctccccacgtgactggcaaagactcatcaacaacaattggggattccggcccaaaagactcaacttcaagctctttaacattcaagtcaaggaggtcacgcagaatgacggtacgacgacgattgccaataaccttaccagcacggttcaggtgtttactgactcggagtaccagctcccgtacgtcctcggctcggcgcatcaaggatgcctcccgccgttcccagcagacgtcttcatggtgccacagtatggatacctcaccctgaacaacgggagtcaggcggtaggacgctcttcattttactgcctggagtactttccttctcagatgctgcgtaccggaaacaactttaccctcagctacacctttgaggacgttccttttcacagcagctacgctcacagccagagtttggaccgtctcatgaatcctctcatcgaccagtacctgtattacttgagcagaacaaacactccaagcggaaccactacgcagtccaggcttcagttttctcaagccggagcgagtgacattcgggaccagtctaggaactggcttcctggaccctgttaccgccagcagcgagtatcaaagacagctgcggacaacaacaacagtgattactcgtggactggagctaccaagtatcacctcaatggaagagactctctggtgaatccgggcacagccatggccagccacaaggacgatgaagaaaagtattttcctcagagcggggttctcatcttcggaaaacaagactcgggaaaaactaatgtggacattgaaaaggtcatgattacagacgaagaggaaatcaggaccaccaatcccgtggctacggagcagtatggttctgtatctaccaatctccagagcggcaacacacaagcagctacctcagatgtcaacacacaaggcgttcttccaggcatggtctggcaggacagagacgtgtacctgcagggacccatctgggcaaagattccacacacggacggacattttcacccttctcctcttatgggaggatttggaccgaagcaccctcccccgcagattctcatcaagaataccccggtacctgcgaatccttctaccaccttcagcgcggcaaagtttgcttccttcatcacacagtactccacggggcaggtcagcgtggagatcgagtgggagctgcagaaagagaacagcaaacgctggaaccccgagatccagtatacctccaactacaacaagtctgttaatgtggactttactgtggacactaatggcgtgtattcagagcctcgccccattggcacaagatacctgactcgtaatctgtaa

SEQ ID NO: 3457 - DNA, 2208 bp, synthetic construct
  misc_feature 1..2208: note = source = /note="Description of Artificial Sequence: Synthetic polynucleotide"
  source 1..2208: mol_type = other DNA
atggctgccgatggttatcttccagattggctcgaggacactctctctgaaggaataagacagtggtggaagctcaaacctggcccaccaccgccaaagcccgcagagcggcataaggacgacagcaggggtcttgtgcttcctgggtacaagtacctcggacccttcaacggactcgacaaaggagagccggtcaacgaggcagacgccgcggccctcgagcacgacaaggcctacgaccggcagctcgacagcggagacaacccgtacctcaagtacaaccacgccgacgcggagtttcaggagcgccttaaagaagatacgtcttttgggggcaacctcgcaagagcagtattccaggcgaaaaagagggttcttgaacctctgggcctggttgaggagcctgttaagacggctccgggaaaaaagaggccggtagagcactctcctgcggagctagattcctcctccggaactggaaagtcgggccaacagcctgcaagaaagagattgaattttggtcagactggagacgcagactccgtacctgacccccagcctctcggacagccaccagcagccccctctggtctgggaactaatacgatggcttcaggcagtggcgcaccaatggcagacaataacgagggcgccgacggagtgggtaattcctcgggaaattggcattgcgattccacatggatgggcgacagagtcatcaccaccagcacccgcacctgggctctgcccacctacaacaaccatctgtacaagcaaatttccagccagtctggggccagcaacgacaaccactactttggctacagcaccccttgggggtattttgacttcaacagattccactgccacttctccccacgtgactggcaaagactcatcaacaacaattggggattccggcccaaaagactcaacttcaagctctttaacattcaagtcaaggaggtcacgcagaatgacggtacgacgacgattgccaataaccttaccagcacggttcaggtgtttactgactcggagtaccagctcccgtacgtcctcggctcggcgcatcaaggatgcctcccgccgttcccagcagacgtcttcatggtgccacagtatggatacctcaccctgaacaacgggagtcaggcggtaggacgctcttcattttactgcctggagtactttccttctcagatgctgcgtaccggaaacaactttaccttcagctacacctttgaggacgttccttttcacagcagctacgctcacagccagagtttggaccgtctcatgaatcctctcatcgaccagtacctgtattacttgagcagaacaaacactccaagcggaaccactacgcagtccaggcttcagttttctcaagccggagcgagtgacattcgggaccagtctaggaactggcttcctggaccctgttaccgccagcagcgagtatcaaagacagctgcggacaacaacaacagtgattactcgtggactggagctaccaagtatcacctcaatggaagagactctctggtgaatccgggcacagccatggccagccacaaggacgatgaagaaaagtattttcctcagagcggggttctcatcttccggaaacaagactcgggaaaaactaatgtggacattgaaaaggtcatgattacagacgaagaggaaatcaggaccaccaatcccgtggctacggagcagtatggttctgtatctaccaatctccagagcggcaacacacaagcagctacctcagatgtcaacacacaaggcgttcttccaggcatggtctggcaggacagagacgtgtacctgcagggacccatctgggcaaagattccacacacggacggacattttcacccttctcctcttatgggaggatttggaccgaagcaccctcccccgcagattctcatcaagaataccccggtacctgcgaatccttctaccaccttcagcgcggcaaagtttgcttccttcatcacacagtactccacggggcaggtcagcgtggagatcgagtgggagctgcagaaagagaacagcaaacgctggaaccccgagatccagtatacctccaactacaacaagtctgttaatgtggactttactgtggacactaatggcgtgtattcagagcctcgccccattggcacaagatacctgactcgtaatctgtaa

SEQ ID NO: 3458 - DNA, 2208 bp, synthetic construct
  misc_feature 1..2208: note = source = /note="Description of Artificial Sequence: Synthetic polynucleotide"
  source 1..2208: mol_type = other DNA
atggctgccgatggttatcttccagattggctcgaggacactctctctgaaggaataagacagtggtggaagctcaaacctggcccaccaccgccaaagcccgcagagcggcataaggacgacagcaggggtcttgtgcttcctgggtacaagtacctcggacccttcaacggactcgacaaaggagagccggtcaacgaggcagacgccgcggccctcgagcacgacaaggcctacgaccggcagctcgacagcggagacaacccgtacctcaagtacaaccacgccgacgcggagtttcaggagcgccttaaagaagatacgtcttttgggggcaacctcgcaagagcagtattccaggcgaaaaagagggttcttgaacctctgggcctggttgaggagcctgttaagacggctccgggaaaaaagaggccggtagagcactctcctgcggagctagattcctcctccggaactggaaagtcgggccaacagcctgcaagaaagagattgaattttggtcagactggagacgcagactccgtacctgacccccagcctctcggacagccaccagcagccccctctggtctgggaactaatacgatggcttcaggcagtggcgcaccaatggcagacaataacgagggcgccgacggagtgggtaattcctcgggaaattggcattgcgattccacatggatgggcgacagagtcatcaccaccagcacccgcacctgggctctgcccacctacaacaaccatctgtacaagcaaatttccagccagtctggggccagcaacgacaaccactactttggctacagcaccccttgggggtattttgacttcaacagattccactgccacttctccccacgtgactggcaaagactcatcaacaacaattggggattccggcccaaaagactcaacttcaagctctttaacattcaagtcaaggaggtcacgcagaatgacggtacgacgacgattgccaataaccttaccagcacggttcaggtgtttactgactcggagtaccagctcccgtacgtcctcggctcggcgcatcaaggatgcctcccgccgttcccagcagacgtcttcatggtgccacagtatggatacctcaccctgaacaacgggagtcaggcggtaggacgctcttcattttactgcctggagtactttccttctcagatgctgcgtaccggaaacaactttaccttcagctacacctttgaggacgttccttttcacagcagctacgctcacagccagagtttggaccgtctcatgaatcctctcatcgaccagtacctgtattacttgagcagaacaaacactccaagcggaaccactacgcagtccaggcttcagttttctcaagccggagcgagtgacattcgggaccagtctaggaactggcttcctggaccctgttaccgccagcagcgagtatcaaagacagctgcggacaacaacaacagtgattactcgtggactggagctaccaagtatcacctcaatggaagagactctctggtgaatccgggcacagccatggccagccacaaggacgatgaagaaaagtattttcctcagagcggggttctcatcttcggaaaacgagactcgggaaaaactaatgtggacattgaaaaggtcatgattacagacgaagaggaaatcaggaccaccaatcccgtggctacggagcagtatggttctgtatctaccaatctccagagcggcaacacacaagcagctacctcagatgtcaacacacaaggcgttcttccaggcatggtctggcaggacagagacgtgtacctgcagggacccatctgggcaaagattccacacacggacggacattttcacccttctcctcttatgggaggatttggaccgaagcaccctcccccgcagattctcatcaagaataccccggtacctgcgaatccttctaccaccttcagcgcggcaaagtttgcttccttcatcacacagtactccacggggcaggtcagcgtggagatcgagtgggagctgcagaaagagaacagcaaacgctggaaccccgagatccagtatacctccaactacaacaagtctgttaatgtggactttactgtggacactaatggcgtgtattcagagcctcgccccattggcacaagatacctgactcgtaatctgtaa

SEQ ID NO: 3459 - DNA, 2208 bp, synthetic construct
  misc_feature 1..2208: note = source = /note="Description of Artificial Sequence: Synthetic polynucleotide"
  source 1..2208: mol_type = other DNA
atggctgccgatggttatcttccagattggctcgaggacactctctctgaaggaataagacagtggtggaagctcaaacctggcccaccaccgccaaagcccgcagagcggcataaggacgacagcaggggtcttgtgcttcctgggtacaagtacctcggacccttcaacggactcgacaaaggagagccggtcaacgaggcagacgccgcggccctcgagcacgacaaggcctacgaccggcagctcgacagcggagacaacccgtacctcaagtacaaccacgccgacgcggagtttcaggagcgccttaaagaagatacgtcttttgggggcaacctcgcaagagcagtattccaggcgaaaaagagggttcttgaacctctgggcctggttgaggagcctgttaagacggctccgggaaaaaagaggccggtagagcactctcctgcggagctagattcctcctccggaactggaaagtcgggccaacagcctgcaagaaagagattgaattttggtcagactggagacgcagactccgtacctgacccccagcctctcggacagccaccagcagccccctctggtctgggaactaatacgatggcttcaggcagtggcgcaccaatggcagacaataacgagggcgccgacggagtgggtaattcctcgggaaattggcattgcgattccacatggatgggcgacagagccatcaccaccagcacccgcacctgggctctgcccacctacaacaaccatctgtacaagcaaatttccagccagtctggggccagcaacgacaaccactactttggctacagcaccccttgggggtattttgacttcaacagattccactgccacttctccccacgtgactggcaaagactcatcaacaacaattggggattccggcccaaaagactcaacttcaagctctttaacattcaagtcaaggaggtcacgcagaatgacggtacgacgacgattgccaataaccttaccagcacggttcaggtgtttactgactcggagtaccagctcccgtacgtcctcggctcggcgcatcaaggatgcctcccgccgttcccagcagacgtcttcatggtgccacagtatggatacctcaccctgaacaacgggagtcaggcggtaggacgctcttcattttactgcctggagtactttccttctcagatgctgcgtaccggaaacaactttaccttcagctacacctttgaggacgttccttttcacagcagctacgctcacagccagagtttggaccgtctcatgaatcctctcatcgaccagtacctgtattacttgagcagaacaaacactccaagcggaaccactacgcagtccaggcttcagttttctcaagccggagcgagtgacattcgggaccagtctaggaactggcttcctggaccctgttaccgccagcagcgagtatcaaagacagctgcggacaacaacaacagtgattactcgtggactggagctaccaagtatcacctcaatggaagagactctctggtgaatccgggcacagccatggccagccacaaggacgatgaagaaaagtattttcctcagagcggggttctcatcttcggaaaacaagactcgggaaaaactaatgtggacattgaaaaggtcatgattacagacgaagaggaaatcaggaccaccaatcccgtggctacggagcagtatggttctgtatctaccaatctccagagcggcaacacacaagcagctacctcagatgtcaacacacaaggcgttcttccaggcatggtctggcaggacagagacgtgtacctgcagggacccatctgggcaaagattccacacacggacggacattttcacccttctcctcttatgggaggatttggaccgaagcaccctcccccgcagattctcatcaagaataccccggtacctgcgaatccttctaccaccttcagcgcggcaaagtttgcttccttcatcacacagtactccacggggcaggtcagcgtggagatcgagtgggagctgcagaaagagaacagcaaacgctggaaccccgagatccagtatacctccaactacaacaagtctgttaatgtggactttactgtggacactaatggcgtgtattcagagcctcgccccattggcacaagatacctgactcgtaatctgtaa

SEQ ID NO: 3460 - DNA, 2208 bp, synthetic construct
  misc_feature 1..2208: note = source = /note="Description of Artificial Sequence: Synthetic polynucleotide"
  source 1..2208: mol_type = other DNA
atggctgccgatggttatcttccagattggctcgaggacactctctctgaaggaataagacagtggtggaagctcaaacctggcccaccaccgccaaagcccgcagagcggcataaggacgacagcaggggtcttgtgcttcctgggtacaagtacctcggacccttcaacggactcgacaaaggagagccggtcaacgaggcagacgccgcggccctcgagcacgacaaggcctacgaccggcagctcgacagcggagacaacccgtacctcaagtacaaccacgccgacgcggagtttcaggagcgccttaaagaagatacgtcttttgggggcaacctcgcaagagcagtattccaggcgaaaaagagggttcttgaacctctgggcctggttgaggagcctgttaagacggctccgggaaaaaagaggccggtagagcactctcctgcggagctagattcctcctccggaactggaaagtcgggccaacagcctgcaagaaagagattgaattttggtcagactggagacgcagactccgtacctgacccccagcctctcggacagccaccagcagccccctctggtctgggaactaatacgatggcttcaggcagtggcgcaccaatggcagacaataacgagggcgccgacggagtgggtaattcctcgggaaattggcattgcgattccacatggatgggcgacagagtcatcaccaccagcacccgcacctgggctctgcccacctacaacaaccatctgtacaagcaaatttccagccagtctggggccagcaacgacaaccactactttggctacagcaccccttgggggtattttgacttcaacagattccactgccacttctccccacgtgactggcaaagactcatcaacaacaattggggattccggcccaaaagactcaacttcaagctctttaacattcaagtcaaggaggtcacgcagaatgacggtacgacgacgattgccaataaccttaccagcacggttcaggtgtttactgactcggagtaccagctcccgtacgtcctcggctcggcgcatcaaggatgcctcccgccgttcccagcagacgtcttcatggtgccacagtatggatacctcaccctgaacaacgggagtcaggcggtaggacgctcttcattttactgcctggagtactttccttctcagatgctgcgtaccggaaacaactttaccttcagctacacctttgaggacgttccttttcacagcagctacgctcacagccagagtttggaccgtctcatgaatcctctcatcgaccagtacctgtattacttgagcagaacaaacactccaagcggaaccactacgcagtccaggcttcagttttctcaagccggagcgagtgacattcgggaccagtctaggaactggcttcctggaccctgttaccgccagcagcgagtatcaaagacagctgcggacaacaacaacagtgattactcgtggactggagctaccaagtatcacctcaatggaagagactctctggtgaatccgggcacagccatggccagccacaaggacgatgaagaaaagtattttcctcagagcggggttctcatcttcggaaaacaagactcgggaaaaactaatgtggacattgaaaaggtcatgattacagacgaagaggaaatcaggaccaccaatcccgtggctacggagcagtatggttctgtatctaccaatctccagagcggcaacacacaagcagctacctcagatgtcaacacacaaggcgttcttccaggcatggtctggcaggacagagacgtgtacctgcagggacccatctgggcaaagattccacacacggacggacattttcacccttctcctcttatgggaggatttggaccgaagcaccctcccccgcagattctcatcaagaataccccggtacctgcgaatccttctaccaccttcagcgcggcaaagtttgcttacttcatcacacagtactccacggggcaggtcagcgtggagatcgagtgggagctgcagaaagagaacagcaaacgctggaaccccgagatccagtatacctccaactacaacaagtctgttaatgtggactttactgtggacactaatggcgtgtattcagagcctcgccccattggcacaagatacctgactcgtaatctgtaa

SEQ ID NO: 3461 - DNA, 2208 bp, synthetic construct
  misc_feature 1..2208: note = source = /note="Description of Artificial Sequence: Synthetic polynucleotide"
  source 1..2208: mol_type = other DNA
atggctgccgatggttatcttccagattggctcgaggacactctctctgaaggaataagacagtggtggaagctcaaacctggcccaccaccgccaaagcccgcagagcggcataaggacgacagcaggggtcttgtgcttcctgggtacaagtacctcggacccttcaacggactcgacaaaggagagccggtcaacgaggcagacgccgcggccctcgagcacgacaaggcctacgaccggcagctcgacagcggagacaacccgtacctcaagtacaaccacgccgacgcggagtttcaggagcgccttaaagaagatacgtcttttgggggcaacctcgcaagagcagtattccaggcgaaaaagagggttcttgaacctctgggcctggttgaggagcctgttaagacggctccgggaaaaaagaggccggtagagcactctcctgcggagctagattcctcctccggaactggaaagtcgggccaacagcctgcaagaaagagattgaattttggtcagactggagacgcagactccgtacctgacccccagcctctcggacagccaccagcagccccctctggtctgggaactaatacgatggcttcaggcagtggcgcaccaatggcagacaataacgagggcgccgacggagtgggtaattcctcgggaaattggcattgcgattccacatggatgggcgacagagtcatcaccaccagcacccgcacctgggctctgcccacctacaacaaccatctgtacaagcaaatttccagccagtctggggccagcaacgacaaccactactttggctacagcaccccttgggggtattttggcttcaacagattccactgccacttctccccacgtgactggcaaagactcatcaacaacaattggggattccggcccaaaagactcaacttcaagctctttaacattcaagtcaaggaggtcacgcagaatgacggtacgacgacgattgccaataaccttaccagcacggttcaggtgtttactgactcggagtaccagctcccgtacgtcctcggctcggcgcatcaaggatgcctcccgccgttcccagcagacgtcttcatggtgccacagtatggatacctcaccctgaacaacgggagtcaggcggtaggacgctcttcattttactgcctggagtactttccttctcagatgctgcgtaccggaaacaactttaccttcagctacacctttgaggacgttccttttcacagcagctacgctcacagccagagtttggaccgtctcatgaatcctctcatcgaccagtacctgtattacttgagcagaacaaacactccaagcggaaccactacgcagtccaggcttcagttttctcaagccggagcgagtgacattcgggaccagtctaggaactggcttcctggaccctgttaccgccagcagcgagtatcaaagacagctgcggacaacaacaacagtgattactcgtggactggagctaccaagtatcacctcaatggaagagactctctggtgaatccgggcacagccatggccagccacaaggacgatgaagaaaagtattttcctcagagcggggttctcatcttcggaaaacaagactcgggaaaaactaatgtggacattgaaaaggtcatgattacagacgaagaggaaatcaggaccaccaatcccgtggctacggagcagtatggttctgtatctaccaatctccagagcggcaacacacaagcagctacctcagatgtcaacacacaaggcgttcttccaggcatggtctggcaggacagagacgtgtacctgcagggacccatctgggcaaagattccacacacggacggacattttcacccttctcctcttatgggaggatttggaccgaagcaccctcccccgcagattctcatcaagaataccccggtacctgcgaatccttctaccaccttcagcgcggcaaagtttgcttacttcatcacacagtactccacggggcaggtcagcgtggagatcgagtgggagctgcagaaagagaacagcaaacgctggaaccccgagatccagtatacctccaactacaacaagtctgttaatgtggactttactgtggacactaatggcgtgtattcagagcctcgccccattggcacaagatacctgactcgtaatctgtaa

SEQ ID NO: 3462 - DNA, 2208 bp, synthetic construct
  misc_feature 1..2208: note = source = /note="Description of Artificial Sequence: Synthetic polynucleotide"
  source 1..2208: mol_type = other DNA
atggctgccgatggttatcttccagattggctcgaggacactctctctgaaggaataagacagtggtggaagctcaaacctggcccaccaccgccaaagcccgcagagcggcataaggacgacagcaggggtcttgtgcttcctgggtacaagtacctcggacccttcaacggactcgacaaaggagagccggtcaacgaggcagacgccgcggccctcgagcacgacaaggcctacgaccggcagctcgacagcggagacaacccgtacctcaagtacaaccacgccgacgcggagtttcaggagcgccttaaagaagatacgtcttttgggggcaacctcgcaagagcagtattccaggcgaaaaagagggttcttgaacctctgggcctggttgaggagcctgttaagacggctccgggaaaaaagaggccggtagagcactctcctgcggagctagattcctcctccggaactggaaagtcgggccaacagcctgcaagaaagagattgaattttggtcagactggagacgcagactccgtacctgacccccagcctctcggacagccaccagcagccccctctggtctgggaactaatacgatggcttcaggcagtggcgcaccaatggcagacaataacgagggcgccgacggagtgggtaattcctcgggaaattggcattgcgattccacatggatgggcgacagagtcatcaccaccagcacccgcacctgggctctgcccacctacaacaaccatctgtacaagcaaatttccagccagtctggggccagcaacgacaaccgctactttggctacagcaccccttgggggtattttgacttcaacagattccactgccacttctccccacgtgactggcaaagactcatcaacaacaattggggattccggcccaaaagactcaacttcaagctctttaacattcaagtcaaggaggtcacgcagaatgacggtacgacgacgattgccaataaccttaccagcacggttcaggtgtttactgactcggagtaccagctcccgtacgtcctcggctcggcgcatcaaggatgcctcccgccgttcccagcagacgtcttcatggtgccacagtatggatacctcaccctgaacaacgggagtcaggcggtaggacgctcttcattttactgcctggagtactttccttctcagatgctgcgtaccggaaacaactttaccttcagctacacctttgaggacgttccttttcacagcagctacgctcacagccagagtttggaccgtctcatgaatcctctcatcgaccagtacctgtattacttgagcagaacaaacactccaagcggaaccactacgcagtccaggcttcagttttctcaagccggagcgagtgacattcgggaccagtctaggaactggcttcctggaccctgttaccgccagcagcgagtatcaaagacagctgcggacaacaacaacagtgattactcgtggactggagctaccaagtatcacctcaatggaagagactctctggtgaatccgggcacagccatggccagccacaaggacgatgaagaaaagtattttcctcagagcggggttctcatcttcggaaaacaagactcgggaaaaactaatgtggacattgaaaaggtcatgattacagacgaagaggaaatcaggaccaccaatcccgtggctacggagcagtatggttctgtatctaccaatctccagagcggcaacacacaagcagctacctcagatgtcaacacacaaggcgttcttccaggcatggtctggcaggacagagacgtgtacctgcagggacccatctgggcaaagattccacacacggacggacattttcacccttctcctcttatgggaggatttggaccgaagcaccctcccccgcagattctcatcaagaataccccggtacctgcgaatccttctaccaccttcagcgcggcaaagtttgcttccttcatcacacagtactccacggggcaggtcagcgtggagatcgagtgggagctgcagaaagagaacagcaaacgctggaaccccgagatccagtatacctccaactacaacaagtctgttaatgtggactttactgtggacactaatggcgtgtattcagagcctcgccccattggcacaagatacctgactcgtaatctgtaa

SEQ ID NO: 3463 - DNA, 2208 bp, synthetic construct
  misc_feature 1..2208: note = source = /note="Description of Artificial Sequence: Synthetic polynucleotide"
  source 1..2208: mol_type = other DNA
atggctgccgatggttatcttccagattggctcgaggacactctctctgaaggaataagacagtggtggaagctcaaacctggcccaccaccgccaaagcccgcagagcggcataaggacgacagcaggggtcttgtgcttcctgggtacaagtacctcggacccttcaacggactcgacaaaggagagccggtcaacgaggcagacgccgcggccctcgagcacgacaaggcctacgaccggcagctcgacagcggagacaacccgtacctcaagtacaaccacgccgacgcggagtttcaggagcgccttaaagaagatacgccttttgggggcaacctcgcaagagcagtattccaggcgaaaaagagggttcttgaacctctgggcctggttgaggagcctgttaagacggctccgggaaaaaagaggccggtagagcactctcctgcggagctagattcctcctccggaactggaaagtcgggccaacagcctgcaagaaagagattgaattttggtcagactggagacgcagactccgtacctgacccccagcctctcggacagccaccagcagccccctctggtctgggaactaatacgatggcttcaggcagtggcgcaccaatggcagacaataacgagggcgccgacggagtgggtaattcctcgggaaattggcattgcgattccacatggatgggcgacagagtcatcaccaccagcacccgcacctgggctctgcccacctacaacaaccatctgtacaagcaaatttccagccagtctggggccagcaacgacaaccactactttggctacagcaccccttgggggtattttgacttcaacagattccactgccacttctccccacgtgactggcaaagactcatcaacaacaattggggattccggcccaaaagactcaacttcaagctctttaacattcaagtcaaggaggtcacgcagaatgacggtacgacgacgattgccaataaccttaccagcacggttcaggtgtttactgactcggagtaccagctcccgtacgtcctcggctcggcgcatcaaggatgcctcccgccgttcccagcagacgtcttcatggtgccacagtatggatacctcaccctgaacaacgggagtcaggcggtaggacgctcttcattttactgcctggagtactttccttctcagatgctgcgtaccggaaacaactttaccttcagctacacctttgaggacgttccttttcacagcagctacgctcacagccggagtttggaccgtctcatgaatcctctcatcgaccagtacctgtattacttgagcagaacaaacactccaagcggaaccactacgcagtccaggcttcagttttctcaagccggagcgagtgacattcgggaccagtctaggaactggcttcctggaccctgttaccgccagcagcgagtatcaaagacagctgcggacaacaacaacagtgattactcgtggactggagctaccaagtatcacctcaatggaagagactctctggtgaatccgggcacagccatggccagccacaaggacgatgaagaaaagtattttcctcagagcggggttctcatcttcggaaaacaagactcgggaaaaactaatgtggacattgaaaaggtcatgattacagacgaagaggaaatcaggaccaccaatcccgtggctacggagcagtatggttctgtatctaccaatctccagagcggcaacacacaagcagctacctcagatgtcaacacacaaggcgttcttccaggcatggtctggcaggacagagacgtgtacctgcagggacccatctgggcaaagattccacacacggacggacattttcacccttctcctcttatgggaggatttggaccgaagcaccctcccccgcagattctcatcaagaataccccggtacctgcgaatccttctaccaccttcagcgcggcaaagtttgcttccttcatcacacagtactccacggggcaggtcagcgtggagatcgagtgggagctgcagaaagagaacagcaaacgctggaaccccgagatccagtatacctccaactacaacaagtctgttaatgtggactttactgtggacactaatggcgtgtattcagagcctcgccccattggcacaagatacctgactcgtaatctgtaa

SEQ ID NO: 3464 - DNA, 2208 bp, synthetic construct
  misc_feature 1..2208: note = source = /note="Description of Artificial Sequence: Synthetic polynucleotide"
  source 1..2208: mol_type = other DNA
atggctgccgatggttatcttccagattggctcgaggacactctctctgaaggaataagacagtggtggaagctcaaacctggcccaccaccgccaaagcccgcagagcggcataaggacggcagcaggggtcttgtgcttcctgggtacaagtacctcggacccttcaacggactcgacaaaggagagccggtcaacgaggcagacgccgcggccctcgagcacgacaaggcctacgaccggcagctcgacagcggagacaacccgtacctcaagtacaaccacgccgacgcggagtttcaggagcgccttaaagaagatacgtcttttgggggcaacctcgcaagagcagtattccaggcgaaaaagagggttcttgaacctctgggcctggttgaggagcctgttaagacggctccgggaaaaaagaggccggtagagcactctcctgcggagctagattcctcctccggaactggaaagtcgggccaacagcctgcaagaaagagattgaattttggtcagactggagacgcagactccgtacctgacccccagcctctcggacagccaccagcagccccctctggtctgggaactaatacgatggcttcaggcagtggcgcaccaatggcagacaataacgagggcgccgacggagtgggtaattcctcgggaaattggcattgcgattccacatggatgggcgacagagtcatcaccaccagcacccgcacctgggctctgcccacctacaacaaccatctgtacaagcaaatttccagccagtctggggccagcaacgacaaccactactttggctacagcaccccttgggggtattttgacttcaacagattccactgccacttctccccacgtgactggcaaagactcatcaacaacaattggggattccggcccaaaagactcaacttcaagctctttaacattcaagtcaaggaggtcacgcagaatgacggtacgacgacgattgccaataaccttaccagcacggttcaggtgtttactgactcggagtaccagctcccgtacgtcctcggctcggcgcatcaaggatgcctcccgccgttcccagcagacgtcttcatggtgccacagtatggatacctcaccctgaacaacgggagtcaggcggtaggacgctcttcattttactgcctggagtactttccttctcagatgctgcgtaccggaaacaactttaccttcagctacacctttgaggacgttccttttcacagcagctacgctcacagccagagtttggaccgtctcatgaatcctctcatcgaccagtacctgtattacttgagcagaacaaacactccaagcggaaccactacgcagtccaggcttcagttttctcaagccggagcgagtgacattcgggaccagtctaggaactggcttcctggaccctgttaccgccagcagcgagtatcaaagacagctgcggacaacaacaacagtgattactcgtggactggagctaccaagtatcacctcaatggaagagactctctggtgaatccgggcacagccatggccagccacaaggacgatgaagaaaagtattttcctcagagcggggttctcatcttcggaaaacaagactcgggaaaaactaatgtggacattgaaaaggtcatgattacagacgaagaggaaatcaggaccaccaatcccgtggctacggagcagtatggttctgtatctaccaatctccagagcggcaacacacaagcagctacctcagatgtcaacacacaaggcgttcttccaggcatggtctggcaggacagagacgtgtacctgcagggacccatctgggcaaagattccacacacggacggacattttcacccttctcctcttatgggaggatttggaccgaagcaccctcccccgcagattctcatcaagaataccccggtacctgcgaatccttctaccaccttcagcgcggcaaagtttgcttccttcatcacacagtactccacggggcaggtcagcgtggagatcgagtgggagctgcagaaagagaacagcaaacgctggaaccccgagatccagtatacctccaactacaacaagtctgttaatgtggactttactgtggacactaatggcgtgtattcagagcctcgccccattggcacaagatacctgactcgtaatctgtaa

SEQ ID NO: 3465 - DNA, 2208 bp, synthetic construct
  misc_feature 1..2208: note = source = /note="Description of Artificial Sequence: Synthetic polynucleotide"
  source 1..2208: mol_type = other DNA
atggctgccgatggttatcttccagattggctcgaggacactctctctgaaggaataagacagtggtggaagctcaaacctggcccaccaccgccaaagcccgcagagcggcataaggacgacagcaggggtcttgtgcttcctgggtacaagtacctcggacccttcaacggactcgacaaaggagagccggtcaacgaggcagacgccgcggccctcgagcacgacaaggcctacgaccggcagctcgacagcggagacaacccgtacctcaagtacaaccacgccgacgcggggtttcaggagcgccttaaagaagatacgtcttttgggggcaacctcgcaagagcagtattccaggcgaaaaagagggttcttgaacctctgggcctggttgaggagcctgttaagacggctccgggaaaaaagaggccggtagagcactctcctgcggagctagattcctcctccggaactggaaagtcgggccaacagcctgcaagaaagagattgaattttggtcagactggagacgcagactccgtacctgacccccagcctctcggacagccaccagcagccccctctggtctgggaactaatacgatggcttcaggcagtggcgcaccaatggcagacaataacgagggcgccgacggagtgggtaattcctcgggaaattggcattgcgattccacatggatgggcgacagagtcatcaccaccagcacccgcacctgggctctgcccacctacaacaaccatctgtacaagcaaatttccagccagtctggggccagcaacgacaaccactactttggctacagcaccccttgggggtattttgacttcaacagattccactgccacttctccccacgtgactggcaaagactcatcaacaacaattggggattccggcccaaaagactcaacttcaagctctttaacattcaagtcaaggaggtcacgcagaatgacggtacgacgacgattgccaataaccttaccagcacggttcaggtgtttactgactcggagtaccagctcccgtacgtcctcggctcggcgcatcaaggatgcctcccgccgttcccagcagacgtcttcatggtgccacagtatggatacctcaccctgaacaacgggagtcaggcggtaggacgctcttcattttactgcctggagtactttccttctcagatgctgcgtaccggaaacaactttaccttcagctacacctttgaggacgttccttttcacagcagctacgctcacagccagagtttggaccgtctcatgaatcctctcatcgaccagtacctgtattacttgagcagaacaaacactccaagcggaaccactacgcagtccaggcttcagttttctcaagccggagcgagtgacattcgggaccagtctaggaactggcttcctggaccctgttaccgccagcagcgagtatcaaagacagctgcggacaacaacaacagtgattactcgtggactggagctaccaagtatcacctcaatggaagagactctctggtgaatccgggcacagccatggccagccacaaggacgatgaagaaaagtattttcctcagagcggggttctcatcttcggaaaacaagactcgggaaaaactaatgtggacattgaaaaggtcatgattacagacgaagaggaaatcaggaccaccaatcccgtggctacggagcagtatggttctgtatctaccaatctccagagcggcaacacacaagcagctacctcagatgtcaacacacaaggcgttcttccaggcatggtctggcaggacagagacgtgtacctgcagggacccatctgggcaaagattccacacacggacggacattttcacccttctcctcttatgggaggatttggaccgaagcaccctcccccgcagattctcatcaagaataccccggtacctgcgaatccttctaccaccttcagcgcggcaaagtttgcttccttcatcacacagtactccacggggcaggtcagcgtggagatcgagtgggagctgcagaaagagaacagcaaacgctggaaccccgagatccagtatacctccaactacaacaagtctgttaatgtggactttactgtggacactaatggcgtgtattcagagcctcgccccattggcacaagatacctgactcgtaatctgtaa

SEQ ID NO: 3466 - DNA, 2208 bp, synthetic construct
  misc_feature 1..2208: note = source = /note="Description of Artificial Sequence: Synthetic polynucleotide"
  source 1..2208: mol_type = other DNA
atggctgccgatggttatcttccagattggctcgaggacactctctctgaaggaataagacagtggtggaagctcaaacctggcccaccaccgccaaagcccgcagagcggcataaggacgacagcaggggtcttgtgcttcctgggtacaagtacctcggacccttcaacggactcgacaaaggagagccggtcaacgaggcagacgccgcggccctcgagcacgacaaggcctacgaccggcagctcgacagcggagacaacccgtacctcaagtacaaccacgccgacgcggagtttcaggagcgccttaaagaagatacgtcttttgggggcaacctcgcaagagcagtattccaggcgaaaaagagggttcttgaacctctgggcctggttgaggagcctgttaagacggctccgggaaaaaagaggccggtagagcactctcctgcggagctagattcctcctccggaactggaaagtcgggccaacagcctgcaagaaagagattgaattttggtcagactggagacgcagactccgtacctgacccccagcctctcggacagccaccagcagccccctctggtctgggaactaatacgatggcttcaggcagtggcgcaccaatggcagacaataacgagggcgccgacggagtgggtaattcctcgggaaattggcattgcgattccacatggatgggcgacagagtcatcaccaccagcacccgcacctgggctctgcccacctacaacaaccatctgtacaagcaaatttccagccagtctggggccagcaacgacaaccactaccttggctacagcaccccttgggggtattttgacttcaacagattccactgccacttctccccacgtgactggcaaagactcatcaacaacaattggggattccggcccaaaagactcaacttcaagctctttaacattcaagtcaaggaggtcacgcagaatgacggtacgacgacgattgccaataaccttaccagcacggttcaggtgtttactgactcggagtaccagctcccgtacgtcctcggctcggcgcatcaaggatgcctcccgccgttcccagcagacgtcttcatggtgccacagtatggatacctcaccctgaacaacgggagtcaggcggtaggacgctcttcattttactgcctggagtactttccttctcagatgctgcgtaccggaaacaactttaccttcagctacacctttgaggacgttccttttcacagcagctacgctcacagccagagtttggaccgtctcatgaatcctctcatcgaccagtacctgtattacttgagcagaacaaacactccaagcggaaccactacgcagtccaggcttcagttttctcaagccggagcgagtgacattcgggaccagtctaggaactggcttcctggaccctgttaccgccagcagcgagtatcaaagacagctgcggacaacaacaacagtgattactcgtggactggagctaccaagtatcacctcaatggaagagactctctggtgaatccgggcacagccatggccagccacaaggacgatgaagaaaagtattttcctcagagcggggttctcatcttcggaaaacaagactcgggaaaaactaatgtggacattgaaaaggtcatgattacagacgaagaggaaatcaggaccaccaatcccgtggctacggagcagtatggttctgtatctaccaatctccagagcggcaacacacaagcagctacctcagatgtcaacacacaaggcgttcttccaggcatggtctggcaggacagagacgtgtacctgcagggacccatctgggcaaagattccacacacggacggacattttcacccttctcctcttatgggaggatttggaccgaagcaccctcccccgcagattctcatcaagaataccccggtacctgcgaatccttctaccaccttcagcgcggcaaagtttgcttccttcatcacacagtactccacggggcaggtcagcgtggagatcgagcgggagctgcagaaagagaacagcaaacgctggaaccccgagatccagtatacctccaactacaacaagtctgttaatgtggactttactgtggacactaatggcgtgtattcagagcctcgccccattggcacaagatacctgactcgtaatctgtaa

SEQ ID NO: 3467 - DNA, 2208 bp, synthetic construct
  misc_feature 1..2208: note = source = /note="Description of Artificial Sequence: Synthetic polynucleotide"
  source 1..2208: mol_type = other DNA
atggctgccgatggttatcttccagattggctcgaggacactctctctgaaggaataagacagtggtggaagctcaaacctggcccaccaccgccaaagcccgcagagcggcataaggacgacagcaggggtcttgtgcttcctgggtacaagtacctcggacccttcaacggactcgacaaaggagagccggtcaacgaggcagacgccgcggccctcgagcacgacaaggcctacgaccggcagctcgacagcggagacaacccgtacctcaagtacaaccacgccgacgcggagtttcaggagcgccttaaagaagatacgtcttttgggggcaacctcgcaagagcagtattccaggcgaaaaagagggttcttgaacctctgggcctggttgaggagcctgttaagacggctccgggaaaaaagaggccggtagagcactctcctgcggagctagattcctcctccggaactggaaagtcgggccaacagcctgcaagaaagagattgaattttggtcagactggagacgcagactccgtacctgacccccagcctctcggacagccaccagcagccccctctggtctgggaactaatacgatggcttcaggcagtggcgcaccaatggcagacaataacgagggcgccgacggagtgggtaattcctcgggaaattggcattgcgattccacatggatgggcgacagagtcatcaccaccagcacccgcacctgggctctgcccacctacaacaaccatctgtacaagcaaatttccagccagtctggggccagcaacgacaaccactactttggctacagcaccccttgggggtattttgacttcaacagattccactgccacttctccccacgtgactggcaaagactcatcaacaacaattggggattccggcccaaaagactcaacttcaagctctttaacattcaagtcaaggaggtcacgcagaatgacggtacgacgacgattgccaataaccttaccagcacggttcaggtgtttactgactcggagtaccagctcccgtacgtcctcggctcggcgcatcaaggatgcctcccgccgttcccagcagacgtcttcatggtgccacagtatggatacctcaccctgaacaacgggagtcaggcggtaggacgctcttcattttactgcctggagtactttccttctcagatgctgcgtaccggaaacaactttaccttcagctacacctttgaggacgttccttttcacagcagctacgctcacagccagagtttggaccgtctcatgaatcctctcatcgaccagtacctgtattacttgagcagaacaaacactccaagcggaaccactacgcagtccaggcttcagttttctcaagccggagcgagtgacattcgggaccagtctaggaactggcttcctggaccctgttaccgccagcagcgagtatcaaagacagctgcggacaacaacaacagtgattactcgtggactggagctaccaagtatcacctcaatggaagagactctctggtgaatccgggcacagccatggccagccacaaggacgatgaagaaaagtattttcctcagagcggggttctcatcttcggaaaacaagactcgggaaaagctaatgtggacattgaaaaggtcatgattacagacgaagaggaaatcaggaccaccaatcccgtggctacggagcagtatggttctgtatctaccaatctccagagcggcaacacacaagcagctacctcagatgtcaacacacaaggcgttcttccaggcatggtctggcaggacagagacgtgtacctgcagggacccatctgggcaaagattccacacacggacggacattttcacccttctcctcttatgggaggatttggaccgaagcaccctcccccgcagattctcatcaagaataccccggtacctgcgaatccttctaccaccttcagcgcggcaaagtttgcttccttcatcacacagtactccacggggcaggtcagcgtggagatcgagtgggagctgcagaaagagaacagcaaacgctggaaccccgagatccagtatacctccaactacaacaagtctgttaatgtggactttactgtggacactaatggcgtgtattcagagcctcgccccattggcacaagatacctgactcgtaatctgtaa

SEQ ID NO: 3468 - DNA, 2208 bp, synthetic construct
  misc_feature 1..2208: note = source = /note="Description of Artificial Sequence: Synthetic polynucleotide"
  source 1..2208: mol_type = other DNA
atggctgccgatggttatcttccagattggctcgaggacactctctctgaaggaataagacagtggtggaagctcaaacctggcccaccaccgccaaagcccgcagagcggcataaggacgacagcaggggtcttgtgcttcctgggtacaagtacctcggacccttcaacggactcgacaaaggagagccggtcaacgaggcagacgccgcggccctcgagcacgacaaggcctacgaccggcagctcgacagcggagacaacccgtacctcaagtacaaccacgccgacgcggagtttcaggagcgccttaaagaagatacgtcttttgggggcaacctcgcaagagcagtattccaggcgaaaaagagggttcttgaacctctgggcctggttgaggagcctgttaagacggctccgggaaaaaagaggccggtagagcactctcctgcggagctagattcctcctccggaactggaaagtcgggccaacagcctgcaagaaagagattgaattttggtcagactggagacgcagactccgtacctgacccccagcctctcggacagccaccagcagccccctctggtctgggaactaatacgatggcttcaggcagtggcgcaccaatggcagacaataacgagggcgccgacggagtgggtaattcctcgggaaattggcattgcgattccacatggatgggcgacagagtcatcaccaccagcacccgcacctgggctctgcccacctacaacaaccatctgtacaagcaaatttccagccagtctggggccagcaacgacaaccactactttggctacagcaccccttgggggtattttgacttcaacagattccactgccacttctccccacgtgactggcaaagactcaccaacaacaattggggattccggcccaaaagactcaacttcaagctctttaacattcaagtcaaggaggtcacgcagaatgacggtacgacgacgattgccaataaccttaccagcacggttcaggtgtttactgactcggagtaccagctcccgtacgtcctcggctcggcgcatcaaggatgcctcccgccgttcccagcagacgtcttcatggtgccacagtatggatacctcaccctgaacaacgggagtcaggcggtaggacgctcttcattttactgcctggagtactttccttctcagatgctgcgtaccggaaacaactttaccttcagctacacctttgaggacgttccttttcacagcagctacgctcacagccagagtttggaccgtctcatgaatcctctcatcgaccagtacctgtattacttgagcagaacaaacactccaagcggaaccactacgcagtccaggcttcagttttctcaagccggagcgagtgacattcgggaccagtctaggaactggcttcctggaccctgttaccgccagcagcgagtatcaaagacagctgcggacaacaacaacagtgattactcgtggactggagctaccaagtatcacctcaatggaagagactctctggtgaatccgggcacagccatggccagccacaaggacgatgaagaaaagtattttcctcagagcggggttctcatcttcggaaaacaagactcgggaaaaactaatgtggacattgaaaaggtcatgattacagacgaagaggaaatcaggaccaccaatcccgtggctacggagcagtatggttctgtatctaccaatctccagagcggcaacacacaagcagctacctcagatgtcaacacacaaggcgttcttccaggcatggtctggcaggacagagacgtgtacctgcagggacccatctgggcaaagattccacacacggacggacattttcacccttctcctcttatgggaggatttggaccgaagcaccctcccccgcagattctcatcaagaataccccggtacctgcgaatccttctaccaccttcagcgcggcaaagtttgcttccttcatcacacagtactccacggggcaggtcagcgtggagatcgagtgggagctgcagaaagagaacagcaaacgctggaaccccgagatccagtatacctccaactacaacaagtctgttaatgtggactttactgtggacactaatggcgtgtattcagagcctcgccccattggcacaagatacctgactcgtaatctgtaa

SEQ ID NO: 3469 - DNA, 2208 bp, synthetic construct
  misc_feature 1..2208: note = source = /note="Description of Artificial Sequence: Synthetic polynucleotide"
  source 1..2208: mol_type = other DNA
atggctgccgatggttatcttccagattggctcgaggacactctctctgaaggaataagacagtggtggaagctcaaacctggcccaccaccgccaaagcccgcagagcggcataaggacgacagcaggggtcttgtgcttcctgggtacaagtacctcggacccttcaacggactcgacaaaggagagccggtcaacgaggcagacgccgcggccctcgagcacgacaaggcctacgaccggcagctcgacagcggagacaacccgtacctcaagtacaaccacgccgacgcggagtttcaggagcgccttaaagaagatacgtcttttgggggcaacctcgcaagagcagtattccaggcgaaaaagagggttcttgaacctctgggcctggttgaggagcctgttaagacggctccgggaaaaaagaggccggtagagcactctcctgcggagctagattcctcctccggaactggaaagtcgggccaacagcctgcaagaaagagattgaattttggtcagactggagacgcagactccgtacctgacccccagcctctcggacagccaccagcagccccctctggtctgggaactaatacgatggcttcaggcagtggcgcaccaatggcagacaataacgagggcgccgacggagtgggtaattcctcgggaaattggcattgcgattccacatggatgggcgacagagtcatcaccaccagcacccgcacctgggctctgcccacctacaacaaccatctgtacaagcaaatttccagccagtctggggccagcaacgacaaccactactttggctacagcaccccttgggggtattttgacttcaacagattccactgccacttctccccacgtgactggcaaagactcatcaacaacaattggggattccggcccaaaagactcaacttcaagctctttaacattcaagtcaaggaggtcacgcagaatgacggtacgacgacgattgccaataaccttaccagcacggttcgggtgtttactgactcggagtaccagctcccgtacgtcctcggctcggcgcatcaaggatgcctcccgccgttcccagcagacgtcttcatggtgccacagtatggatacctcaccctgaacaacgggagtcaggcggtaggacgctcttcattttactgcctggagtactttccttctcagatgctgcgtaccggaaacaactttaccttcagctacacctttgaggacgttccttttcacagcagctacgctcacagccagagtttggaccgtctcatgaatcctctcatcgaccagtacctgtattacttgagcagaacaaacactccaagcggaaccactacgcagtccaggcttcagttttctcaagccggagcgagtgacattcgggaccagtctaggaactggcttcctggaccctgttaccgccagcagcgagtatcaaagacagctgcggacaacaacaacagtgattactcgtggactggagctaccaagtatcacctcaatggaagagactctctggtgaatccgggcacagccatggccagccacaaggacgatgaagaaaagtattttcctcagagcggggttctcatcttcggaaaacaagactcgggaaaaactaatgtggacattgaaaaggtcatgattacagacgaagaggaaatcaggaccaccaatcccgtggctacggagcagtatggttctgtatctaccaatctccagagcggcaacacacaagcagctacctcagatgtcaacacacaaggcgttcttccaggcatggtctggcaggacagagacgtgtacctgcagggacccatctgggcaaagattccacacacggacggacattttcacccttctcctcttatgggaggatttggaccgaagcaccctcccccgcagattctcatcaagaataccccggtacctgcgaatccttctaccaccttcagcgcggcaaagtttgcttccttcatcacacagtactccacggggcaggtcagcgtggagatcgagtgggagctgcagaaagagaacagcaaacgctggaaccccgagatccagtatacctccaactacaacaagtctgttaatgtggactttactgtggacactaatggcgtgtattcagagcctcgccccattggcacaagatacctgactcgtaatctgtaa

SEQ ID NO: 3470 - DNA, 2208 bp, synthetic construct
  misc_feature 1..2208: note = source = /note="Description of Artificial Sequence: Synthetic polynucleotide"
  source 1..2208: mol_type = other DNA
atggctgccgatggttatcttccagattggctcgaggacactctctctgaaggaataagacagtggtggaagctcaaacctggcccaccaccgccaaagcccgcagagcggcataaggacgacagcaggggtcttgtgcttcctgggtacaagtacctcggacccttcaacggactcgacaaaggagagccggtcaacgaggcagacgccgcggccctcgagcacgacaaggcctacgaccggcagctcgacagcggagacaacccgtacctcaagtacaaccacgccgacgcggagtttcaggagcgccttaaagaagatacgtcttttgggggcaacctcgcaagagcagtattccaggcgaaaaagagggttcttgaacctctgggcctggttggggagcctgttaagacggctccgggaaaaaagaggccggtagagcactctcctgcggagctagattcctcctccggaactggaaagtcgggccaacagcctgcaagaaagagattgaattttggtcagactggagacgcagactccgtacctgacccccagcctctcggacagccaccagcagccccctctggtctgggaactaatacgatggcttcaggcagtggcgcaccaatggcagacaataacgagggcgccgacggagtgggtaattcctcgggaaattggcattgcgattccacatggatgggcgacagagtcatcaccaccagcacccgcacctgggctctgcccacctacaacaaccatctgtacaagcaaatttccagccagtctggggccagcaacgacaaccactactttggctacagcaccccttgggggtattttgacttcaacagattccactgccacttctccccacgtgactggcaaagactcatcaacaacaattggggattccggcccaaaagactcaacttcaagctctttaacattcaagtcaaggaggtcacgcagaatgacggtacgacgacgattgccaataaccttaccagcacggttcaggtgtttactgactcggagtaccagctcccgtacgtcctcggctcggcgcatcaaggatgcctcccgccgttcccagcagacgtcttcatggtgccacagtatggatacctcaccctgaacaacgggagtcaggcggtaggacgctcttcattttactgcctggagtactttccttctcagatgctgcgtaccggaaacaactttaccttcagctacacctttgaggacgttccttttcacagcagctacgctcacagccagagtttggaccgtctcatgaatcctctcatcgaccagtacctgtattacttgagcagaacaaacactccaagcggaaccactacgcagtccaggcttcagttttctcaagccggagcgagtgacattcgggaccagtctaggaactggcttcctggaccctgttaccgccagcagcgagtatcaaagacagctgcggacaacaacaacagtgattactcgtggactggagctaccaagtatcacctcaatggaagagactctctggtgaatccgggcacagccatggccagccacaaggacgatgaagaaaagtattttcctcagagcggggttctcatcttcggaaaacaagactcgggaaaaactaatgtggacattgaaaaggtcatgattacagacgaagaggaaatcaggaccaccaatcccgtggctacggagcagtatggttctgtatctaccaatctccagagcggcaacacacaagcagctacctcagatgtcaacacacaaggcgttcttccaggcatggtctggcaggacagagacgtgtacctgcagggacccatctgggcaaagattccacacacggacggacattttcacccttctcctcttatgggaggatttggaccgaagcaccctcccccgcagattctcatcaagaataccccggtacctgcgaatccttctaccaccttcagcgcggcaaagtttgcttccttcatcacacagtactccacggggcaggtcagcgtggagatcgagtgggagctgcagaaagagaacagcaaacgctggaaccccgagatccagtatacctccaactacaacaagtctgttaatgtggactttactgtggacactaatggcgtgtattcagagcctcgccccattggcacaagatacctgactcgtaatctgtaa

SEQ ID NO: 3471 - DNA, 2208 bp, synthetic construct
  misc_feature 1..2208: note = source = /note="Description of Artificial Sequence: Synthetic polynucleotide"
  source 1..2208: mol_type = other DNA
atggctgccgatggttatcttccagattggctcgaggacactctctctgaaggaataagacagtggtggaagctcaaacctggcccaccaccgccaaagcccgcagagcggcataaggacgacagcaggggtcttgtgcttcctgggtacaagtacctcggacccttcaacggactcgacaaaggagagccggtcaacgaggcagacgccgcggccctcgagcacgacaaggcctacgaccggcagctcgacagcggagacaacccgtacctcaagtacaaccacgccgacgcggagtttcaggagcgccttaaagaagatacgtcttttgggggcaacctcgcaagagcagtattccaggcgaaaaagagggttcttgaacctctgggcctggttgaggagcctgttaagacggctccgggaaaaaagaggccggtagagcactctcctgcggagctagattcctcctccggaactggaaagtcgggccaacagcctgcaagaaagagattgaattttggtcagactggagacgcagactccgtacctggcccccagcctctcggacagccaccagcagccccctctggtccgggaactaatacgatggcttcaggcagtggcgcaccaatggcagacaataacgagggcgccgacggagtgggtaattcctcgggaaattggcattgcgattccacatggatgggcgacagagtcgtcaccaccagcacccgcacctgggctctgcccacctacaacaaccatctgtacaagcaaatttccagccagtctggggccagcaacgacaaccactactttggctacagcaccccttgggggtattttgacttcaacagattccactgccacttctccccacgtgactggcaaagactcatcaacaacaattggggattccggcccaaaagactcaacttcaagctctttaacattcaagtcaaggaggtcacgcagaatgacggtacgacgacgattgccaataaccttaccagcacggttcaggtgtttactgactcggagtaccagctcccgtacgtcctcggctcggcgcatcaaggatgcctcccgccgttcccagcagacgtcttcatggtgccacagtatggatacctcaccctgaacaacgggagtcaggcggtaggacgctcttcattttactgcctggagtactttccttctcagatgctgcgtaccggaaacaactttaccttcagctacacctttgaggacgttccttttcacagcagctacgctcacagccagagtttggaccgtctcatgaatcctctcatcgaccagtacctgtattacttgagcagaacaaacactccaagcggaaccactacgcagtccaggcttcagttttctcaagccggagcgagtgacattcgggaccagtctaggaactggcttcctggaccctgttaccgccagcagcgagtaccaaagacagctgcggacaacaacaacagtgattactcgtggactggagctaccaagtatcacctcaatggaagagactctctggtgaatccgggcacagccatggccagccacaaggacgatgaagaaaagtattttcctcagagcggggttctcatcttcggaaaacaagactcgggaaaaactaatgtggacattgaaaaggtcatgattacagacgaagaggaaatcaggaccaccaatcccgtggctacggagcagtatggttctgtatctaccaatctccagagcggcaacacacaagcagctacctcagatgtcaacacacaaggcgttcttccaggcatggtctggcaggacagagacgtgtacctgcagggacccatctgggcaaagattccacacacggacggacattttcacccttctcctcttatgggaggatttggaccgaagcaccctcccccgcagattctcatcaagaataccccggtacctgcgaatccttctaccaccttcagcgcggcaaagtttgcttccttcatcacacagtactccacggggcaggtcagcgtggagatcgagtgggagctgcagaaagagaacagcaaacgctggaaccccgagatccagtatacctccaactacaacaagtctgttaatgtggactttactgtggacactaatggcgtgtattcagagcctcgccccattggcacaagatacctgactcgtaatctgtaa

SEQ ID NO: 3472 - DNA, 2208 bp, synthetic construct
  misc_feature 1..2208: note = source = /note="Description of Artificial Sequence: Synthetic polynucleotide"
  source 1..2208: mol_type = other DNA
atggctgccgatggttatcttccagattggctcgaggacactctctctgaaggaataagacagtggtggaagctcaaacctggcccaccaccgccaaagcccgcagagcggcataaggacgacagcaggggtcttgtgcttcctgggtacaagtacctcggacccttcaacggactcgacaaaggagagccggtcaacgaggcagacgccgcggccctcgagcacgacaaggcctacgaccggcagctcgacagcggagacaacccgtacctcaagtacaaccacgccgacgcggagtttcaggagcgccttaaagaagatacgtcttttgggggcaacctcgcaagagcagtattccaggcgaaaaagagggttcttgaacctctgggcctggttgaggggcctgttaagacggctccgggaaaaaagaggccggtagagcactctcctgcggagctagattcctcctccggaactggaaagtcgggccaacagcctgcaagaaagagattgaattttggtcagactggagacgcagactccgtacctgacccccagcctctcggacagccaccagcagccccctctggtctgggaactaatacgatggcttcaggcagtggcgcaccaatggcagacaataacgagggcgccgacggagtgggtaattcctcgggaaattggcattgcgattccacatggatgggcgacagagtcatcaccaccagcacccgcacctgggctctgcccacctacaacaaccatctgtacaagcaaatttccagccagtctggggccagcaacgacaaccactactttggctacagcaccccttgggggtattttgacttcaacagattccactgccacttctccccacgtgactggcaaagactcatcaacaacaattggggattccggcccaaaagactcaacttcaagctctttaacattcaagtcaaggaggtcacgcagaatgacggtacgacgacgattgccaataaccttaccagcacggttcaggtgtttactgactcggagtaccagctcccgtacgtcctcggctcggcgcatcaaggatgcctcccgccgttcccagcagacgtcttcatggtgccacagtatggatacctcaccctgaacaacgggagtcaggcggtaggacgctcttcattttactgcctggagtactttccttctcagatgctgcgtaccggaaacaactttaccttcagctacacctttgaggacgttccttttcacagcagctacgctcacagccagagtttggaccgtctcatgaatcctctcatcgaccagtacctgtattacttgagcagaacaaacactccaagcggaaccactacgcagtccaggcttcagttttctcaagccggagcgagtgacattcgggaccagtctaggaactggcttcctggaccctgttaccgccagcagcgagtatcaaagacagctgcggacaacaacaacagtgattactcgtggactggagctaccaagtatcacctcaatggaagagactctctggtgaatccgggcacagccatggccagccacaaggacgatgaagaaaagtattttcctcagagcggggttctcatcttcggaaaacaagactcgggaaaaactaatgtggacattgaaaaggtcatgattacagacgaagaggaaatcaggaccaccaatcccgtggctacggagcagtatggttctgtatctaccaatctccagagcggcaacacacaagcagctacctcagatgtcaacacacaaggcgttcttccaggcatggtctggcaggacagagacgtgtacctgcagggacccatctgggcaaagattccacacacggacggacattttcacccttctcctcttatgggaggatttggaccgaagcaccctcccccgcagattctcatcaagaataccccggtacctgcgaatccttctaccaccttcagcgcggcaaagtttgcttccttcatcacacagtactccacggggcaggtcagcgtggagatcgagtgggagctgcagaaagagaacagcaaacgctggaaccccgagatccagtatacctccaactacaacaagtctgttaatgtggactttactgtggacactaatggcgtgtattcagagcctcgccccattggcacaagatacctgactcgtaatctgtaa

SEQ ID NO: 3473 - DNA, 2208 bp, synthetic construct
  misc_feature 1..2208: note = source = /note="Description of Artificial Sequence: Synthetic polynucleotide"
  source 1..2208: mol_type = other DNA
atggctgccgatggttatcttccagattggctcgaggacactctctctgaaggaataagacagtggtggaagctcaaacctggcccaccaccgccaaagcccgcagagcggcataaggacgacagcaggggtcttgtgcttcctgggtacaagtacctcggacccttcaacggactcgacaaaggagagccggtcaacgaggcagacgccgcggccctcgagcacgacaaggcctacgaccggcagctcgacagcggagacaacccgtacctcaagtacaaccacgccgacgcggagtttcaggagcgccttaaagaagatacgtcttttgggggcaacctcgcaagagcagtattccaggcgaaaaagagggttcttgaacctctgggcctggttgaggagcctgttaagacggctccgggaaaaaagaggccggtagagcactctcctgcggagctagattcctcctccggaactggaaagtcgggccaacagcctgcaagaaagagattgaattttggtcagactggagacgcagactccgtacctgacccccagcctctcggacagccaccagcagccccctctggtctgggaactaatacgatggcttcaggcagtggcgcaccaatggcagacaataacgagggcgccgacggggtgggtaattcctcgggaaattggcattgcgattccacatggatgggcgacagagtcatcaccaccagcacccgcacctgggctctgcccacctacaacaaccatctgtacaagcaaatttccagccagtctggggccagcaacgacaaccactaccttggctacagcaccccttgggggtattttgacttcaacagattccactgccacttctccccacgtgactggcaaagactcatcaacaacaattggggattccggcccaaaagactcaacttcaagctctttaacattcaagtcaaggaggtcacgcagaatgacggtacgacgacgattgccaataaccttaccagcacggttcaggtgtttactgactcggagtaccagctcccgtacgtcctcggctcggcgcatcaaggatgcctcccgccgttcccagcagacgtcttcatggtgccacagtatggatacctcaccctgaacaacgggagtcaggcggtaggacgctcttcattttactgcctggagtactttccttctcagatgctgcgtaccggaaacaactttaccttcagctacacctttgaggacgttccttttcacagcagctacgctcacagccagagtttggaccgtctcatgaatcctctcatcgaccagtacctgtattacttgagcagaacaaacactccaagcggaaccactacgcagtccaggcttcagttttctcaagccggagcgagtgacattcgggaccagtctaggaactggcttcctggaccctgttaccgccagcagcgagtatcaaagacagctgcggacaacaacaacagtgattactcgtggactggagctaccaagtatcacctcaatggaagagactctctggtgaatccgggcacagccatggccagccacaaggacgatgaagaaaagtattttcctcagagcggggttctcatcttcggaaaacaagactcgggaaaaactaatgtggacattgaaaaggtcatgattacagacgaagaggaaatcaggaccaccaatcccgtggctacggagcagtatggttctgtatctaccaatctccagagcggcaacacacaagcagctacctcagatgtcaacacacaaggcgttcttccaggcatggtctggcaggacagagacgtgtacctgcagggacccatctgggcaaagattccacacacggacggacattttcacccttctcctcttatgggaggatttggaccgaagcaccctcccccgcagattctcatcaagaataccccggtacctgcgaatccttctaccaccttcagcgcggcaaagtttgcttccttcatcacacagtactccacggggcaggtcagcgtggagatcgagtgggagctgcagaaagagaacagcaaacgctggaaccccgagatccagtatacctccaactacaacaagtctgttaatgtggactttactgtggacactaatggcgtgtattcagagcctcgccccattggcacaagatacctgactcgtaatctgtaa

SEQ ID NO: 3474 - DNA, 2208 bp, synthetic construct
  misc_feature 1..2208: note = source = /note="Description of Artificial Sequence: Synthetic polynucleotide"
  source 1..2208: mol_type = other DNA
atggctgccgatggttatcttccagattggctcgaggacactctctctgaaggaataagacagtggtggaagctcaaacctggcccaccaccgccaaagcccgcagagcggcataaggacgacagcaggggtcttgtgcttcctgggtacaagtacctcggacccttcaacggactcgacaaaggagagccggtcaacgaggcagacgccgcggccctcgagcacgacaaggcctacgaccggcagctcgacagcggagacaacccgtacctcaagtacaaccacgccgacgcggagtttcaggagcgccttaaagaagatacgtcttttgggggcaacctcgcaagagcagtattccaggcgaaaaagagggttcttgaacctctgggcctggttgaggagcctgttaagacggctccgggaaaaaaggggccggtagagcactctcctgcggagctagattcctcctccggaactggaaagtcgggccaacagcctgcaagaaagagattgaattttggtcagactggagacgcagactccgtacctgacccccagcctctcggacagccaccagcagccccctctggtctgggaactaatacgatggcttcaggcagtggcgcaccaatggcagacaataacgagggcgccgacggagtgggtaattcctcgggaaattggcattgcgattccacatggatgggcgacagagtcatcaccaccagcacccgcacctgggctctgcccacctacaacaaccatctgtacaagcaaatttccagccagtctggggccagcaacgacaaccactactttggctacagcaccccttgggggtattttgacttcaacagattccactgccacttctccccacgtgactggcaaagactcatcaacaacaattggggattccggcccaaaagactcaacttcaagctctttaacattcaagtcaaggaggtcacgcagaatgacggtacgacgacgattgccaataaccttaccagcacggttcaggtgtttactgactcggagtaccagctcccgtacgtcctcggctcggcgcatcaaggatgcctcccgccgttcccagcagacgtcttcatggtgccacagtatggatacctcaccctgaacaacgggagtcaggcggtaggacgctcttcattttactgcctggagtactttccttctcagatgctgcgtaccggaaacaactttaccttcagctacacctttgaggacgttccttttcacagcagctacgctcacagccagagtttggaccgtctcatgaatcctctcatcgaccagtacctgtattacttgagcagaacaaacactccaagcggaaccactacgcagtccaggcttcagttttctcaagccggagcgagtgacattcgggaccagtctaggaactggcttcctggaccctgttaccgccagcagcgagtatcaaagacagctgcggacaacaacaacagtgattactcgtggactggagctaccaagtatcacctcaatggaagagactctctggtgaatccgggcacagccatggccagccacaaggacgatgaagaaaagtattttcctcagagcggggttctcatcttcggaaaacaagactcgggaaaaactaatgtggacattgaaaaggtcatgattacagacgaagaggaaatcaggaccaccaatcccgtggctacggagcagtatggttctgtatctaccaatctccagagcggcaacacacaagcagctacctcagatgtcaacacacaaggcgttcttccaggcatggtctggcaggacagagacgtgtacctgcagggacccatctgggcaaagattccacacacggacggacattttcacccttctcctcttatgggaggatttggaccgaagcaccctcccccgcagattctcatcaagaataccccggtacctgcgaatccttctaccaccttcagcgcggcaaagtttgcttccttcatcacacagtactccacggggcaggtcagcgtggagatcgagtgggagctgcagaaagagaacagcaaacgctggaaccccgagatccagtatacctccaactacaacaagtctgttaatgtggactttactgtggacactaatggcgtgtattcagagcctcgccccattggcacaagatacctgactcgtaatctgtaa

SEQ ID NO: 3475 - DNA, 2208 bp, synthetic construct
  misc_feature 1..2208: note = source = /note="Description of Artificial Sequence: Synthetic polynucleotide"
  source 1..2208: mol_type = other DNA
atggctgccgatggttatcttccagattggctcgaggacactctctctgaaggaataagacagtggtggaagctcaaacctggcccaccaccgccaaagcccgcagagcggcataaggacgacagcaggggtcttgtgcttcctgggtacaagtacctcggacccttcaacggactcgacaaaggagagccggtcaacgaggcagacgccgcggccctcgagcacgacaaggcctacgaccggcagctcgacagcggagacaacccgtacctcaagtacaaccacgccgacgcggagtttcaggagcgccttaaagaagatacgccttttgggggcaacctcgcaagagcagtattccaggcgaaaaagagggttcttgaacctctgggcctggttgaggagcctgttaagacggctccgggaaaaaagaggccggtagagcactctcctgcggagctagattcctcctccggaactggaaagtcgggccaacagcctgcaagaaagagattgaattttggtcagactggagacgcagactccgtacctgacccccagcctctcggacagccaccagcagccccctctggtctgggaactaatacgatggcttcaggcagtggcgcaccaatggcagacaataacgagggcgccgacggagtgggtaattcctcgggaaattggcattgcgattccacatggatgggcgacagagtcatcaccaccagcacccgcacctgggctctgcccacctacaacaaccatctgtacaagcaaatttccagccagtctggggccagcaacgacaaccactactttggctacagcaccccttgggggtattttgacttcaacagattccactgccacttctccccacgtgactggcaaagactcatcaacaacaattggggattccggcccaaaagactcaacttcaagctctttaacattcaagtcaaggaggtcacgcagaatgacggtacgacgacgattgccaataaccttaccagcacggttcaggtgtttactgactcggagtaccagctcccgtacgtcctcggctcggcgcatcaaggatgcctcccgccgttcccagcagacgtcttcatggtgccacagtatggatacctcaccctgaacaacgggagtcaggcggtaggacgctcttcattttactgcctggagtactttccttctcagatgctgcgtaccggaaacaactttaccttcagctacacctttgaggacgttccttttcacagcagctacgctcacagccagagtttggaccgtctcatgaatcctctcatcgaccagtacctgtattacttgagcagagcaaacactccaagcggaaccactacgcagtccaggcttcagttttctcaagccggagcgagtgacattcgggaccagtctaggaactggcttcctggaccctgttaccgccagcagcgagtatcaaagacagctgcggacaacaacaacagtgattactcgtggactggagctaccaagtatcacctcaatggaagagactctctggtgaatccgggcacagccatggccagccacaaggacgatgaagaaaagtattttcctcagagcggggttctcatcttcggaaaacaagactcgggaaaaactaatgtggacattgaaaaggtcatgattacagacgaagaggaaatcaggaccaccaatcccgtggctacggagcagtatggttctgtatctaccaatctccagagcggcaacacacaagcagctacctcagatgtcaacacacaaggcgttcttccaggcatggtctggcaggacagagacgtgtacctgcagggacccatctgggcaaagattccacacacggacggacattttcacccttctcctcttatgggaggatttggaccgaagcaccctcccccgcagattctcatcaagaataccccggtacctgcgaatccttctaccaccttcagcgcggcaaagtttgcttccttcatcacacagtactccacggggcaggtcagcgtggagatcgagtgggagctgcagaaagagaacagcaaacgctggaaccccgagatccagtatacctccaactacaacaagtctgttaatgtggactttactgtggacactaatggcgtgtattcagagcctcgccccattggcacaagatacctgactcgtaatctgtaa

SEQ ID NO: 3476 - DNA, 2208 bp, synthetic construct
  misc_feature 1..2208: note = source = /note="Description of Artificial Sequence: Synthetic polynucleotide"
  source 1..2208: mol_type = other DNA
atggctgccgatggttatcttccagattggctcgaggacactctctctgaaggaataagacagtggtggaagctcaaacctggcccaccaccgccaaagcccgcagagcggcataaggacgacagcaggggtcttgtgcttcctgggtacaagtacctcggacccttcaacggactcgacaaaggagagccggtcaacgaggcagacgccgcggccctcgagcacgacaaggcctacgaccggcagctcgacagcggagacaacccgtacctcaagtacaaccacgccgacgcggagtttcaggagcgccttaaagaagatacgtcttttgggggcaacctcgcaagagcagtattccaggcgaaaaagagggttcttgaacctctgggcctggttgaggagcctgttaagacggctccgggaaaaaagaggccggtagagcactctcctgcggagctagattcctcctccggaactggaaagtcgggccaacagcctgcaagaaagagattgaattttggtcagactggagacgcagactccgtacctgacccccagcctctcggacagccaccagcagccccctctggtctgggaactaatacgatggcttcaggcagtggcgcaccaatggcagacaataacgagggcgccgacggagtgggtaattcctcgggaaattggcattgcgattccacatggatgggcgacagagtcatcaccaccagcacccgcacctgggctctgcccacctacaacaaccatctgtacaagcaaatttccagccagtctggggccagcaacgacaaccactactttggctacagcgccccttgggggtattttgacttcaacagattccactgccacttctccccacgtgactggcaaagactcatcaacaacaattggggattccggcccaaaagactcaacttcaagctctttaacattcaagtcaaggaggtcacgcagaatgacggtacgacgacgattgccaataaccttaccagcacggttcaggtgtttactgactcggagtaccagctcccgtacgtcctcggctcggcgcatcaaggatgcctcccgccgttcccagcagacgtcttcatggtgccacagtatggatacctcaccctgaacaacgggagtcaggcggtaggacgctcttcattttactgcctggagtactttccttctcagatgctgcgtaccggaaacaactttaccttcagctacacctttgaggacgttccttttcacagcagctacgctcacagccagagtttggaccgtctcatgaatcctctcatcgaccagtacctgtattacttgagcagaacaaacactccaagcggaaccactacgcagtccaggcttcagttttctcaagccggagcgagtgacattcgggaccagtctaggaactggcttcctggaccctgttaccgccagcagcgagtatcaaagacagctgcggacaacaacaacagtgattactcgtggactggagctaccaagtatcacctcaatggaagagactctctggtgaatccgggcacagccatggccagccacaaggacgatgaagaaaagtattttcctcagagcggggttctcatcttcggaaaacaagactcgggaaaaactaatgtggacattgaaaaggtcatgattacagacgaagaggaaatcaggaccaccaatcccgtggctacggagcagtatggttctgtatctaccaatctccagagcggcaacacacaagcagctacctcagatgtcaacacacaaggcgttcttccaggcatggtctggcaggacagagacgtgtacctgcagggacccatctgggcaaagattccacacacggacggacattttcacccttctcctcttatgggaggatttggaccgaagcaccctcccccgcagattctcatcaagaataccccggtacctgcgaatccttctaccaccttcagcgcggcaaagtttgcttccttcatcacacagtactccacggggcaggtcagcgtggagatcgagtgggagctgcagaaagagaacagcaaacgctggaaccccgagatccagtatacctccaactacaacaagtctgttaatgtggactttactgtggacactaatggcgtgtattcagagcctcgccccattggcacaagatacctgactcgtaatctgtaa

SEQ ID NO: 3477 - DNA, 2208 bp, synthetic construct
  misc_feature 1..2208: note = source = /note="Description of Artificial Sequence: Synthetic polynucleotide"
  source 1..2208: mol_type = other DNA
atggctgccgatggttatcttccagattggctcgaggacactctctctgaaggaataagacagtggtggaagctcaaacctggcccaccaccgccaaagcccgcagagcggcataaggacgacagcaggggtcttgtgcttcctgggtacaagtacctcggacccttcaacggactcgacaaaggagagccggtcaacgaggcagacgccgcggccctcgagcacgacaaggcctacgaccggcagctcgacagcggagacaacccgtacctcaagtacaaccacgccgacgcggagtttcaggagcgccttaaagaagatacgtcttttgggggcaacctcgcaagagcagtattccaggcgaaaaagagggttcttgaacctctgggcctggttgaggagcctgttaagacggctccgggaaaaaagaggccggtagagcactctcctgcggagctagattcctcctccggaactggaaagtcgggccaacagcctgcaagaaagagattgaattttggtcagactggagacgcagactccgtacctgacccccagcctctcggacagccaccagcagccccctctggtctgggaactaatacgatggcttcaggcagtggcgcaccaatggcagacaataacgagggcgccgacggagtgggtaattcctcgggaaattggcattgcgattccacatggatgggcgacagagtcatcaccaccagcacccgcacctgggctctgcccacctacaacaaccatctgtacaagcaaatttccagccagtctggggccagcaacgacaaccactactttggctacagcaccccttgggggtattttgacttcaacagattccactgccacttctccccacgtgactggcaaagactcatcaacaacaattggggattccggcccaaaagactcaacttcaagctctttaacattcaagtcaaggaggtcacgcagaatgacggtacgacgacgattgccaataaccttaccagcacggttcaggtgtttactgactcggagtaccagctcccgtacgtcctcggctcggcgcatcaaggatgcctcccgccgttcccagcagacgtcttcatggtgccacagtatggatacctcaccctgaacaacgggagtcaggcggtaggacgctcttcattttactgcctggagtactttccttctcagatgctgcgtaccggaaacaactttaccttcagctacacctttgaggacgttccttttcacagcagctacgctcacagccagagtttggaccgtctcatgaatcctctcatcgaccagtacctgtattacttgagcagaacaaacactccaagcggaaccactacgcagtccaggcttcagttttctcaagccggagcgagtgacattcgggaccagtctaggaactggcttcctggaccctgttaccgccagcagcgagtatcaaagacagctgcggacaacaacaacagtgattactcgtggactggagctaccaagtatcacctcaatggaagagactctctggtgaatccgggcacagccatggccagccacaaggacgatgaagaaaagtattttcctcagagcggggttctcatcttcggaaaacaagactcgggaaaaactaatgtggacattgaaaaggtcatgattacagacgaagaggaaatcaggaccaccaatcccgtggctacggagcagtatggttctgtatctaccaatctccagagcggcaacacacaagcagctacctcagatgtcaacacacaaggcgttcttccaggcatggtctggcaggacagagacgtgtacctgcagggacccatctgggcaaagattccacacacggacggacattttcacccttctcctcttatgggaggatttggaccgaagcaccctcccccgcagattctcatcaagaataccccggtacctgcgaatccttctaccaccttcagcgcggcaaagtttgcttccctcatcacacagtactccacggggcaggtcagcgtggagatcgagtgggagctgcagaaagagaacagcaaacgctggaaccccgagatccagtatacctccaactacaacaagtctgttaatgtggactttactgtggacactaatggcgtgtattcagagcctcgccccattggcacaagatacctgactcgtaatctgtaa

SEQ ID NO: 3478 - DNA, 2208 bp, synthetic construct
  misc_feature 1..2208: note = source = /note="Description of Artificial Sequence: Synthetic polynucleotide"
  source 1..2208: mol_type = other DNA
atggctgccgatggttatcttccagattggctcgaggacactctctctgaaggaataagacagtggtggaagctcaaacctggcccaccaccgccaaagcccgcagagcggcataaggacgacagcaggggtcttgtgcttcctgggtacaagtacctcggacccttcaacggactcgacaaaggagagccggtcaacgaggcagacgccgcggccctcgagcacgacaaggcctacgaccggcagctcgacagcggagacaacccgtacctcaagtacaaccacgccgacgcggagtttcaggagcgccttaaagaagatacgtcttttgggggcaacctcgcaagagcagtattccaggcgaaaaagagggttcttgaacctctgggcctggttgaggagcctgttaagacggctccgggaaaaaagaggccggtagagcactctcctgcggagctagattcctcctccggaactggaaagtcgggccaacagcctgcaagaaagggattgaattttggtcagactggagacgcagactccgtacctgacccccagcctctcggacagccaccagcagccccctctggtctgggaactaatacgatggcttcaggcagtggcgcaccaatggcagacaataacgagggcgccgacggagtgggtaattcctcgggaaattggcattgcgattccacatggatgggcgacagagtcatcaccaccagcacccgcacctgggctctgcccacctacaacaaccatctgtacaagcaaatttccagccagtctggggccagcaacgacaaccactactttggctacagcaccccttgggggtattttgacttcaacagattccactgccacttctccccacgtgactggcaaagactcatcaacaacaattggggattccggcccaaaagactcaacttcaagctctttaacattcaagtcaaggaggtcacgcagaatgacggtacgacgacgattgccaataaccttaccagcacggttcaggtgtttactgactcggagtaccagctcccgtacgtcctcggctcggcgcatcaaggatgcctcccgccgttcccagcagacgtcttcatggtgccacagtatggatacctcaccctgaacaacgggagtcaggcggtaggacgctcttcattttactgcctggagtactttccttctcagatgctgcgtaccggaaacaactttaccttcagctacacctttgaggacgttccttttcacagcagctacgctcacagccagagtttggaccgtctcatgaatcctctcatcgaccagtacctgtattacttgagcagaacaaacactccaagcggaaccactacgcagtccaggcttcagttttctcaagccggagcgagtgacattcgggaccagtctaggaactggcttcctggaccctgttaccgccagcagcgagtatcaaagacagctgcggacaacaacaacagtgattactcgtggactggagctaccaagtatcacctcaatggaagagactctctggtgaatccgggcacagccatggccagccacaaggacgatgaagaaaagtattttcctcagagcggggttctcatcttcggaaaacaagactcgggaaaaactaatgtggacattgaaaaggtcatgattacagacgaagaggaaatcaggaccaccaatcccgtggctacggagcagtatggttctgtatctaccaatctccagagcggcaacacacaagcagctacctcagatgtcaacacacaaggcgttcttccaggcatggtctggcaggacagagacgtgtacctgcagggacccatctgggcaaagattccacacacggacggacattttcacccttctcctcttatgggaggatttggaccgaagcaccctcccccgcagattctcatcaagaataccccggtacctgcgaatccttctaccaccttcagcgcggcaaagtttgcttccttcatcacacagtactccacggggcaggtcagcgtggagatcgagtgggagctgcagaaagagaacagcaaacgctggaaccccgagatccagtatacctccaactacaacaagtctgttaatgtggactttactgtggacactaatggcgtgtattcagagcctcgccccattggcacaagatacctgactcgtaatctgtaa

SEQ ID NO: 3479 - DNA, 2208 bp, synthetic construct
  misc_feature 1..2208: note = source = /note="Description of Artificial Sequence: Synthetic polynucleotide"
  source 1..2208: mol_type = other DNA
atggctgccgatggttatcttccagattggctcgaggacactctctctgaaggaataagacagtggtggaagctcaaacctggcccaccaccgccaaagcccgcagagcggcataaggacgacagcaggggtcttgtgcttcctgggtacaagtacctcggacccttcaacggactcgacaaaggagagccggtcaacgaggcagacgccgcggccctcgagcacgacgaggcctacgaccggcagctcgacagcggagacaacccgtacctcaagtacaaccacgccgacgcggagtttcaggagcgccttaaagaagatacgtcttttgggggcaacctcgcaagagcagtattccaggcgaaaaagagggttcttgaacctctgggcctggttgaggagcctgttaagacggctccgggaaaaaagaggccggtagagcactctcctgcggagctagattcctcctccggaactggaaagtcgggccaacagcctgcaagaaagagattgaattttggtcagactggagacgcagactccgtacctgacccccagcctctcggacagccaccagcagccccctctggtctgggaactaatacgatggcttcaggcagtggcgcaccaatggcagacaataacgagggcgccgacggagtgggtaattcctcgggaaattggcattgcgattccacatggatgggcgacagagtcatcaccaccagcacccgcacctgggctctgcccacctacaacaaccatctgtacaagcaaatttccagccagtctggggccagcaacgacaaccactactttggctacagcaccccttgggggtattttgacttcaacagattccactgccacttctccccacgtgactggcaaagactcatcaacaacaattggggattccggcccaaaagactcaacttcaagctctttaacattcaagtcaaggaggtcacgcagaatgacggtacgacgacgattgtcaataaccttaccagcacggttcaggtgtttactgactcggagtaccagctcccgtacgtcctcggctcggcgcatcaaggatgcctcccgccgttcccagcagacgtcttcatggtgccacagtatggatacctcaccctgaacaacgggagtcaggcggtaggacgctcttcattttactgcctggagtactttccttctcagatgctgcgtaccggaaacaactttaccttcagctacacctttgaggacgttccttttcacagcagctacgctcacagccagagtttggaccgtctcatgaatcctctcatcgaccagtacctgtattacttgagcagaacaaacactccaagcggaaccactacgcagtccaggcttcagttttctcaagccggagcgagtgacattcgggaccagtctaggaactggcttcctggaccctgttaccgccagcagcgagtatcaaagacagctgcggacaacaacaacagtgattactcgtggactggagctaccaagtatcacctcaatggaagagactctctggtgaatccgggcacagccatggccagccacaaggacgatgaagaaaagtattttcctcagagcggggttctcatcttcggaaaacaagactcgggaaaaactaatgtggacattgaaaaggtcatgattacagacgaagaggaaatcaggaccaccaatcccgtggctacggagcagtatggttctgtatctaccaatctccagagcggcaacacacaagcagctacctcagatgtcaacacacaaggcgttcttccaggcatggtctggcaggacagagacgtgtacctgcagggacccatctgggcaaagattccacacacggacggacattttcacccttctcctcttatgggaggatttggaccgaagcaccctcccccgcagattctcatcaagaataccccggtacctgcgaatccttctaccaccttcagcgcggcaaagtttgcttacttcatcacacagtactccacggggcaggtcagcgtggagatcgagtgggagctgcagaaagagaacagcaaacgctggaaccccgagatccagtatacctccaactacaacaagtctgttaatgtggactttactgtggacactaatggcgtgtattcagagcctcgccccattggcacaagatacctgactcgtaatctgtaa

SEQ ID NO: 3480 - DNA, 2208 bp, synthetic construct
  misc_feature 1..2208: note = source = /note="Description of Artificial Sequence: Synthetic polynucleotide"
  source 1..2208: mol_type = other DNA
atggctgccgatggttatcttccagattggctcgaggacactctctctgaaggaataagacagtggtggaagctcaaacctggcccaccaccgccaaagcccgcagagcggcataaggacgacagcaggggtcttgtgcttcctgggtacaagtacctcggacccttcaacggactcgacaaaggagagccggtcaacgaggcagacgccgcggccctcgagcacgacaaggcctacgaccggcagctcgacagcggagacaacccgtacctcaagtacaaccacgccgacgcggagtttcaggagcgccttaaagaagatacgtcttttgggggcaacctcgcaagagcagtattccaggcgaaaaagagggttcttgaacctctgggcctggttgaggagcctgttaagacggctccgggaaaaaagaggccggtagagcactctcctgcggagctagattcctcctccggaactggaaagtcgggccaacagcctgcaagaaagagattgaattttggtcagactggagacgcagactccgtacctgacccccagcctctcggacagccaccagcagccccctctggtctgggaactaatacgatggcttcaggcagtggcgcaccaatggcagacaataacgagggcgccgacggagtgggtaattcctcgggaaattggcattgcgattccacatggatgggcgacagagtcatcaccaccagcacccgcacctgggctctgcccacctacaacaaccatctgtacaagcaaatttccagccagtctggggccagcaacgacaaccactactttggctacagcaccccttgggggtattttgacttcaacagattccactgccacttctccccacgtgactggcaaagactcatcaacaacaattggggattccggcccaaaagactcaacttcaagctctttaacattcaagtcaaggaggtcacgcagaatgacggtacgacgacgattgccaataaccttaccagcacggttcaggtgtttactgactcggagtaccagctcccgtacgtcctcggctcggcgcatcaaggatgcctcccgccgttcccagcagacgtcttcatggtgccacagtatggatacctcaccctgaacaacgggagtcaggcggtaggacgctcttcattttactgcctggagtactttccttctcagatgctgcgtaccggaaacaactttaccttcagctacacctttgaggacgttccttttcacagcagctacgctcacagccagagtttggaccgtctcatgaatcctctcatcgaccagtacctgtattacttgagcagaacaaacactccaagcggaaccactacgcagtccaggcttcagttttctcaagccggagcgagtggcattcgggaccagtctaggaactggcttcctggaccctgttaccgccagcagcgagtatcaaagacagctgcggacaacaacaacagtgattactcgtggactggagctaccaagtatcacctcaatggaagggactctctggtgaatccgggcacagccatggccagccacaaggacgatgaagaaaagtattttcctcagagcggggttctcatcttcggaaaacaagactcgggaaaaactaatgtggacattgaaaaggtcatgattacagacgaagaggaaatcaggaccaccaatcccgtggctacggagcagtatggttctgtatctaccaatctccagagcggcaacacacaagcagctacctcagatgtcaacacacaaggcgttcttccaggcatggtctggcaggacagagacgtgtacctgcagggacccatctgggcaaagattccacacacggacggacattttcacccttctcctcttatgggaggatttggaccgaagcaccctcccccgcagattctcatcaagaataccccggtacctgcgaatccttctaccaccttcagcgcggcaaagtttgcttccttcatcacacagtactccacggggcaggtcagcgtggagatcgagtgggagctgcagaaagagaacagcaaacgctggaaccccgagatccagtatacctccaactacaacaagtctgttaatgtggactttactgtggacactaatggcgtgtattcagagcctcgccccattggcacaagatacctgactcgtaatctgtaa

SEQ ID NO: 3481 - DNA, 2208 bp, synthetic construct
  misc_feature 1..2208: note = source = /note="Description of Artificial Sequence: Synthetic polynucleotide"
  source 1..2208: mol_type = other DNA
atggctgccgatggttatcttccagattggctcgaggacactctctctgaaggaataagacagtggtggaagctcaaacctggcccaccaccgccaaagcccgcagagcggcataaggacgacagcaggggtcttgtgcttcctgggtacaagtacctcggacccttcaacggactcgacaaaggagagccggtcaacgaggcagacgccgcggccctcgagcacgacaaggcctacgaccggcagctcgacagcggagacaacccgtacctcaagtacaaccacgccgacgcggagtttcaggagcgccttaaagaagatacgtcttttgggggcaacctcgcaagagcagtattccaggcgaaaaagagggttcttgaacctctgggcctggttgaggagcctgttaagacggctccgggaaaaaagaggccggtagagcactctcctgcggagctagattcctcctccggaactggaaagtcgggccaacagcctgcaagaaagagattgaattttggtcagactggagacgcagactccgtacctgacccccagcctctcggacagccaccagcagccccctctggtctgggaactaatacgatggcttcaggcagtggcgcaccaatggcagacaataacgagggcgccgacggagtgggtaattcctcgggaaattggcattgcgattccacatggatgggcgacagagtcatcaccaccagcacccgcacctgggctctgcccacctacaacaaccatctgtacaagcaaatttccagccagtctggggccagcaacgacaaccactactttggctacagcaccccttgggggtattttgacttcaacagattccactgccacttctccccacgtgactggcaaagactcatcaacaacaattggggattccggcccaaaagactcaacttcaagctctttaacattcaagtcaaggaggtcacgcagaatgacggtacgacgacgattgccaataaccttaccagcacggttcaggtgtttactgactcggagtaccagctcccgtacgtcctcggctcggcgcatcaaggatgcctcccgccgttcccagcagacgtcttcatggtgccacagtatggatacctcaccctgaacaacgggagtcaggcggtaggacgctcttcattttactgcctggagtactttccttctcagatgctgcgtaccggaaacaactttaccttcagctacacctttgaggacgttccttttcacagcagctacgctcacagccagagtttggaccgtctcatgaatcctctcatcgaccagtacctgtattacttgagcagaacaaacactccaagcggaaccactacgcagtccaggcttcagttttctcaagccggagcgagtgacattcgggaccagtctaggaactggcttcctggaccctgttaccgccagcagcgagtatcaaagacagctgcggacaacaacaacagtgattactcgtggactggagctaccaagtatcacctcaatggaagagactctctggtgaatccgggcacagccatggccagccacaaggacgatgaagaaaagtattttcctcagagcggggttctcatcttcggaaaacaagactcgggaaaaactaatgtggacattgaaaaggtcgtgattacagacgaagaggaaatcaggaccaccaatcccgtggctacggagcagtatggttctgtatctaccaatctccagagcggcaacacacaagcagctacctcagatgtcaacacacaaggcgttcttccaggcatggtctggcaggacagagacgtgtacctgcagggacccatctgggcaaagattccacacacggacggacattttcacccttctcctcttatgggaggatttggaccgaagcaccctcccccgcagattctcatcaagaataccccggtacctgcgaatccttctaccaccttcagcgcggcaaagtttgcttccttcatcacacagtactccacggggcaggtcagcgtggagatcgagtgggagctgcagaaagagaacagcaaacgctggaaccccgagatccagtatacctccaactacaacaagtctgttaatgtggactttactgtggacactaatggcgtgtattcagagcctcgccccattggcacaagatacctgactcgtaatctgtaa

SEQ ID NO: 3482 - DNA, 2208 bp, synthetic construct
  misc_feature 1..2208: note = source = /note="Description of Artificial Sequence: Synthetic polynucleotide"
  source 1..2208: mol_type = other DNA
atggctgccgatggttatcttccagattggctcgaggacactctctctgaaggaataagacagtggtggaagctcaaacctggcccaccaccgccaaagcccgcagagcggcataaggacgacagcaggggtcttgtgcttcctgggtacaagtacctcggacccttcaacggactcgacaaaggagagccggtcaacgaggcagacgccgcggccctcgagcacgacaaggcctacgaccggcagctcgacagcggagacaacccgtacctcaagtacaaccacgccgacgcggagtttcaggagcgccttaaagaagatacgtcttttgggggcaacctcgcaagagcagtattccaggcgaaaaagagggttcttgaacctctgggcctggttgaggagcctgttaagacggctccgggaaaaaagaggccggtagagcactctcctgcggagctagattcctcctccggaactggaaagtcgggccaacagcctgcaagaaagagattgaattttggtcagactggagacgcagactccgtacctgacccccagcctctcggacagccaccagcagccccctctggtctgggaactaatacgatggcttcaggcagtggcgcaccaatggcagacaataacgagggcgccgacggagtgggtaattcctcgggaaattggcattgcgattccacatggatgggcgacagagtcatcaccaccagcacccgcacctgggctctgcccacctacaacaaccatctgtacaagcaaatttccagccagtctggggccagcaacgacaaccactactttggctacagcaccccttgggggtattttgacttcaacagattccactgccacttctccccacgtgactggcaaagactcatcaacaacaattggggattccggcccaaaagactcaacttcaagctctttaacattcaagtcaaggaggtcacgcagaatgacggtacgacgacgattgccaataaccttaccagcacggttcaggtgtttactgactcggagtaccagctcccgtacgtcctcggctcggcgcatcaaggatgcctcccgccgttcccagcagacgtcttcatggtgccacagtatggatacctcaccctgaacaacgggagtcaggcggtaggacgctcttcattttactgcctggagtactttccttctcagatgctgcgtaccggaaacaactttaccttcagctacacctttgaggacgttccttttcacagcagctacgctcacagccagagtttggaccgtctcatgaatcctctcatcgaccagtacctgtattacttgagcagaacaaacactccaagcggaaccactacgcagtccaggcttcagttttctcaagccggagcgagtgacattcgggaccagtctaggaactggcttcctggaccctgttaccgccagcagcgagtatcaaagacagctgcggacaacaacaacagtgattactcgtggactggagctaccaagtatcacctcaatggaagagactctctggtgaatccgggcacagccatggccagccacaaggacgatgaagaaaagtattttcctcagagcggggttctcatcttcggaaaacaagactcgggaaaaactaatgtggacattgaaaaggtcatgattacagacgaagaggaaatcaggaccaccaatcccgtggctacggagcagtatggttctgtatctaccaatctccagagcggcgacacacaagcagctacctcagatgtcaacacacaaggcgttcttccaggcatggtctggcaggacagagacgtgtacctgcagggacccatctgggcaaagattccacacacggacggacattttcacccttctcctcttatgggaggatttggaccgaagcaccctcccccgcagattctcatcaagaataccccggtacctgcgaatccttctaccaccttcagcgcggcaaagtttgcttccttcatcacacagtactccacggggcaggtcagcgtggagatcgagtgggagctgcagaaagagaacagcaaacgctggaaccccgagatccagtatacctccaactacaacaagtctgttaatgtggactttactgtggacactaatggcgtgtattcagagcctcgccccattggcacaagatacctgactcgtaatctgtaa

SEQ ID NO: 3483 - DNA, 2208 bp, synthetic construct
  misc_feature 1..2208: note = source = /note="Description of Artificial Sequence: Synthetic polynucleotide"
  source 1..2208: mol_type = other DNA
atggctgccgatggttatcttccagattggctcgaggacactctctctgaaggaataagacagtggtggaagctcaaacctggcccaccaccgccaaagcccgcagagcggcataaggacgacagcaggggtcttgtgcttcctgggtacaagtacctcggacccttcaacggactcgacaaaggagagccggtcaacgaggcagacgccgcggccctcgagcacgacaaggcctacgaccggcagctcgacagcggagacaacccgtacctcaagtacaaccacgccgacgcggagtttcaggagcgccttaaagaagatacgtcttttgggggcaacctcgcaagagcagtattccaggcgaaaaagagggttcttgaacctctgggcctggttgaggagcctgttaagacggctccgggaaaaaagaggccggtagagcactctcctgcggagctagattcctcctccggaactggaaagtcgggccaacagcctgcaagaaagagattgaattttggtcagactggagacgcagactccgtacctgacccccagcctctcggacagccaccagcagccccctctggtctgggaactaatacgatggcttcaggcagtggcgcaccaatggcagacaataacgagggcgccgacggagtgggtaattcctcgggaaattggcattgcgattccacatggatgggcgacagagtcatcaccaccagcacccgcacctgggctctgcccacctacaacaaccatctgtacaagcaaatttccagccagtctggggccagcaacgacaaccactactttggctacagcaccccttgggggtattttgacttcaacagattccactgccacttctccccacgtgactggcaaagactcatcaacaacaattggggattccggcccaaaagactcaacttcaggctctttaacattcaagtcaaggaggtcacgcagaatgacggtacgacgacgattgccaataaccttaccagcacggttcaggtgtttactgactcggagtaccagctcccgtacgtcctcggctcggcgcatcaaggatgcctcccgccgttcccagcagacgtcttcatggtgccacagtatggatacctcaccctgaacaacgggagtcaggcggtaggacgctcttcattttactgcctggagtactttccttctcagatgctgcgtaccggaaacaactttaccttcagctacacctttgaggacgttccttttcacagcagctacgctcacagccagagtttggaccgtctcatgaatcctctcatcgaccagtacctgtattacttgagcagaacaaacactccaagcggaaccactacgcagtccaggcttcagttttctcaagccggagcgagtgacattcgggaccagtctaggaactggcttcctggaccctgttaccgccagcagcgagtatcaaagacagctgcggacaacaacaacagtgattactcgtggactggagctaccaagtatcacctcaatggaagagactctctggtgaatccgggcacagccatggccagccacaaggacgatgaagaaaagtattttcctcagagcggggttctcatcttcggaaaacaagactcgggaaaaactaatgtggacattgaaaaggtcatgattacagacgaagaggaaatcaggaccaccaatcccgtggctacggagcagtatggttctgtatctaccaatctccagagcggcaacacacaagcagctacctcagatgtcaacacacaaggcgttcttccaggcatggtctggcaggacagagacgtgtacctgcagggacccatctgggcaaagattccacacacggacggacattttcacccttctcctcttatgggaggatttggaccgaagcaccctcccccgcagattctcatcaagaataccccggtacctgcgaatccttctaccaccttcagcgcggcaaagtttgcttccttcatcacacagtactccacggggcaggtcagcgtggagatcgagtgggagctgcagaaagagaacagcaaacgctggaaccccgagatccagtatacctccaactacaacaagtctgttaatgtggactttactgtggacactaatggcgtgtattcagagcctcgccccattggcacaagatacctgactcgtaatctgtaa

SEQ ID NO: 3484 - DNA, 2208 bp, synthetic construct
  misc_feature 1..2208: note = source = /note="Description of Artificial Sequence: Synthetic polynucleotide"
  source 1..2208: mol_type = other DNA
atggctgccgatggttatcttccagattggctcgaggacactctctctgaaggaataagacagtggtggaagctcaaacctggcccaccaccgccaaagcccgcagagcggcataaggacgacagcaggggtcttgtgcttcctgggtacaagtacctcggacccttcaacggactcgacaaaggagagccggtcaacgaggcagacgccgcggccctcgagcacggcaaggcctacgaccggcagctcgacagcggagacaacccgtacctcaagtacaaccacgccgacgcggagtttcaggagcgccttaaagaagatacgtcttttgggggcaacctcgcaagagcagtattccaggcgaaaaagagggttcttgaacctctgggcctggttgaggagcctgttaagacggctccgggaaaaaagaggccggtagagcactctcctgcggagctagattcctcctccggaactggaaagtcgggccaacagcctgcaagaaagagattgaattttggtcagactggagacgcagactccgtacctgacccccagcctctcggacagccaccagcagccccctctggtctgggaactaatacgatggcttcaggcagtggcgcaccaatggcagacaataacgagggcgccgacggagtgggtaattcctcgggaaattggcattgcgattccacatggatgggcgacagagtcatcaccaccagcacccgcacctgggctctgcccacctacaacaaccatctgtacaagcaaatttccagccagtctggggccagcaacgacaaccactactttggctacagcaccccttgggggtattttgacttcaacagattccactgccacttctccccacgtgactggcaaagactcatcaacaacaattggggattccggcccaaaagactcaacttcaagctctttaacattcaagtcaaggaggtcacgcagaatgacggtacgacgacgattgccaataaccttaccagcacggttcaggtgtttactgactcggagtaccagctcccgtacgtcctcggctcggcgcatcaaggatgcctcccgccgttcccagcagacgtcttcatggtgccacagtatggatacctcaccctgaacaacgggagtcaggcggtaggacgctcttcattttactgcctggagtactttccttctcagatgctgcgtaccggaaacaactttaccttcagctacacctttgaggacgttccttttcacagcagctacgctcacagccagagtttggaccgtctcatgaatcctctcatcgaccagtacctgtattacttgagcagaacaaacactccaagcggaaccactacgcagtccaggcttcagttttctcaagccggagcgagtgacattcgggaccagtctaggaactggcttcctggaccctgttaccgccagcagcgagtatcaaagacagctgcggacaacaacaacagtgattactcgtggactggagctaccaagtatcacctcaatggaagagactctctggtgaatccgggcacagccatggccagccacaaggacgatgaagaaaagtattttcctcagagcggggttctcatcttcggaaaacaagactcgggaaaaactaatgtggacattgaaaaggtcatgattacagacgaagaggaaatcaggaccaccaatcccgtggctacggagcagtatggttctgtatctaccaatctccagagcggcaacacacaagcagctacctcagatgtcaacacacaaggcgttcttccaggcatggtctggcaggacagagacgtgtacctgcagggacccatctgggcaaagattccacacacggacggacattttcacccttctcctcttatgggaggatttggaccgaagcaccctcccccgcagattctcatcaagaataccccggtacctgcgaatccttctaccaccttcagcgcggcaaagtttgcttccttcatcacacagtactccacggggcaggtcagcgtggagatcgagtgggagctgcagaaagagaacagcaaacgctggaaccccgagatccagtatacctccaactacaacaagtctgttaatgtggactttactgtggacactaatggcgtgtattcagagcctcgccccattggcacaagatacctgactcgtaatctgtaa

SEQ ID NO: 3485 - DNA, 2208 bp, synthetic construct
  misc_feature 1..2208: note = source = /note="Description of Artificial Sequence: Synthetic polynucleotide"
  source 1..2208: mol_type = other DNA
atggctgccgatggttatcttccagattggctcgaggacactctctctgaaggaataagacagtggtggaagctcaaacctggcccaccaccgccaaagcccgcagagcggcataaggacgacagcaggggtcttgtgcttcctgggtacaagtacctcggacccttcaacggactcgacaaaggagagccggtcaacgaggcagacgccgcggccctcgagcacgacaaggcctacgaccggcagctcgacagcggagacaacccgtacctcaagtacaaccacgccgacgcggagtttcaggagcgccttaaagaagatacgtcttttgggggcaacctcgcaagagcagtattccaggcgaaaaagagggttcttgaacctctgggcctggttgaggagcctgttaagacggctccgggaaaaaagaggccggtagagcactctcctgcggagctagattcctcctccggaactggaaagtcgggccaacagcctgcaagaaagagattgaattttggtcagactggagacgcagactccgtacctgacccccagcctctcggacagccaccagcagccccctctggtccgggaactaatacgatggcttcaggcagtggcgcaccaatggcagacaataacgagggcgccgacggagtgggtaattcctcgggaaattggcattgcgattccacatggatgggcgacagagtcatcaccaccagcacccgcacctgggctctgcccacctacaacaaccatctgtacaagcaaatttccagccagtctggggccagcaacgacaaccactactttggctacagcaccccttgggggtattttgacttcaacagattccactgccacttctccccacgtgactggcaaagactcatcaacaacaattggggattccggcccaaaagactcaacttcaagctctttaacattcaagtcaaggaggtcacgcagaatgacggtacgacgacgattgccaataaccttaccagcacggttcaggtgtttactgactcggagtaccagctcccgtacgtcctcggctcggcgcatcaaggatgcctcccgccgttcccagcagacgtcttcatggtgccacagtatggatacctcaccctgaacaacgggagtcaggcggtaggacgctcttcattttactgcctggagtactttccttctcagatgctgcgtaccggaaacaactttaccttcagctacacctttgaggacgttccttttcacagcagctacgctcacagccagagtttggaccgtctcatgaatcctctcatcgaccagtacctgtattacttgagcagaacaaacactccaagcggaaccactacgcagtccaggcttcagttttctcaagccggagcgagtgacattcgggaccagtctaggaactggcttcctggaccctgttaccgccagcagcgagtatcaaagacagctgcggacaacaacaacagtgattactcgtggactggagctaccaagtatcacctcaatggaagagactctctggtgaatccgggcacagccatggccagccacaaggacgatgaagaaaagtattttcctcagagcggggttctcatcttcggaaaacaagactcgggaaaaactaatgtggacattgaaaaggtcatgattacagacgaagaggaaatcaggaccaccaatcccgtggctacggagcagtatggttctgtatctaccaatctccagagcggcaacacacaagcagctacctcagatgtcaacacacaaggcgttcttccaggcatggtctggcaggacagagacgtgtacctgcagggacccatctgggcaaagattccacacacggacggacattttcacccttctcctcttatgggaggatttggaccgaagcaccctcccccgcagattctcatcaagaataccccggtacctgcgaatccttctaccaccttcagcgcggcaaagtttgcttccttcatcacacagtactccacggggcaggtcagcgtggagatcgagtgggagctgcagaaagagaacagcaaacgctggaaccccgagatccagtatacctccaactacaacaagtctgttaatgtggactttactgtggacaccaatggcgtgtattcagagcctcgccccattggcacaagatacctgactcgtaatctgtaa

SEQ ID NO: 3486 - DNA, 2208 bp, synthetic construct
  misc_feature 1..2208: note = source = /note="Description of Artificial Sequence: Synthetic polynucleotide"
  source 1..2208: mol_type = other DNA
atggctgccgatggttatcttccagattggctcgaggacactctctctgaaggaataagacagtggtggaagctcaaacctggcccaccaccgccaaagcccgcagagcggcataaggacgacagcaggggtcttgtgcttcctgggtacaagtacctcggacccttcaacggactcgacaaaggagagccggtcaacgaggcagacgccgcggccctcgagcacgacaaggcctacgaccggcagctcgacagcggagacaacccgtacctcaagtacaaccacgccgacgcggagtttcaggagcgccttaaagaagatacgtcttttgggggcaacctcgcaagagcagtattccaggcgaaaaagagggttcttgaacctctgggcctggttgaggagcctgttaagacggctccgggaaaaaagaggccggtagagcactctcctgcggggccagattcctcctccggaactggaaagtcgggccaacagcctgcaagaaagagattgaattttggtcagactggagacgcagactccgtacctgacccccagcctctcggacagccaccagcagccccctctggtctgggaactaatacgatggcttcaggcagtggcgcaccaatggcagacaataacgagggcgccgacggagtgggtaattcctcgggaaattggcattgcgattccacatggatgggcgacagagtcatcaccaccagcacccgcacctgggctctgcccacctacaacaaccatctgtacaagcaaatttccagccagtctggagccagcaacgacaaccactactttggctacagcaccccttgggggtattttgacttcaacagattccactgccacttctccccacgtgactggcaaagactcatcaacaacaattggggattccggcccaaaagactcaacttcgagctctttaacattcaagtcaaggaggtcacgcagaatgacggtacgacgacgattgccaataaccttaccagcacggttcaggtgtttactgactcggagtaccagctcccgtacgtcctcggctcggcgcatcaaggatgcctcccgccgttcccagcagacgtcttcatggtgccacagtatggatacctcaccctgaacaacgggagtcaggcggtaggacgctcttcattttactgcctggagtactttccttctcagatgctgcgtaccggaaacaactttaccttcagctacacctttgaggacgttccttttcacagcagctacgctcacagccagagtttggaccgtctcatgaatcctctcatcgaccagtacctgtattacttgagcagaacaaacactccaagcggaaccactacgcagtccaggcttcagttttctcaagccggagcgagtgacattcgggaccagtctaggaactggcttcctggaccctgttaccgccagcagcgagtatcaaagacagctgcggacaacaacaacagtgattactcgtggactggagctaccaagtatcacctcaatggaagagactctctggtgaatccgggcacagccatggccagccacaaggacgatgaagaaaagtattttcctcagagcggggttctcatcttcggaaaacaagactcggaaaaaactaatgtggacattgaaaaggtcatgattacagacgaagaggaaatcaggaccaccaatcccgtggctacggagcagtatggttctgtatctaccaatctccagagcggcaacacacaagcagctacctcagatgtcaacacacaaggcgttcttccaggcatggtctggcaggacagagacgtgtacctgcagggacccatctgggcaaagattccacacacggacggacactttcacccttctcctcttatgggaggatttggactgaagcaccctcccccgcagattctcatcaagagtaccccggtacctgcgaatccttctaccaccttcagcgcggcaaagtttgcttccttcatcacacagtactccacggggcaggtcagcgtggagatcgagtgggagctgcagaaagagaacagcaaacgctggaaccccgagatccagtatacctccaactacaacaagtctgttaatgtggactttactgtggacactaatggcgtgtattcagagcctcgccccattggcacaagatacctgactcgtaatctgtaa

SEQ ID NO: 3487 - DNA, 2208 bp, synthetic construct
  misc_feature 1..2208: note = source = /note="Description of Artificial Sequence: Synthetic polynucleotide"
  source 1..2208: mol_type = other DNA
atggctgccgatggttatcttccagattggctcgaggacactctctctgaaggaataagacagtggtggaagctcaaacctggcccaccaccgccaaagcccgcagagcggcataaggacgacagcaggggtcttgtgcttcctgggtacaagtacctcggacccttcaacggactcgacaaaggagagccggtcaacgaggcagacgccgcggccctcgagcacgacaaggcctacgaccggcagctcgacagcggagacaacccgtacctcaagtacaaccacgccgacgcggagtttcaggagcgccttaaagaagatacgtcttttgggggcaacctcgcaagagcagtattccaggcgaaaaagagggttcttgaacctctgggcctggttgaggagcctgttaagacggctccgggaaaaaagaggccggtagagcactctcctgcggggccagattcctcctccggaactggaaagtcgggccaacagcctgcaagaaagagattgaattttggtcagactggagacgcagactccgtacctgacccccagcctctcggacagccaccagcagccccctctggtctgggaactaatacgatggcttcaggcagtggcgcaccaatggcagacaataacgagggcgccgacggagtgggtaattcctcgggaaattggcattgcgattccacatggatgggcgacagagtcatcaccaccagcacccgcacctgggctctgcccacctacaacaaccatctgtacaagcaaatttccagccagtctggagccagcaacgacaaccactactttggctacagcaccccttgggggtattttgacttcaacagattccactgccacttctccccacgtgactggcaaagactcatcaacaacaattggggattccggcccaaaagactcaacttcgagctctttaacattcaagtcaaggaggtcacgcagaatgacggtacgacgacgattgccaataaccttaccagcacggttcaggtgtttactgactcggagtaccagctcccgtacgtcctcggctcggcgcatcaaggatgcctcccgccgttcccagcagacgtcttcatggtgccacagtatggatacctcaccctgaacaacgggagtcaggcggtaggacgctcttcattttactgcctggagtactttccttctcagatgctgcgtaccggaaacaactttaccttcagctacacctttgaggacgttccttttcacagcagctacgctcacagccagagtttggaccgtctcatgaatcctctcatcgaccagtacctgtattacttgagcagaacaaacactccaagcggaaccactacgcagtccaggcttcagttttctcaagccggagcgagtgacattcgggaccagtctaggaactggcttcctggaccctgttaccgccagcagcgagtatcaaagacagctgcggacaacaacaacagtgattactcgtggactggagctaccaagtatcacctcaatggaagagactctctggtgaatccgggcacagccatggccagccacaaggacgatgaagaaaagtattttcctcagagcggggttctcatcttcggaaaacaagactcgggaaaaactaatgtggacattgaaaaggtcatgattacagacgaagaggaaatcaggaccaccaatcccgtggctacggagcagtatggttctgtatctaccaatctccagagcggcaacacacaagcagctacctcagatgtcaacacacaaggcgttcttccaggcatggtctggcaggacagagacgtgtacctgcagggacccatctgggcaaagattccacacacggacggacactttcacccttctcctcttatgggaggatttggactgaagcaccctcccccgcagattctcatcaagagtaccccggtacctgcgaatccttctaccaccctcagcgcggcaaagtttgcttccttcatcacacagtactccacggggcaggtcagcgtggagatcgagtgggagctgcagaaagagaacagcaaacgctggaaccccgagatccagtatacctccaactacaacaagtctgttaatgtggactttactgtggacactaatggcgtgtattcagagcctcgccccattggcacaagatacctgactcgtaatctgtaa

SEQ ID NO: 3488 - DNA, 2205 bp, synthetic construct
  misc_feature 1..2205: note = source = /note="Description of Artificial Sequence: Synthetic polynucleotide"
  source 1..2205: mol_type = other DNA
atggctgccgatggttatcttccagattggctcgaggacactctctctgaaggaataagacagtggtggaagctcaaacctggcccaccaccgccaaagcccgcagagcggcataaggacgacagcaggggtcttgtgcttcctgggtacaagtacctcggacccttcaacggactcgacaaaggagagccggtcaacgaggcagacgccgcggccctcgagcacgacaaggcctacgaccggcagctcgacagcggagacaacccgtacctcaagtacaaccacgccgacgcggagtttcaggagcgccttaaagaagatacgtcttttgggggcaacctcgcaagagcagtattccaggcgaaaaagagggttcttgaacctctgggcctggttgaggagcctgttaagacggctccgggaaaaaagaggccggtagagcactctcctgcggggccagattcctcctccggaactggaaagtcgggccaacagcctgcaagaaagagattgaattttggtcagactggagacgcagactccgtacctgacccccagcctctcggacagccaccagcagccccctctggtctgggaactaatacgatggcttcaggcagtggcgcaccaatggcagacaataacgagggcgccgacggagtgggtaattcctcgggaaattggcattgcgattccacatggatgggcgacagagtcatcaccaccagcacccgcacctgggctctgcccacctacaacaaccatctgtacaagcaaatttccagccagtctggagccagcaacgacaaccactactttggctacagcaccccttgggggtattttgacttcaacagattccactgccacttctccccacgtgactggcaaagactcatcaacaacaattggggattccggcccaaaagactcaacttcgagctctttaacattcaagtcaaggaggtcacgcagaatgacggtacgacgacgattgccaataaccttaccagcacggttcaggtgtttactgactcggagtaccagctcccgtacgtcctcggctcggcgcatcaaggatgcctcccgccgttcccagcagacgtcttcatggtgccacagtatggatacctcaccctgaacaacgggagtcaggcggtaggacgctcttcattttactgcctggagtactttccttctcagatgctgcgtaccggaaacaactttaccttcagctacacctttgaggacgttccttttcacagcagctacgctcacagccagagtttggaccgtctcatgaatcctctcatcgaccagtacctgtattacttgagcagaacaaacactccaagcggaaccactacgcagtccaggcttcagttttctcaagccggagcgagtgacattcgggaccagtctaggaactggcttcctggaccctgttaccgccagcagcgagtatcaaagacagctgcggacaacaacagtgattactcgtggactggagctaccaagtatcacctcaatggaagagactctctggtgaatccgggcacagccatggccagccacaaggacgatgaagaaaagtattttcctcagagcggggttctcatcttcggaaaacaagactcgggaaaaactaatgtggacattgaaaaggtcatgattacagacgaagaggaaatcaggaccaccaatcccgtggctacggagcagtatggttctgtatctaccaatctccagagcggcaacacacaagcagctacctcagatgtcaacacacaaggcgttcttccaggcatggtctggcaggacagagacgtgtacctgcagggacccatctgggcaaagattccacacacggacggacactttcacccttctcctcttatgggaggatttggactgaagcaccctcccccgcagattctcatcaagagtaccccggtacctgcgaatccttctaccaccttcagcgcggcaaagtttgcttccttcatcacacagtactccacggggcaggtcagcgtggagatcgagtgggagctgcagaaagagaacagcaaacgctggaaccccgagatccagtatacctccaactacaacaagtctgttaatgtggactttactgtggacactaatggcgtgtattcagagcctcgccccattggcacaagatacctgactcgtaatctgtaa

SEQ ID NO: 3489 - DNA, 2208 bp, synthetic construct
  misc_feature 1..2208: note = source = /note="Description of Artificial Sequence: Synthetic polynucleotide"
  source 1..2208: mol_type = other DNA
atggctgccgatggttatcttccagattggctcgaggacactctctctgaaggaataagacagtggtggaagctcaaacctggcccaccaccgccaaagcccgcagagcggcataaggacgacagcaggggtcttgtgcttcctgggtacaagtacctcggacccttcaacggactcgacaagggggagccggtcaacgaggcagacgccgcggccctcgagcacgacaaggcctacgaccggcagctcgacagcggagacaacccgtacctcaagtacaaccacgccgacgcggagtttcaggagcgtcttaaagaagatacgtcttttgggggcaacctcggacgaacagtcttccaggcgaaaaagagggttcttgaacctctgggcctggttgaggaacctgttaagacggctccgggaaaaaagaggccggtagagcactctcctgtggagccagactcctcctcgggaaccggaaaggcgggccagcagcctgcaagaaaaagattgaatttcggtcagactggagacgcagactccgtacctgacccccagcctctcggacagccaccagcagccccctctggtctgggaactaatacgatggctacaggcagtggcgcaccaatggcagacaataacgagggcgccgacggagtgggtaattcctcgggaaattggcattgcgattccacatggatgggcgacagagtcatcaccaccagcacccgcacctgggctctgcccacctacaacaaccatctgtacaagcaaatttccagccaatcaggagcatcgaacgacaaccactactttggctacagcaccccctgggggtattttgacttcaacagattccactgccacttttcgccacgtgactggcaaagactcatcaacaacaactggggattccggcccaagagactcagcttcaagctctttaacattcaagtcaaggaggtcacgcagaatgacggtacgacgacgattgccaataaccttaccagcacggttcaggtctttactgactcggagtaccagctcccgtacgtcctcggctcggcgcatcaaggatgcctcccgccgttcccagcagacgtcttcatggtgccacagtatggatacctcaccctgaacaacgggagtcaggcggtaggacgctcttcattttactgcctggagtacttcccttctcagatgcttcgcacgggaaacaactttaccttcagctacacctttgaggacgtgccttttcacagcagctacgctcacagccaaagtctggaccgtctcatgaatcctctcatcgaccaatacctgtattacttgagcaaaacaaacgctccaagcggaaccaccacgatgtccaggcttcagttttctcaggccggagcgagtgacattcgggaccagtctagaaactggcttcctggaccctgttaccgccagcagcgagtatcaaagacagctgcggacaacaacaacagtgattactcgtggactggagctaccaagtaccacctcaatggaagagactctctggtgaacccgggcccagctatggccagccacaaggatgatgaagaaaaatattttcctcagagcggggttctcatcttcgggaaacaaggctcaaataaaactaatgtggacattgaaaaggttatgattacagacgaagaggaaatcaggaccaccaatcccgtggctacggagcagtatggttctgtatctaccaaccttcaaagcggcaacacacaagcagctacctcagatgtcaacacacaaggcgttcttcctggcatggtctggcaggacagagatgtgtacctgcaggggcccatctgggcaaagattcctcacacggacggacactttcacccttctcccctcatgggcggatttggattgaagcaccctcccccacagattctcatcaagaataccccggtacctgcgaatccttcgaccaccttcagtgcggcaaagtttgcttccttcatcacacagtattccacgggacaggtcagcgtggagatagagtgggagctgcagaaggagaacagcaaacgctggaaccccgagatccagtatacttccaactacaacaaatctgttaatgtggactttactgtggacactaatggtgtgtattcagagcctcgccccattggcaccagatacctgactcgtaatctgtaa

SEQ ID NO: 3490 - DNA, 2208 bp, synthetic construct
  misc_feature 1..2208: note = source = /note="Description of Artificial Sequence: Synthetic polynucleotide"
  source 1..2208: mol_type = other DNA
atggctgccgatggttatcttccagattggctcgaggacactctctctgaaggaataagacagtggtggaagctcaaacctggcccaccaccgccaaagcccgcagagcggcataaggacgacagcaggggtcttgtgcttcctgggtacaagtacctcggacccttcaacggactcgacaagggggagccggtcaacgaggcagacgccgcggccctcgagcacgacaaggcctacgaccggcagctcgacagcggagacaacccgtacctcaagtacaaccacgccgacgcggagtttcaggagcgtcttaaagaagatacgtcttttgggggcaacctcggacgagcagtcttccaggcgaaaaagagggttcttgaacctctgggcctggttgaggaacctgttaagacggctccgggaaaaaagaggccggtagagcactctcctgtggagccagactcctcctcgggaaccggaaaggcgggccagcagcctgcaagaaaaagattgaatttcggtcagactggagacgcagactccgtacctgacccccagcctctcggacagccaccagcagccccctctggtctgggaactaatacgatggctacaggcagtggcgcaccaatggcagacaataacgagggcgccgacggagtgggtaattcctcgggaaattggcattgcgattccacatggatgggcgacagagtcatcaccaccagcacccgcacctgggctctgcccacctacaacaaccatctgtacaagcaaatttccagccaatcaggagcatcgaacgacaaccactactttggctacagcaccccctgggggtattttgacttcaacagattccactgccacttttcgccacgtgactggcaaagactcatcaacaacaactggggattccggcccaagagactcagcttcaagctctttaacattcaagtcaaggaggtcacgcagaatgacggtacgacgacgattgccaataaccttaccagcacggttcaggtctttactgactcggagtaccagctcccgtacgtcctcggctcggcgcatcaaggatgcctcccgccgttcccagcagacgtcttcatggtgccacagtatggatacctcaccctgaacaacgggagtcaggcggtaggacgctcttcattttactgcctggagtacttcccttctcagatgcttcgcacgggaaacaactttaccttcagctacacctttgaggacgtgccttttcacagcagctacgctcacagccaaagtctggaccgtctcatgaatcctctcatcgaccaatacctgtattacttgagcaaaacaaacgctccaagcggaaccaccacgatgtccaggcttcagttttctcaggccggagcgagtgacattcgggaccagtctagaaactggcttcctggaccctgttaccgccagcagcgagtatcaaagacagctgcggacaacaacaacagtgattactcgtggactggagctaccaagtaccacctcaatggaagagactctctggtgaacccgggcccagctatggccaaccacaaggatgatgaagaaaaatattttcctcagagcggggttctcatcttcgggaaacaaggctcaaataaaactaatgtggacattgaaaaggttatgattacagacgaagaggaaatcaggaccaccaatcccgtggctacggagcagtatggttctgtatctaccaaccttcaaagcggcaacacacaagcagctacctcagatgtcaacacacaaggcgttcttcctggcatggtctggcaggacagagatgtgtacctgcaggggcccatctgggcaaagattcctcacacggacggacactttcacccttctcccctcatgggcggatttggattgaagcaccctcccccacagattctcatcaagaataccccggtacctgcgaatccttcgaccaccttcagtgcggcaaagtttgcttccttcatcacacagtattccacgggacaggtcagcgtggagatagagtgggagctgcagaaggagaacagcaaacgctggaaccccgagatccagtatacttccaactacaacaaatctgttaatgtggactttactgtggacactaatggtgtgtattcagagcctcgccccattggcaccagatacctgactcgtaatctgtaa

SEQ ID NO: 3491 - DNA, 2208 bp, synthetic construct
  misc_feature 1..2208: note = source = /note="Description of Artificial Sequence: Synthetic polynucleotide"
  source 1..2208: mol_type = other DNA
atggctgccgatggttatcttccagattggctcgaggacactctctctgaaggaataagacagtggtggaagctcaaacctggcccaccaccgccaaagcccgcagagcggcataaggacgacagcaggggtcttgtgcttcctgggtacaagtacctcggacccttcaacggactcgacaagggggagccggtcaacgaggcagacgccgcggccctcgagcacgacaaggcctacgaccggcagctcgacagcggagacaacccgtacctcaagtacaaccacgccgacgcggagtttcaggagcgtcttaaagaagatacgtcttttgggggcaacctcggacgagcagtcttccaggcgaaaaagagggttcttgaacctctgggcctggttgaggaacctgttaagacggctccgggaaaaaagaggccggtagagcactctcctgtggagccagactcctcctcgggaaccggaaaggcgggccagcagcctgcaagaaaaagattgaatttcggtcagactggagacgcagactccgtacctgacccccagcctctcggacagccaccagcagccccctctggtctgggaactaatacgatggctacaggcagtggcgcaccaatggcagacaataacgagggcgccgacggagtgggtaattcctcgggaaattggcattgcgattccacatggatgggcgacagagtcatcaccaccagcacccgcacctgggctctgcccacctacaacaaccatctgtacaagcaaatttccagccaatcaggagcatcgaacgacaaccactactttggctacagcaccccctgggggtattttgacttcaacagattccactgccacttttcgccacgtgactggcaaagactcatcaacaacaactggggattccggcccaagagactcagcttcaagctctttaacattcaagtcaaggaggtcacgcagaatgacggtacgacgacgattgccaataaccttaccagcacggttcaggtctttactgactcggagtaccagctcccgtacgtcctcggctcggcgcatcaaggatgcctcccgccgttcccagcagacgtcttcatggtgccacagtatggatacctcaccctgaacaacgggagtcaggcggtaggacgctcttcattttactgcctggagtacttcccttctcagatgcttcgcacgggaaacaactttaccttcagctacacctttgaggacgtgccttttcacagcagctacgctcacagccaaagtctggaccgtctcatgaatcctctcatcgaccaatacctgtattacttgagcaaaacaaacgctccaagcggaaccaccacgatgtccaggcttcagttttctcaggccggagcgagtgacattcgggaccagtctagaaactggcttcctggaccctgttaccgccagcagcgagtatcaaagacagctgcggacaacaacaacagtgattactcgtggactggagctaccaagtaccacctcaatggaagagactctctggtgaacccgggcccagctatggccagccacaaggatgatgaagaaaaatattttcctcagagcggggttctcatcttcgggaaacaaggctcaaataaaactaatgtggacattgaaaaggttatgattacagacgaagaggaaatcaggaccaccaatcccgtggctacggagcagtatggttctgtatctaccaaccttcaaagcggcaacacacaagcagctacctcagatgtcaacacacaaggcgttcttcctggcatggtctggcaggacagagatgtgtacctgcaggggcccatctgggcaaagattcctcacacggacggacactttcacccttctcccctcatgggcggatttggattgaagcaccctcccccacagattctcatcaagaataccccggtacctgcgaatccttcgaccaccttcagtgcggcaaagtttgcttccttcatcacacagtattccacgggacaggtcagcgtggagatagagtgggagctgcagaaggagaacagcaaacgctggaaccccgagatccagtatacttccaactacaacaaatctgttaatgtggactttactgtggacactaatggtgtgtattcagagcctcgccccattggcaccagatacccgactcgtaatctgtaa

SEQ ID NO: 3492 - DNA, 2208 bp, synthetic construct
  misc_feature 1..2208: note = source = /note="Description of Artificial Sequence: Synthetic polynucleotide"
  source 1..2208: mol_type = other DNA
atggctgccgatggttatcttccagattggctcgaggacactctctctgaaggaataagacagtggtggaagctcaaacctggcccaccaccgccaaagcccgcagagcggcataaggacgacagcaggggtcttgtgcttcctgggtacaagtacctcggacccttcaacggactcgacaagggggagccggtcaacgaggcagacgccgcggccctcgagcacgacaaggcctacgaccggcagctcgacagcggagacaacccgtacctcaagtacaaccacgccgacgcggagtttcaggagcgtcttaaagaagatacgtcttttgggggcaacctcggacgagcagtcttccaggcgaaaaagagggttcttgaacctctgggcctggttgaggaacctgttaagacggctccgggaaaaaagaggccggtagagcactctcctgtggagccagactcctcctcgggaaccggaaaggcgggccagcagcctgcaagaaaaagattgaatttcggtcagactggagacgcagactccgtacctgacccccagcctctcggacagccaccagcagccccctctggtctgggaactaatacgatggctacaggcagtggcgcaccaatggcagacaataacgagggcgccgacggagtgggtaattcctcgggaaattggcattgcgattccacatggatgggcgacagagtcatcaccaccagcacccgcacctgggctctgcccacctacaacaaccatctgtacaagcaaatttccagccaatcaggagcatcgaacgacaaccactactttggctacagcaccccctgggggtattttgacttcaacagattccactgccacttttcgccacgtgactggcaaagactcatcaacaacaactggggattccggcccaagagactcagcttcaagctctttaacattcaagtcaaggaggtcacgcagaatgacggtacgacgacgattgccaataaccttaccagcacggttcaggtctttactgactcggagtaccagctcccgtacgtcctcggctcggcgcatcaaggatgcctcccgccgttcccagcagacgtcttcatggtgccacagtatggatacctcaccctgaacaacgggagtcaggcggtaggacgctcttcattttactgcctggagtacttcccttctcagatgcttcgcacgggaaacaactttaccttcagctacacctttgaggacgtgccttttcacagcagctacgctcacagccaaagtctggaccgtctcatgaatcctctcatcgaccaatacctgtattacttgagcaaaacaaacgctccaagcggaaccaccacgatgtccaggcttcagttttctcaggccggagcgagtgacattcgggaccagtctagaaactggcttcctggaccctgttaccgccagcagcgagtatcaaagacagctgcggacaacaacaacagtgattactcgtggactggagctaccaagtaccacctcaatggaagagactctctggtgaacccgggcccagctatggccagccacaaggatgatgaagaaaaatattttcctcagagcggggttctcatcttcgggaaacaaggctcaaataaaactaatgtggacattgaaaaggttatgattacagacgaagaggaaatcaggaccaccaatcccgtggctacggagcagtatggttctgtatctaccaaccttcaaagcggcaacacacaagcagctacctcagatgtcaacacacaaggcgttcttcctggcatggtctggcaggacagagatgtgtacctgcaggggcccatctgggcaaagattcctcacacggacggacactttcacccttctcccctcatgggcggatttggattgaagcaccctcccccacagattctcatcaagaataccccggtacctgcgaatccttcgaccaccttcagtgcggcaaagtttgcttccttcatcacacagtattccacgggacaggtcagcgtggagatagagtgggagctgcagaaggagaacagcaaacgctggaaccccgagatccagtatacttccaactacaacaaatctgttaatgtggactttactgtgggcactaatggtgtgtattcagagcctcgccccattggcaccagatacctgactcgtaatctgtaa

SEQ ID NO: 3493 - DNA, 2208 bp, synthetic construct
  misc_feature 1..2208: note = source = /note="Description of Artificial Sequence: Synthetic polynucleotide"
  source 1..2208: mol_type = other DNA
atggctgccgatggttatcttccagattggctcgaggacactctctctgaaggaataagacagtggtggaagctcaaacctggcccaccaccgccaaagcccgcagagcggcataaggacgacagcaggggtcttgtgcttcctgggtacaagtacctcggacccttcaacggactcgacaagggggagccggtcaacgaggcagacgccgcggccctcgagcacgacaaggcctacgaccggcagctcgacagcggagacaacccgtacctcaagtacaaccacgccgacgcggagtttcaggagcgtcttaaagaagatacgtcttttgggggcaacctcggacgagcagtcttccaggcgaaaaagagggttcttgaacctctgggcctggttgaggaacctgttaagacggctccgggaaaaaagaggccggtagagcactctcctgtggagccagactcctcctcgggaaccggaaaggcgggccagcagcctgcaagaaaaagattgaatttcggtcagactggagacgcagactccgtacctgacccccagcctctcggacagccaccagcagccccctctggtctgggaactaatacgatggctacaggcagtggcgcaccaatggcagacaataacgagggcgccgacggagtgggtaattcctcgggaaattggcattgcgattccacatggatgggcgacagagtcatcaccaccagcacccgcacctgggctctgcccacctacaacaaccatctgtacaagcaaatttccagccaatcaggagcatcgaacgacaaccactactttggctacagcaccccctgggggtattttgacttcaacagattccactgccacttttcgccacgtgactggcaaagactcatcaacaacaactggggattccggcccaagagactcagcttcaagctctttaacattcaagtcaaggaggtcacgcagaatgacggtacgacgacgattgccaataaccttaccagcacggttcaggtctttactgactcggagtaccagctcccgtacgtcctcggctcggcgcatcaaggatgcctcccgccgttcccagcagacgtcttcatggtgccacagtatggatacctcaccctgaacaacgggagtcaggcggtaggacgctcttcattttactgcctggagtacttcccttctcagatgcttcgcacgggaaacaactttaccttcagctacacctttgaggacgtgccttttcacagcagctacgctcacagccaaagtctggaccgtctcatgaatcctctcatcgaccaatacctgtattacttgagcaaaacaaacgctccaagcggaaccaccacgatgtccaggcttcagttttctcaggccggagcgagtgacattcgggaccagtctagaaactggcttcctggaccctgttaccgccagcagcgagtatcaaagacagctgcggacaacaacaacagtgattactcgtggactggagctaccaagtaccacctcaatggaagagactctctggtgaacccgggcccagctatggccagccacaaggatgatgaagaaaaatattttcctcagagcggggttctcatcttcgggaaacaaggctcaaataaaactaatgtggacattgaaaaggttatgattacagacgaagaggaaatcaggaccaccaatcccgtggctacggagcagtatggttctgtatctaccaaccttcaaagcggcaacacacaagcagctacctcagatgtcaacacacaaggcgttcttcctggcatggtctggcaggacagagatgtgtacctgcaggggcccatctgggcaaagattcctcacacggacggacactttcacccttctcccctcatgggcggatttggattgaagtaccctcccccacagattctcatcaagaataccccggtacctgcgaatccttcgaccaccttcagtgcggcaaagtttgcttccttcatcacacagtattccacgggacaggtcagcgtggagatagagtgggagctgcagaaggagaacagcaaacgctggaaccccgagatccagtatacttccaactacaacaaatctgttaatgtggactttactgtggacactaatggtgtgtattcagagcctcgccccattggcaccagatacctgactcgtaatctgtaa

SEQ ID NO: 3494 - DNA, 2208 bp, synthetic construct
  misc_feature 1..2208: note = source = /note="Description of Artificial Sequence: Synthetic polynucleotide"
  source 1..2208: mol_type = other DNA
atggctgccgatggttatcttccagattggctcgaggacactctctctgaaggaataagacagtggtggaagctcaaacctggcccaccaccgccaaagcccgcagagcggcataaggacgacagcaggggtcttgtgcttcctgggtacaagtacctcggacccttcaacggactcgacaagggggagccggtcaacgaggcagacgccgcggccctcgagcacgacaaggcctacgaccggcagctcgacagcggagacaacccgtacctcaagtacaaccacgccgacgcggagtttcaggagcgtcttaaagaagatacgtcttttgggggcaacctcggacgagcagtcttccaggcgaaaaagagggttcttgaacctctgggcctggttgaggaacctgttaagacggctccgggaaaaaagaggccggtagagcactctcctgtggagccagactcctcctcgggaaccggaaaggcgggccagcagcctgcaagaaaaagattgaatttcggtcagactggagacgcagactccgtacctgacccccagcctctcggacagccaccagcagccccctctggtctgggaactaatacgatggctacaggcagtggcgcaccaatggcagacaataacgagggcgccgacggagtgggtaattcctcgggaaattggcattgcgattccacatggatgggcgacagagtcatcaccaccagcacccgcacctgggctctgcccacctacaacaaccatctgtacaagcaaatttccggccaatcaggagcatcgaacgacaaccactactttggctacagcaccccctgggggtattttgacttcaacagattccactgccacttttcgccacgtgactggcaaagactcatcaacaacaactggggattccggcccaagagactcagcttcaagctctttaacattcaagtcaaggaggtcacgcagaatgacggtacgacgacgattgccaataaccttaccagcacggttcaggtctttactgactcggagtaccagctcccgtacgtcctcggctcggcgcatcaaggatgcctcccgccgttcccagcagacgtcttcatggtgccacagtatggatacctcaccctgaacaacgggagtcaggcggtaggacgctcttcattttactgcctggagtacttcccttctcagatgcttcgcacgggaaacaactttaccttcagctacacctttgaggacgtgccttttcacagcagctacgctcacagccaaagtctggaccgtctcatgaatcctctcatcgaccaatacctgtattacttgagcaaaacaaacgctccaagcggaaccaccacgatgtccaggcttcagttttctcaggccggagcgagtgacattcgggaccagtctagaaactggcttcctggaccctgttaccgccagcagcgagtatcaaagacagctgcggacaacaacaacagtgattactcgtggactggagctaccaagtaccacctcaatggaagagactctctggtgaacccgggcccagctatggccagccacaaggatgatgaagaaaaatattttcctcagagcggggttctcatcttcgggaaacaaggctcaaataaaactaatgtggacattgaaaaggttatgattacagacgaagaggaaatcaggaccaccaatcccgtggctacggagcagtatggttctgtatctaccaaccttcaaagcggcaacacacaagcagctacctcagatgtcaacacacaaggcgttcttcctggcatggtctggcaggacagagatgtgtacctgcaggggcccatctgggcaaagattcctcacacggacggacactttcacccttctcccctcatgggcggatttggattgaagcaccctcccccacagattctcatcaagaataccccggtacctgcgaatccttcgaccaccttcagtgcggcaaagtttgcttccttcatcacacagtattccacgggacaggtcagcgtggagatagagtgggagctgcagaaggagaacagcaaacgctggaaccccgagatccagtatacttccaactacaacaaatctgttaatgtggactttactgtggacactaatggtgtgtattcagagcctcgccccattggcaccagatacctgactcgtaatctgtaa

SEQ ID NO: 3495 - DNA, 2208 bp, synthetic construct
  misc_feature 1..2208: note = source = /note="Description of Artificial Sequence: Synthetic polynucleotide"
  source 1..2208: mol_type = other DNA
atggctgccgatggttatcttccagattggctcgaggacactctctctgaaggaataagacagtggtggaagctcaaacctggcccaccaccgccaaagcccgcagagcggcataaggacgacagcaggggtcttgtgcttcctgggtacaagtacctcggacccttcaacggactcgacaagggggagccggtcaacgaggcagacgccgcggccctcgagcacgacaaggcctacgaccggcagctcgacagcggagacaacccgtacctcaagtacaaccacgccgacgcggagtttcaggagcgtcttaaagaagatacgtcttttgggggcaacctcggacgagcagtcttccaggcgaaaaagagggttcttgaacctctgggcctggttgaggaacctgttaagacggctccgggaaaaaagaggccggtagagcactctcctgtggagccagactcctcctcgggaaccggaaaggcgggccagcagcctgcaagaaaaagattgaatttcggtcagactggagacgcagactccgtacctgacccccagcctctcggacagccaccagcagccccctctggtctgggaactaatacgatggctacaggcagtggcgcaccaatggcagacaataacgagggcgccgacggagtgggtaattcctcgggaaattggcattgcgattccacatggatgggcgacagagtcatcaccaccagcacccgcacctgggctctgcccacctacaacaaccatctgtacaagcaaatttccagccaatcaggagcatcgaacgacaaccactactttggctacagcaccccctgggggtattttgacttcaacagattccactgccacttttcgccacgtgactggcaaagactcatcaacaacaactggggattccggcccaagagactcagcttcaagctctttaacattcaagtcaaggaggtcacgcagaatgacggtacgacgacgattgccaataaccttaccagcacggttcaggtctttactgactcggagtaccggctcccgtacgtcctcggctcggcgcatcaaggatgcctcccgccgttcccagcagacgtcttcatggtgccacagtatggatacctcaccctgaacaacgggagtcaggcggtaggacgctcttcattttactgcctggagtacttcccttctcagatgcttcgcacgggaaacaactttaccttcagctacacctttgaggacgtgccttttcacagcagctacgctcacagccaaagtctggaccgtctcatgaatcctctcatcgaccaatacctgtattacttgagcaaaacaaacgctccaagcggaaccaccacgatgtccaggcttcagttttctcaggccggagcgagtgacattcgggaccagtctagaaactggcttcctggaccctgttaccgccagcagcgagtatcaaagacagctgcggacaacaacaacagtgattactcgtggactggagctaccaagtaccacctcaatggaagagactctctggtgaacccgggcccagctatggccagccacaaggatgatgaagaaaaatattttcctcagagcggggttctcatcttcgggaaacaaggctcaaataaaactaatgtggacattgaaaaggttatgattacagacgaagaggaaatcaggaccaccaatcccgtggctacggagcagtatggttctgtatctaccaaccttcaaagcggcaacacacaagcagctacctcagatgtcaacacacaaggcgttcttcctggcatggtctggcaggacagagatgtgtacctgcaggggcccatctgggcaaagattcctcacacggacggacactttcacccttctcccctcatgggcggatttggattgaagcaccctcccccacagattctcatcaagaataccccggtacctgcgaatccttcgaccaccttcagtgcggcaaagtttgcttccttcatcacacagtattccacgggacaggtcagcgtggagatagagtgggagctgcagaaggagaacagcaaacgctggaaccccgagatccagtatacttccaactacaacaaatctgttaatgtggactttactgtggacactaatggtgtgtattcagagcctcgccccattggcaccagatacctgactcgtaatctgtaa

SEQ ID NO: 3496 - DNA, 2208 bp, synthetic construct
  misc_feature 1..2208: note = source = /note="Description of Artificial Sequence: Synthetic polynucleotide"
  source 1..2208: mol_type = other DNA
atggctgccgatggttatcttccagattggctcgaggacactctctctgaaggaataagacagtggtggaagctcaaacctggcccaccaccgccaaagcccgcagagcggcataaggacgacagcaggggtcttgtgcttcctgggtacaagtacctcggacccttcaacggactcgacaagggggagccggtcaacgaggcagacgccgcggccctcgagcacgacaaggcctacgaccggcagctcgacagcggagacaacccgtacctcaagtacaaccacgccgacgcggagtttcaggagcgtcttaaagaagatacgtcttttgggggcaacctcggacgagcagtcttccaggcgaaaaagagggttcttgaacctctgggcctggttgaggaacctgttaagacggctccgggaaaaaagaggccggtagagcactctcctgtggagccagactcctcctcgggaaccggaaaggcgggccagcagcctgcaagaaaaagattgaatttcggtcagactggagacgcagactccgtacctgacccccagcctctcggacagccaccagcagccccctctggtctgggaactaatacgatggctacaggcagtggcgcaccaatggcagacaataacgagggcgccgacggagtgggtaattcctcgggaaattggcattgcgattccacatggatgggcgacagagtcatcaccaccagcacccgcacctgggctctgcccacctacaacaaccatctgtacaagcaaatttccagccaatcaggagcatcgaacgacaaccactactttggctacagcaccccctgggggtattttgacttcaacagattccactgccacttttcgccacgtgactggcaaagactcatcaacaacaactggggattccggcccaagagactcagcttcaagctctttaacattcaagtcaaggaggtcacgcagaatgacggtacgacgacgattgccaataaccttaccagcacggttcaggtctttactgactcggagtaccagctcccgtacgtcctcggctcggcgcatcgaggatgcctcccgccgttcccagcagacgtcttcatggtgccacagtatggatacctcaccctgaacaacgggagtcaggcggtaggacgctcttcattttactgcctggagtacttcccttctcagatgcttcgcacgggaaacaactttaccttcagctacacctttgaggacgtgccttttcacagcagctacgctcacagccaaagtctggaccgtctcatgaatcctctcatcgaccaatacctgtattacttgagcaaaacaaacgctccaagcggaaccaccacgatgtccaggcttcagttttctcaggccggagcgagtgacattcgggaccagtctagaaactggcttcctggaccctgttaccgccagcagcgagtatcaaagacagctgcggacaacaacaacagtgattactcgtggactggagctaccaagtaccacctcaatggaagagactctctggtgaacccgggcccagctatggccagccacaaggatgatgaagaaaaatattttcctcagagcggggttctcatcttcgggaaacaaggctcaaataaaactaatgtggacattgaaaaggttatgattacagacgaagaggaaatcaggaccaccaatcccgtggctacggagcagtatggttctgtatctaccaaccttcaaagcggcaacacacaagcagctacctcagatgtcaacacacaaggcgttcttcctggcatggtctggcaggacagagatgtgtacctgcaggggcccatctgggcaaagattcctcacacggacggacactttcacccttctcccctcatgggcggatttggattgaagcaccctcccccacagattctcatcaagaataccccggtacctgcgaatccttcgaccaccttcagtgcggcaaagtttgcttccttcatcacacagtattccacgggacaggtcagcgtggagatagagtgggagctgcagaaggagaacagcaaacgctggaaccccgagatccagtatacttccaactacaacaaatctgttaatgtggactttactgtggacactaatggtgtgtattcagagcctcgccccattggcaccagatacctgactcgtaatctgtaa

SEQ ID NO: 3497 - DNA, 2208 bp, synthetic construct
  misc_feature 1..2208: note = source = /note="Description of Artificial Sequence: Synthetic polynucleotide"
  source 1..2208: mol_type = other DNA
atggctgccgatggttatcttccagattggctcgaggacactctctctgaaggaataagacagtggtggaagctcaaacctggcccaccaccgccaaagcccgcagagcggcataaggacgacagcaggggtcttgtgcttcctgggtacaagtacctcggacccttcaacggactcgacaagggggagccggtcaacgaggcagacgccgcggccctcgagcacgacaaggcctacgaccggcagctcgacagcggagacaacccgtacctcaagtacaaccacgccgacgcggagtttcaggagcgtcttaaagaagatacgtcttttgggggcaacctcggacgagcagtcttccaggcgaaaaagagggttcttgaacctctgggcctggttgaggaacctgttaagacggctccgggaaaaaagaggccggtagagcactctcctgtggagccagactcctcctcgggaaccggaaaggcgggccagcagcctgcaagaaaaagattgaatttcggtcagactggagacgcagactccgtacctgacccccagcctctcggacagccaccagcagccccctctggtctgggaactaatacgatggctacaggcagtggcgcaccaatggcagacaataacgagggcgccgacggagtgggtaattcctcgggaaattggcattgcgattccacatggatgggcgacagagtcatcaccaccagcacccgcacctgggctctgcccacctacaacaaccatctgtacaagcaaatttccagccaatcaggagcatcgaacgacaaccactactttggctacagcaccccctgggggtattttgacttcaacagattccactgccacttttcgccacgtgactggcaaagactcatcaacaacaactggggattccggcccaagagactcagcttcaagctctttaacattcaagtcaaggaggtcacgcagaatgacggtacgacgacgattgccaataaccttaccagcacggttcaggtctttactgactcggagtaccagctcccgtacgtcctcggctcggcgcatcaaggatgcctcccgccgttcccagcagacgtcttcatggtgccacagtatggatacctcaccctgaacaacgggagtcaggcggtaggacgctcttcattttactgcctggagtacttcccttctcagatgcttcgcgcgggaaacaactttaccttcagctacacctttgaggacgtgccttttcacagcagctacgctcacagccaaagtctggaccgtctcatgaatcctctcatcgaccaatacctgtattacttgagcaaaacaaacgctccaagcggaaccaccacgatgtccaggcttcagttttctcaggccggagcgagtgacattcgggaccagtctagaaactggcttcctggaccctgttaccgccagcagcgagtatcaaagacagctgcggacaacaacaacagtgattactcgtggactggagctaccaagtaccacctcaatggaagagactctctggtgaacccgggcccagctatggccagccacaaggatgatgaagaaaaatattttcctcagagcggggttctcatcttcgggaaacaaggctcaaataaaactaatgtggacattgaaaaggttatgattacagacgaagaggaaatcaggaccaccaatcccgtggctacggagcagtatggttctgtatctaccaaccttcaaagcrgcaacacacaagcagctacctcagatgtcaacacacaaggcgttcttcctggcatggtctggcaggacagagatgtgtacctgcaggggcccatctgggcaaagattcctcacacggacggacactttcacccttctcccctcatgggcggatttggattgaagcaccctcccccacagattctcatcaagaataccccggtacctgcgaatccttcgaccaccttcagtgcggcaaagtttgcttccttcatcacacagtattccacgggacaggtcagcgtggagatagagtgggagctgcagaaggagaacagcaaacgctggaaccccgagatccagtatacttccaactacaacaaatctgttaatgtggactttactgtggacactaatggtgtgtattcagagcctcgccccattggcaccagatacctgactcgtaatctgtaa

SEQ ID NO: 3498 - DNA, 2208 bp, synthetic construct
  misc_feature 1..2208: note = source = /note="Description of Artificial Sequence: Synthetic polynucleotide"
  source 1..2208: mol_type = other DNA
atggctgccgatggttatcttccagattggctcgaggacactctctctgaaggaataagacagtggtggaagctcaaacctggcccaccaccgccaaagcccgcagagcggcataaggacgacagcaggggtcttgtgcttcctgggtacaagtacctcggacccttcaacggactcgacaagggggagccggtcaacgaggcagacgccgcggccctcgagcacgacaaggcctacgaccggcagctcgacagcggagacaacccgtacctcaagtacaaccacgccgacgcggagtttcaggagcgtcttaaagaagatacgtcttttgggggcaacctcggacgagcagtcttccaggcgaaaaagagggttcttgaacctctgggcctggttgaggaacctgttaagacggctccgggaaaaaagaggccggtagagcactctcctgtggagccagactcctcctcgggaaccggaaaggcgggccagcagcctgcaagaaaaagattgaatttcggtcagactggagacgcagactccgtacctgacccccagcctctcggacagccaccagcagccccctctggtctgggaactaatacgatggctacaggcagtggcgcaccaatggcagacaataacgagggcgccgacggagtgggtaattcctcgggaaattggcattgcgattccacatggatgggcgacagagtcatcaccaccagcacccgcacctgggctctgcccacctacaacaaccatctgtacaagcaaatttccagccaatcaggagcatcgaacgacaaccactactttggctacagcaccccctgggggtattttgacttcaacagattccactgccacttttcgccacgtgactggcaaagactcatcaacaacaactggggattccggcccaagagactcggcttcaagctctttaacattcaagtcaaggaggtcacgcagaatgacggtacgacgacgattgccaataaccttaccagcacggttcaggtctttactgactcggagtaccagctcccgtacgtcctcggctcggcgcatcaaggatgcctcccgccgttcccagcagacgtcttcatggtgccacagtatggatacctcaccctgaacaacgggagtcaggcggtaggacgctcttcattttactgcctggagtacttcccttctcagatgcttcgcacgggaaacaactttaccttcagctacacctttgaggacgtgccttttcacagcagctacgctcacagccaaagtctggaccgtctcatgaatcctctcatcgaccaatacctgtattacttgagcaaaacaaacgctccaagcggaaccaccacgatgtccaggcttcagttttctcaggccggagcgagtgacattcgggaccagtctagaaactggcttcctggaccctgttaccgccagcagcgagtatcaaagacagctgcggacaacaacaacagtgattactcgtggactggagctaccaagtaccacctcaatggaagagactctctggtgaacccgggcccagctatggccagccacaaggatgatgaagaaaaatattttcctcagagcggggttctcatcttcgggaaacaaggctcaaataaaactaatgtggacattgaaaaggttatgattacagacgaagaggaaatcaggaccaccaatcccgtggctacggagcagtatggttctgtatctaccaaccttcaaagcggcaacacacaagcagctacctcagatgtcaacacacaaggcgttcttcctggcatggtctggcaggacagagatgtgtacctgcaggggcccatctgggcaaagattcctcacacggacggacactttcacccttctcccctcatgggcggatttggattgaagcaccctcccccacagattctcatcaagaataccccggtacctgcgaatccttcgaccaccttcagtgcggcaaagtttgcttccttcatcacacagtattccacgggacaggtcagcgtggagatagagtgggagctgcagaaggagaacagcaaacgctggaaccccgagatccagtatacttccaactacaacaaatctgttaatgtggactttactgtggacactaatggtgtgtattcagagcctcgccccattggcaccagatacctgactcgtaatctgtaa

SEQ ID NO: 3499 - DNA, 2208 bp, synthetic construct
  misc_feature 1..2208: note = source = /note="Description of Artificial Sequence: Synthetic polynucleotide"
  source 1..2208: mol_type = other DNA
atggctgccgatggttatcttccagattggctcgaggacactctctctgaaggaataagacagtggtggaagctcaaacctggcccaccaccgccaaagcccgcagagcggcataaggacgacagcaggggtcttgtgcttcctgggtacaagtacctcggacccttcaacggactcgacaagggggagccggtcaacgaggcagacgccgcggccctcgagcacgacaaggcctacgaccggcagctcgacagcggagacaacccgtacctcaagtacaaccacgccgacgcggagtttcaggagcgtcttaaagaagatacgtcttttgggggcaacctcggacgagcagtcttccaggcgaaaaagagggttcttgaacctctgggcctggttgaggaacctgttaagacggctccgggaaaaaagaggccggtagagcactctcctgtggagccagactcctcctcgggaaccggaaaggcgggccagcagcctgcaagaaaaagattgaatttcggtcagactggagacgcagactccgtacctgacccccagcctctcggacagccaccagcagccccctctggtctgggaactaatacgatggctacaggcagtggcgcaccaatggcagacaataacgagggcgccgacggagtgggtaattcctcgggaaattggcattgcgattccacatggatgggcgacagagtcatcaccaccagcacccgcacctgggctctgcccacctacaacaaccatctgtacaagcaaatttccagccaatcaggagtatcgaacgacaaccactactttggctacagcaccccctgggggtattttgacttcaacagattccactgccacttttcgccacgtgactggcaaagactcatcaacaacaactggggattccggcccaagagactcagcttcaagctctttaacattcaagtcaaggaggtcacgcagaatgacggtacgacgacgattgccaataaccttaccagcacggttcaggtctttactgactcggagtaccagctcccgtacgtcctcggctcggcgcatcaaggatgcctcccgccgttcccagcagacgtcttcatggtgccacagtatggatacctcaccctgaacaacgggagtcaggcggtaggacgctcttcattttactgcctggagtacttcccttctcagatgcttcgcacgggaaacaactttaccttcagctacacctttgaggacgtgccttttcacagcagctacgctcacagccaaagtctggaccgtctcatgaatcctctcatcgaccaatacctgtattacttgagcaaaacaaacgctccaagcggaaccaccacgatgtccaggcttcagttttctcaggccggagcgagtgacattcgggaccagtctagaaactggcttcctggaccctgttaccgccagcagcgagtatcaaagacagctgcggacaacaacaacagtgattactcgtggactggagctaccaagtaccacctcaatggaagagactctctggtgaacccgggcccagctatggccagccacaaggatgatgaagaaaaatattttcctcagagcggggttctcatcttcgggaaacaaggctcaaataaaactaatgtggacattgaaaaggttatgattacagacgaagaggaaatcaggaccaccaatcccgtggctacggagcagtatggttctgtatctaccaaccttcaaagcggcaacacacaagcagctacctcagatgtcaacacacaaggcgttcttcctggcatggtctggcaggacagagatgtgtacctgcaggggcccatctgggcaaagattcctcacacggacggacactttcacccttctcccctcatgggcggatttggattgaagcaccctcccccacagattctcatcaagaataccccggtacctgcgaatccttcgaccaccttcagtgcggcaaagtttgcttccttcatcacacagtattccacgggacaggtcagcgtggagatagagtgggagctgcagaaggagaacagcaaacgctggaaccccgagatccagtatacttccaactacaacaaatctgttaatgtggactttactgtggacactaatggtgtgtattcagagcctcgccccattggcaccagatacctgactcgtaatctgtaa

SEQ ID NO: 3500 - DNA, 2208 bp, synthetic construct
  misc_feature 1..2208: note = source = /note="Description of Artificial Sequence: Synthetic polynucleotide"
  source 1..2208: mol_type = other DNA
atggctgccgatggttatcttccagattggctcgaggacactctctctgaaggaataagacagtggtggaagctcaaacctggcccaccaccgccaaagcccgcagagcggcataaggacgacagcaggggtcttgtgcttcctgggtacaagtacctcggacccttcaacggactcgacaagggggagccggtcaacgaggcagacgccgcggccctcgagcacgacaaggcctacgaccggcagctcgacagcggagacaacccgtacctcaagtacaaccacgccgacgcggagtttcaggagcgtcttaaagaagatacgtcttttgggggcaacctcggacgagcagtcttccaggcgaaaaagagggttcttgaacctctgggcctggttgaggaacctgttaagacggctccgggaaaaaagaggccggtagagcactctcctgtggagccagactcctcctcgggaaccggaaaggcgggccagcagcctgcaagaaaaagattgaatttcggtcagactggagacgcagactccgtacctgacccccagcctctcggacagccaccagcagccccctctggtctgggaactaatacgatggctacaggcagtggcgcaccaatggcagacaataacgagggcgccgacggagtgggtaattcctcgggaaattggcattgcgattccacatggatgggcgacagagtcatcaccaccagcacccgcacctgggctctgcccacctacaacaaccatctgtacaagcaaatttccagccaatcaggagcatcgaacgacaaccactactttggctacagcaccccctgggggtattttgacttcaacagattccactgccacttttcgccacgtgactggcaaagactcatcaacaacaactggggattccggcccaagagactcagcttcaagctctttaacattcaagtcaaggaggtcacgcagaatgacggtacgacgacgattgccaataaccttaccagcacggttcaggtctttactgactcggagtaccagctcccgtacgtcctcggctcggcgcatcaaggatgcctcccgccgttcccagcagacgtcttcatggtgccacagtatggatacctcaccctgaacaacgggagtcaggcggtaggacgctcttcattttactgcctggagtacttcccttctcagatgcttcgcacgggaaacaactttaccttcagctacacctttgaggacgtgccttttcacagcagctacgctcacagccaaagtctggaccgtctcatgaatcctctcatcgaccaatacctgtattacttgagcaaaacaaacgctccaagcggaaccaccacgatgtccaggcttcagttttctcaggccggagcgagtgacattcgggaccagtctagaaactggcttcctggaccctgttaccgccagcagcgagtatcaaagacagctgcggacaacaacaacagtgattactcgtggactggagctaccaagtaccacctcaatggaagagactctctggtgaacccgggcccagctatggccagccacaaggatgatgaagaaaaatattttcctcagagcggggttctcatcttcgggaaacaaggctcaaataaaactaatgtggacattgaaaaggttatgattacagacgaagaggaaatcaggaccaccaatcccatggctacggagcagtatggttctgtatctaccaaccttcaaagcggcaacacacaagcagctacctcagatgtcaacacacaaggcgttcttcctggcatggtctggcaggacagagatgtgtacctgcaggggcccatctgggcaaagattcctcacacggacggacactttcacccttctcccctcatgggcggatttggattgaagcaccctcccccacagattctcatcaagaataccccggtacctgcgaatccttcgaccaccttcagtgcggcaaagtttgcttccttcatcacacagtattccacgggacaggtcagcgtggagatagagtgggagctgcagaaggagaacagcaaacgctggaaccccgagatccagtatacttccaactacaacaaatctgttaatgtggactttactgtggacactaatggtgtgtattcagagcctcgccccattggcaccagatacctgactcgtaatctgtaa

SEQ ID NO: 3501 - DNA, 2208 bp, synthetic construct
  misc_feature 1..2208: note = source = /note="Description of Artificial Sequence: Synthetic polynucleotide"
  source 1..2208: mol_type = other DNA
atggctgccgatggttatcttccagattggctcgaggacactctctctgaaggaataagacagtggtggaagctcaaacctggcccaccaccgccaaagcccgcagagcggcataaggacgacagcaggggtcttgtgcttcctgggtacaagtacctcggacccttcaacggactcgacaagggggagccggtcaacgaggcagacgccgcggccctcgagcacgacaaggcctacgaccggcagctcgacagcggagacaacccgtacctcaagtacaaccacgccgacgcggagtttcaggagcgtcttaaagaagatacgtcttttgggggcaacctcggacgagcagtcttccaggcgaaaaagagggttcttgaacctctgggcctggttgaggaacctgttaagacggctccgggaaaaaagaggccgatagagcactctcctgtggagccagactcctcctcgggaaccggaaaggcgggccagcagcctgcaagaaaaagattgaatttcggtcagactggagacgcagactccgtacctgacccccagcctctcggacagccaccagcagccccctctggtctgggaactaatacgatggctacaggcagtggcgcaccaatggcagacaataacgagggcgccgacggagtgggtaattcctcgggaaattggcattgcgattccacatggatgggcgacagagtcatcaccaccagcacccgcacctgggctctgcccacctacaacaaccatctgtacaagcaaatttccagccaatcaggagcatcgaacgacaaccactactttggctacagcaccccctgggggtattttgacttcaacagattccactgccacttttcgccacgtgactggcaaagactcatcaacaacaactggggattccggcccaagagactcagcttcaagctctttaacattcaagtcaaggaggtcacgcagaatgacggtacgacgacgattgccaataaccttaccagcacggttcaggtctttactgactcggagtaccagctcccgtacgtcctcggctcggcgcatcaaggatgcctcccgccgttcccagtagacgtcttcatggtgccacagtatggatacctcaccctgaacaacgggagtcaggcggtaggacgctcttcattttactgcctggagtacttcccttctcagatgcttcgcacgggaaacaactttaccttcagctacacctttgaggacgtgccttttcacagcagctacgctcacagccaaagtctggaccgtctcatgaatcctctcatcgaccaatacctgtattacttgagcaaaacaaacgctccaagcggaaccaccacgatgtccaggcttcagttttctcaggccggagcgagtgacattcgggaccagtctagaaactggcttcctggaccctgttaccgccagcagcgagtatcaaagacagctgcggacaacaacaacagtgattactcgtggactggagctaccaagtaccacctcaatggaagagactctctggtgaacccgggcccagctatggccagccacaaggatgatgaagaaaaatattttcctcagagcggggttctcatcttcgggaaacaaggctcaaataaaactaatgtggacattgaaaaggttatgattacagacgaagaggaaatcaggaccaccaatcccgtggctacggagcagtatggttctgtatctaccaaccttcaaagcggcaacacacaagcagctacctcagatgtcaacacacaaggcgttcttcctggcatggtctggcaggacagagatgtgtacctgcaggggcccatctgggcaaagattcctcacacggacggacactttcacccttctcccctcatgggcggatttggattgaagcaccctcccccacagattctcatcaagaataccccggtacctgcgaatccttcgaccaccttcagtgcggcaaagtttgcttccttcatcacacagtattccacgggacaggtcagcgtggagatagagtgggagctgcagaaggagaacagcaaacgctggaaccccgagatccagtatacttccaactacaacaaatctgttaatgtggactttactgtggacactaatggtgtgtattcagagcctcgccccattggcaccagatacctgactcgtaatctgtaa

SEQ ID NO: 3502 - DNA, 2208 bp, synthetic construct
  misc_feature 1..2208: note = source = /note="Description of Artificial Sequence: Synthetic polynucleotide"
  source 1..2208: mol_type = other DNA
atggctgccgatggttatcttccagattggctcgaggacactctctctgaaggaataagacagtggtggaagctcaaacctggcccaccaccgccaaagcccgcagagcggcataaggacgacagcaggggtcttgtgcttcctgggtacaagtacctcggacccttcaacggactcgacaagggggagccggtcaacgaggcagacgccgcggccctcgagcacgacaaggcctacgaccggcagctcgacagcggagacaacccgtacctcaagtacaaccacgccgacgcggagtttcaggagcgtcttaaagaagatacgtcttttgggggcaacctcggacgagcagtcttccaggcgaaaaagagggttcttgaacctctgggcctggttgaggaacctgttaagacggctccgggaaaaaagaggccggtagagcactctcctgtggagccagactcctcctcgggaaccggaaaggcgggccagcagcctgcaagaaaaagattgaatttcggtcagactggagacgcagactccgtacctgacccccagcctctcggacagccaccagcagccccctctggtctgggaactaatacgatgactacaggcagtggcgcaccaatggcagacaataacgagggcgccgacggagtgggtaattcctcgggaaattggcattgcgattccacatggatgggcgacagagtcatcaccaccagcacccgcacctgggctctgcccacctacaacaaccatctgtacaagcaaatttccagccaatcaggagcatcgaacgacaaccactactttggctacagcaccccctgggggtattttgacttcaacagattccactgccacttttcgccacgtgactggcaaagactcatcaacaacaactggggattccggcccaagagactcagcttcaagctctttaacattcaagtcaaggaggtcacgcagaatgacggtacgacgacgattgccaataaccttaccagcacggttcaggtctttactgactcggagtaccagctcccgtacgtcctcggctcggcgcatcaaggatgcctcccgccgttcccagcagacgtcttcatggtgccacagtatggatacctcaccctgaacaacgggagtcaggcggtaggacgctcttcattttactgcctggagtacttcccttctcagatgcttcgcacgggaaacaactttaccttcagctacacctttgaggacgtgccttttcacagcagctacgctcacagccaaagtctggaccgtctcatgaatcctctcatcgaccaatacctgtattacttgagcaaaacaaacgctccaagcggaaccaccacgatgtccaggcttcagttttctcaggccggagcgagtgacattcgggaccagtctagaaactggcttcctggaccctgttaccgccagcagcgagtatcaaagacagctgcggacaacaacaacagtgattactcgtggactggagctaccaagtaccacctcaatggaagagactctctggtgaacccgggcccagctatggccagccacaaggatgatgaagaaaaatattttcctcagagcggggttctcatcttcgggaaacaaggctcaaataaaactaatgtggacattgaaaaggttatgattacagacgaagaggaaatcaggaccaccaatcccgtggctacggagcagtatggttctgtatctaccaaccttcaaagcggcaacacacaagcagctacctcagatgtcaacacacaaggcgttcttcctggcatggtctggcaggacagagatgtgtacctgcaggggcccatctgggcaaagattcctcacacggacggacactttcacccttctcccctcatgggcggatttggattgaagcaccctcccccacagattctcatcaagaataccccggtacctgcgaatccttcgaccaccttcagtgcggcaaagtttgcttccttcatcacacagtattccacgggacaggtcagcgtggagatagagtgggagctgcagaaggagaacagcaaacgctggaaccccgagatccagtatacttccaactacaacaaatctgttaatgtggactttactgtggacactaatggtgtgtattcagagcctcgccccattggcaccagatacctgactcgtaatctgtaa

SEQ ID NO: 3503 - DNA, 2208 bp, synthetic construct
  misc_feature 1..2208: note = source = /note="Description of Artificial Sequence: Synthetic polynucleotide"
  source 1..2208: mol_type = other DNA
atggctgccgatggttatcttccagattggctcgaggacactctctctgaaggaataagacagtggtggaagctcaaacctggcccaccaccgccaaagcccgcagagcggcataaggacgacagcaggggtcttgtgcttcctgggtacaagtacctcggacccttcaacggactcgacaagggggagccggtcaacgaggcagacgccgcggccctcgagcacgacaaggcctacgaccggcagctcgacagcggagacaacccgtacctcaagtacaaccacgccgacgcggagtttcaggagcgtcttaaagaagatacgtcttttgggggcaacctcggacgagcagtcttccaggcgaaaaagagggttcttgaacctctgggcctggttgaggaacctgttaagacggctccgggaaaaaagaggtcggtagagcactctcctgtggagccagactcctcctcgggaaccggaaaggcgggccagcagcctgcaagaaaaagattgaatttcggtcagactggagacgcagactccgtacctgacccccagcctctcggacagccaccagcagccccctctggtctgggaactaatacgatggctacaggcagtggcgcaccaatggcagacaataacgagggcgccgacggagtgggtaattcctcgggaaattggcattgcgattccacatggatgggcgacagagtcatcaccaccagcacccgcacctgggctctgcccacctacaacaaccatctgtacaagcaaatttccagccaatcaggagcatcgaacgacaaccactactttggctacagcaccccctgggggtattttgacttcaacagattccactgccacttttcgccacgtgactggcaaagactcatcaacaacaactggggattccggcccaagagactcagcttcaagctctttaacattcaagtcaaggaggtcacgcagaatgacggtacgacgacgattgccaataaccttaccagcacggttcaggtctttactgactcggagtaccagctcccgtacgtcctcggctcggcgcatcaaggatgcctcccgccgttcccagcagacgtcttcatggtgccacagtatggatacctcaccctgaacaacgggagtcaggcggtaggacgctcttcattttactgcctggagtacttcccttctcagatgcttcgcacgggaaacaactttaccttcagctacacctttgaggacgtgccttttcacagcagctacgctcacagccaaagtctggaccgtctcatgaatcctctcatcgaccaatacctgtattacttgagcaaaacaaacgctccaagcggaaccaccacgatgtccaggcttcagttttctcaggccggagcgagtgacattcgggaccagtctagaaactggcttcctggaccctgttaccgccagcagcgagtatcaaagacagctgcggacaacaacaacagtgattactcgtggactggagctaccaagtaccacctcaatggaagagactctctggtgaacccgggcccagctatggccagccacaaggatgatgaagaaaaatattttcctcagagcggggttctcatcttcgggaaacaaggctcaaataaaactaatgtggacattgaaaaggttatgattacagacgaagaggaaatcaggaccaccaatcccgtggctacggagcagtatggttctgtatctaccaaccttcaaagcggcaacacacaagcagctacctcagatgtcaacacacaaggcgttcttcctggcatggtctggcaggacagagatgtgtacctgcaggggcccatctgggcaaagattcctcacacggacggacactttcacccttctcccctcatgggcggatttggattgaagcaccctcccccacagattctcatcaagaataccccggtacctgcgaatccttcgaccaccttcagtgcggcaaagtttgcttccttcatcacacagtattccacgggacaggtcagcgtggagatagagtgggagctgcagaaggagaacagcaaacgctggaaccccgagatccagtatacttccaactacaacaaatctgttaatgtggactttactgtggacactaatggtgtgtattcagagcctcgccccattggcaccagatacctgactcgtaatctgtaa

SEQ ID NO: 3504 - DNA, 2208 bp, synthetic construct
  misc_feature 1..2208: note = source = /note="Description of Artificial Sequence: Synthetic polynucleotide"
  source 1..2208: mol_type = other DNA
atggctgccgatggttatcttccagattggctcgaggacactctctctgaaggaataagacagtggtggaagctcaaacctggcccaccaccgccaaagcccgcagagcggcataaggacgacagcaggggtcttgtgcttcctgggtacaagtacctcggacccttcaacggactcgacaagggggagccggtcaacgaggcagacgccgcggccctcgagcacgacaaggcctacgaccggcagctcgacagcggagacaacccgtacctcaagtacaaccacgccgacgcggagtttcaggagcgtcttaaagaagatacgtcttttgggggcaacctcggacgagcagtcttccaggcgaaaaagagggttcttgaacctctgggcctggttgaggaacctgttaagacggctccgggaaaaaagaggccggtagagcactctcctgtggagccagactcctcctcgggaaccggaaaggcgggccagcagcctgcaagaaaaagattgaatttcggtcagactggagacgcagactccgtacctgacccccagcctctcggacagccaccagcagccccctctggtctgggaactaatacgatggctacaggcagtggcgcaccaatggcagacaataacgagggcgccgacggagtgggtaattcctcgggaaattggcattgcgattccacatggatgggcgacagagtcatcaccaccagcacccgcacctgggctctgcccacctacaacaaccatctgtacaagcaaatttccagccaatcaggagcatcgaacgacaaccactactttggctacagcaccccctgggggtattttgacttcaacagattccactgccacttttcgccacgtgactggcaaagactcatcaacaacaactggggattccggcccaagagactcagcttcaagctctttaacattcaagtcaaggaggtcacgcagaatgacggtacgacgacgattgccaataaccttaccagcacggttcaggtctttactgactcggagtaccagctcccgtacgtcctcggctcggcgcatcaaggatgcctcccgccgttcccagcagacgtcttcgtggtgccacagtatggatacctcaccctgaacaacgggagtcaggcggtaggacgctcttcattttactgcctggagtacttcccttctcagatgcttcgcacgggaaacaactttaccttcagctacacctttgaggacgtgccttttcacagcagctacgctcacagccaaagtctggaccgtctcatgaatcctctcatcgaccaatacctgtattacttgagcaaaacaaacgctccaagcggaaccaccacgatgtccaggcttcagttttctcaggccggagcgagtgacattcgggaccagtctagaaactggcttcctggaccctgttaccgccagcagcgagtatcaaagacagctgcggacaacaacaacagtgattactcgtggactggagctaccaagtaccacctcaatggaagagactctctggtgaacccgggcccagctatggccagccacaaggatgatgaagaaaaatattttcctcagagcggggttctcatcttcgggaaacaaggctcaaataaaactaatgtggacattgaaaaggttatgattacagacgaagaggaaatcaggaccaccaatcccgtggctacggagcagtatggttctgtatctaccaaccttcaaagcggcaacacacaagcagctacctcagatgtcaacacacaaggcgttcttcctggcatggtctggcaggacagagatgtgtacctgcaggggcccatctgggcaaagattcctcacacggacggacactttcacccttctcccctcatgggcggatttggattgaagcaccctcccccacagattctcatcaagaataccccggtacctgcgaatccttcgaccaccttcagtgcggcaaagtttgcttccttcatcacacagtattccacgggacaggtcggcgtggagatagagtgggagctgcagaaggagaacagcaaacgctggaaccccgagatccagtatacttccaactacaacaaatctgttaatgtggactttactgtggacactaatggtgtgtattcagagcctcgccccattggcaccagatacctgactcgtaatctgtaa

SEQ ID NO: 3505 - DNA, 2208 bp, synthetic construct
  misc_feature 1..2208: note = source = /note="Description of Artificial Sequence: Synthetic polynucleotide"
  source 1..2208: mol_type = other DNA
atggctgccgatggttatcttccagattggctcgaggacactctctctgaaggaataagacagtggtggaagctcaaacctggcccaccaccgccaaagcccgcagagcggcataaggacgacagcaggggtcttgtgcttcctgggtacaagtacctcggacccttcaacggactcgacaagggggagccggtcaacgaggcagacgccgcggccctcgagcacgacaaggcctacgaccggcagctcgacagcggagacaacccgtacctcaagtacaaccacgccgacgcggagtttcaggagcgtcttaaagaagatacgtcttttgggggcaacctcggacgagcagtcttccaggcgaaaaagagggttcttgaacctctgggcctggttgaggaacctgttaagacggctccgggaaaaaagaggccggtagagcactctcctgtggagccagactcctcctcgggaaccggaaaggcgggccagcagcctgcaagaaaaagattgaatttcggtcagactggagacgcagactccgtacctgacccccagcctctcggacagccaccagcagccccctctggtctgggaactaatacgatggctacaggcagtggcgcaccaatggcagacaataacgagggcgccgacggagtgggtaattcctcgggaaattggcattgcgattccacatggatgggcgacagagtcatcaccaccagcacccgcacctgggctctgcccacctacaacaaccatctgtacaagcaaatttccagccaatcaggagcatcgaacgacaaccactactttggctacagcaccccctgggggtattttgacttcaacagattccactgccacttttcgccacgtgactggcaaagactcatcaacaacaactggggattccggcccaagagactcagcttcaagctctttaacattcaagtcaaggaggtcacgcagaatgacggtacgacgacgattgccaataaccttaccagcacggttcaggtctttactgactcggagtaccagctcccgtacgtcctcggctcggcgcatcaaggatgcctcccgccgttcccagcagacgtcttcatggtgccacagtatggatacctcaccctgaacaacgggagtcaggcggtaggacgctcttcattttactgcctggagtacttcccttctcagatgcttcgcacgggaaacaactttaccttcagctacacctttgaggacgtgccttttcacagcagctacgctcacagccaaagtctggaccgtctcatgaatcctctcatcgaccaatacctgtattacttgagcaaaacaaacgctccaagcggaaccaccgcgatgtccaggcttcagttttctcaggccggagcgagtgacattcgggaccagtctagaaactggcttcctggaccctgttaccgccagcagcgagtatcaaagacagctgcggacaacaacaacagtgattactcgtggactggagctaccaagtaccacctcaatggaagagactctctggtgaacccgggcccagctatggccagccacaaggatgatgaagaaaaatattttcctcagagcggggttctcatcttcgggaaacaaggctcaaataaaactaatgtggacattgaaaaggttatgattacagacgaagaggaaatcaggaccaccaatcccgtggctacggagcagtatggttctgtatctaccaaccttcaaagcggcaacacacaagcagctacctcagatgtcaacacacaaggcgttcttcctggcatggtctggcaggacagagatgtgtacctgcaggggcccatctgggcaaagattcctcacacggacggacactttcacccttctcccctcatgggcggatttggattgaagcaccctcccccacagattctcatcaagaataccccggtacctgcgaatccttcgaccaccttcagtgcggcaaagtttgcttccttcatcacacagtattccacgggacaggtcagcgtggagatagagtgggagctgcagaaggagaacagcaaacgctggaaccccgagatccagtatacttccaactacaacaaatctgttaatgtggactttactgtggacactaatggtgtgtattcagagcctcgccccattggcaccagatacctgactcgtaatctgtaa

SEQ ID NO: 3506 - DNA, 2208 bp, synthetic construct
  misc_feature 1..2208: note = source = /note="Description of Artificial Sequence: Synthetic polynucleotide"
  source 1..2208: mol_type = other DNA
atggctgccgatggttatcttccagattggctcgaggacactctctctgaaggaataagacagtggtggaagctcaaacctggcccaccaccgccaaagcccgcagagcggcataaggacgacagcaggggtcttgtgcttcctgggtacaagtacctcggacccttcaacggactcgacaagggggagccggtcaacgaggcagacgccgcggccctcgagcacgacaaggcctacgaccggcagctcgacagcggagacaacccgtacctcaagtacaaccacgccgacgcggagtttcaggagcgtcttaaagaagatacgtcttttgggggcaacctcggacgagcagtcttccaggcgaaaaagagggttcttgaacctctgggcctggttgaggaacctgttaagacggctccgggaaaaaagaggccggtagagcactctcctgtggagccagactcctcctcgggaaccggaaaggcgggccagcagcctgcaagaaaaagattgaatttcggtcagactggagacgcagactccgtacctgacccccagcctctcggacagccaccagcagccccctctggtctgggaactaatacgatggctacaggcagtggcgcaccaatggcagacaataacgagggcgccgacggagtgggtaattcctcgggaaattggcattgcgattccacatggatgggcgacagagtcatcaccaccagcacccgcacctgggctctgcccacctacaacaaccatctgtacaagcaaatttccagccaatcaggagcatcgaacgacaaccactactttggctacagcaccccctgggggtattttgacttcaacagattccactgccacttttcgccacgtgactggcaaagactcatcaacaacaactggggattccggcccaagagactcagcttcaagctctttaacattcaagtcaaggaggtcacgcagaatgacggtacgacgacgattgccaataaccttaccagcacggttcaggtctttactgactcggagtaccagctcccgtacgtcctcggctcggcgcatcaaggatgcctcccgccgttcccagcagacgtcttcatggtgccacagtatggatacctcaccctgaacaacgggagtcaggcggtaggacgctcttcattttactgcctggagtacttcccttctcagatgcttcgcacgggaaacaactttaccttcagctacacctttgaggacgtgccttttcacagcagctacgctcacagccaaagtctggaccgtctcatgaatcctcccatcgaccaatacctgtattacttgagcaaaacaaacgctccaagcggaaccaccacgatgtccaggcttcagttttctcaggccggagcgagtgacattcgggaccagtctagaaactggcttcctggaccctgttaccgccagcagcgagtatcaaagacagctgcggacaacaacaacagtgattactcgtggactggagctaccaagtaccacctcaatggaagagactctctggtgaacccgggcccagctatggccagccacaaggatgatgaagaaaaatattttcctcagagcggggttctcatcttcgggaaacaaggctcaaataaaactaatgtggacattgaaaaggttatgattacagacgaagaggaaatcaggaccaccaatcccgtggctacggagcagtatggttctgtatctaccaaccttcaaagcggcaacacacaagcagctacctcagatgtcaacacacaaggcgttcttcctggcatggtctggcaggacagagatgtgtacctgcaggggcccatctgggcaaagattcctcacacggacggacactttcacccttctcccctcatgggcggatttggattgaagcaccctcccccacagattctcatcaagaataccccggtacctgcgaatccttcgaccaccttcagtgcggcaaagtttgcttccttcatcacacagtattccacgggacaggtcagcgtggagatagagtgggagctgcagaaggagaacagcaaacgctggaaccccgagatccagtatacttccaactacaacaaatctgttaatgtggactttactgtggacactaatggtgtgtattcagagcctcgccccattggcaccagatacctgactcgtaatctgtaa

SEQ ID NO: 3507 - DNA, 2208 bp, synthetic construct
  misc_feature 1..2208: note = source = /note="Description of Artificial Sequence: Synthetic polynucleotide"
  source 1..2208: mol_type = other DNA
atggctgccgatggttatcttccagattggctcgaggacactctctctgaaggaataagacagtggtggaagctcaaacctggcccaccaccgccaaagcccgcagagcggcataaggacgacagcaggggtcttgtgcttcctgggtacaagtacctcggacccttcaacggactcgacaagggggagccggtcaacgaggcagacgccgcggccctcgagcacgacaaggcctacgaccggcagctcgacagcggagacaacccgtacctcaagtacaaccacgccgacgcggagtttcaggagcgtcttaaagaagatacgtcttttgggggcaacctcggacgagcagtcttccaggcgaaaaagagggttcttgaacctctgggcctggttgaggaacctgttaagacggctccgggaaaaaagaggccggtagagcactctcctgtggagccagactcctcctcgggaaccggaaaggcgggccagcagcctgcaagaaaaagattgaatttcggtcagactggagacgcagactccgtacctgacccccagcctctcggacagccaccagcagccccctctggtctgggaactaatacgatggctacaggcagtggcgcaccaatggcagacaataacgagggcgccgacggagtgggtaattcctcgggaaattggcattgcgattccacatggatgggcgacagagtcatcaccaccagcacccgcacctgggctctgcccacctacaacaaccatctgtacaagcaaatttccagccaatcaggagcatcgaacgacaaccactactttggctacagcaccccctgggggtattttgacttcaacagattccactgccacttttcgccacgtgactggcaaagactcatcaacaacaactggggattccggcccaagagactcagcttcaagctctttaacattcaagtcaaggaggtcacgcagaatgacggtacgacgacgattgccaataaccttaccagcacggttcaggtctttactgactcggagtaccagctcccgtacgtcctcggctcggcgcatcaaggatgcctcccgccgttcccagcagacgtcttcatggtgccacagtatggatacctcaccctgaacaacgggagtcaggcggtaggacgctcttcattttactgcctggagtacttcccttctcagatgcttcgcacgggaaacaactttaccttcagctacacctttgaggacgtgccttttcacagcagctacgctcacggccaaagtctggaccgtctcatgaatcctctcatcgaccaatacctgtattacttgagcaaaacaaacgctccaagcggaaccaccacgatgtccaggcttcagttttctcaggccggagcgagtgacattcgggaccagtctagaaactggcttcctggaccctgttaccgccagcagcgagtatcaaagacagctgcggacaacaacaacagtgattactcgtggactggagctaccaagtaccacctcaatggaagagactctctggtgaacccgggcccagctatggccagccacaaggatgatgaagaaaaatattttcctcagagcggggttctcatcttcgggaaacaaggctcaaataaaactaatgtggacattgaaaaggttatgattacagacgaagaggaaatcaggaccaccaatcccgtggctacggagcagtatggttctgtatctaccaaccttcaaagcggcaacacacaagcagctacctcagatgtcaacacacaaggcgttcttcctggcatggtctggcaggacagagatgtgtacctgcaggggcccatctgggcaaagattcctcacacggacggacactttcacccttctcccctcatgggcggatttggattgaagcaccctcccccacagattctcatcaagaataccccggtacctgcgaatccttcgaccaccttcagtgcggcaaagtttgcttccttcatcacacagtattccacgggacaggtcagcgtggagatagagtgggagctgcagaaggagaacagcaaacgctggaaccccgagatccagtatacttccaactacaacaaatctgttaatgtggactttactgtggacactaatggtgtgtattcagagcctcgccccattggcaccagatacctgactcgtaatctgtaa

SEQ ID NO: 3508 - DNA, 2208 bp, synthetic construct
  misc_feature 1..2208: note = source = /note="Description of Artificial Sequence: Synthetic polynucleotide"
  source 1..2208: mol_type = other DNA
atggctgccgatggttatcttccagattggctcgaggacactctctctgaaggaataagacagtggtggaagctcaaacctggcccaccaccgccaaagcccgcagagcggcataaggacgacagcaggggtcttgtgcttcctgggtacaagtacctcggacccttcaacggactcgacaagggggagccggtcaacgaggcagacgccgcggccctcgagcacgacaaggcctacgaccggcagctcgacagcggagacaacccgtacctcaagtacaaccacgccgacgcggagtttcaggagcgtcttaaagaagatacgtcttttgggggcaacctcggacgagcagtcttccaggcgaaaaagagggttcttgaacctctgggcctggttgaggaacctgttaagacggctccgggaaaaaagaggccggtagagcactctcctgtggagccagactcctcctcgggaaccggaaaggcgggccagcagcctgcaagaaaaagattgaatttcggtcagactggagacgcagactccgtacctgacccccagcctctcggacagccaccagcagccccctctggtctgggaactaatacgatggctacaggcagtggcgcaccaatggcagacaataacgagggcgccgacggagtgggtaattcctcgggaaattggcattgcgattccacatggatgggcgacagagtcatcaccaccagcacccgcacctgggctctgcccacctacaacaaccatctgtacaagcaaatttccagccaatcaggagcatcgaacgacaaccactactttggctacagcaccccctgggggtattttgacttcaacagattccactgccacttttcgccacgtgactggcaaagactcatcaacaacaactggggattccggcccaagagactcagcttcaagctctttaacattcaagtcaaggaggtcacgcagaatgacggtacgacgacgattgccaataaccttaccagcacggttcaggtctttactgactcggagtaccagctcccgtacgtcctcggctcggcgcatcaaggatgcctcccgccgttcccagcagacgtcttcatggtgccacagtatggatacctcaccctgaacaacgggagtcaggcggtaggacgctcttcattttactgcctggagtacttcccttctcagatgcttcgcacgggaaacaactttaccttcagctacacctttgaggacgtgccttttcacagcagctacgctcacagccaaagtctggaccgtctcatgaatcctctcatcgaccaatacctgtattacttgagcaaaacaaacgctccaagcggaaccaccacgatgtccaggcctcagttttctcaggccggagcgagtgacattcgggaccagtctagaaactggcttcctggaccctgttaccgccagcagcgagtatcaaagacagctgcggacaacaacaacagtgattactcgtggactggagctaccaagtaccacctcaatggaagagactctctggtgaacccgggcccagctatggccagccacaaggatgatgaagaaaaatattttcctcagagcggggttctcatcttcgggaaacaaggctcaaataaaactaatgtggacattgaaaaggttatgattacagacgaagaggaaatcaggaccaccaatcccgtggctacggagcagtatggttctgtatctaccaaccttcaaagcggcaacacacaagcagctacctcagatgtcaacacacaaggcgttcttcctggcatggtctggcaggacagagatgtgtacctgcaggggcccatctgggcaaagattcctcacacggacggacactttcacccttctcccctcatgggcggatttggattgaagcaccctcccccacagattctcatcaagaataccccggtacctgcgaatccttcgaccaccttcagtgcggcaaagtttgcttccttcatcacacagtattccacgggacaggtcagcgtggagatagagtgggagctgcagaaggagaacagcaaacgctggaaccccgagatccagtatacttccaactacaacaaatctgttaatgtggactttactgtggacactaatggtgtgtattcagagcctcgccccattggcaccagatacctgactcgtaatctgtaa

SEQ ID NO: 3509 - DNA, 2208 bp, synthetic construct
  misc_feature 1..2208: note = source = /note="Description of Artificial Sequence: Synthetic polynucleotide"
  source 1..2208: mol_type = other DNA
atggctgccgatggttatcttccagattggctcgaggacactctctctgaaggaataagacagtggtggaagctcaaacctggcccaccaccgccaaagcccgcagagcggcataaggacgacagcaggggtcttgtgcttcctgggtacaagtacctcggacccttcaacggactcgacaagggggagccggtcaacgaggcagacgccgcggccctcgagcacgacaaggcctacgaccggcagctcgacagcggagacaacccgtacctcaagtacaaccacgccgacgcggagtttcaggagcgtcttaaagaagatacgtcttttgggggcaacctcggacgagcagtcttccaggcgaaaaagagggttcttgaacctctgggcctggttgaggaacctgttaagacggctccgggaaaaaagaggccggtagagcactctcctgtggagccagactcctcctcgggaaccggaaaggcgggccagcagcctgcaagaaaaagattgaatttcggtcagactggagacgcagactccgtacctgacccccagcctctcggacagccaccagcagccccctctggtctgggaactaatacgatggctacaggcagtggcgcaccaatggcagacaataacgagggcgccgacggagtgggtaattcctcgggaaattggcattgcgattccacatggatgggcgacagagtcatcaccaccagcacccgcacctgggctctgcccacctacaacaaccatctgtacaagcaaatttccagccaatcaggaacatcgaacgacaaccactactttggctacagcaccccctgggggtattttgacttcaacagattccactgccacttttcgccacgtgactggcaaagactcatcaacaacaactggggattccggcccaagagactcagcttcaagctctttaacattcaagtcaaggaggtcacgcagaatgacggtacgacgacgattgccaataaccttaccagcacggttcaggtctttactgactcggagtaccagctcccgtacgtcctcggctcggcgcatcaaggatgcctcccgccgttcccagcagacgtcttcatggtgccacagtatggatacctcaccctgaacaacgggagtcaggcggtaggacgctcttcattttactgcctggagtacttcccttctcagatgcttcgcacgggaaacaactttaccttcagctacacctttgaggacgtgccttttcacagcagctacgctcacagccaaagtctggaccgtctcatgaatcctctcatcgaccaatacctgtattacttgagcaaaacaaacgctccaagcggaaccaccacgatgtccaggcttcagttttctcaggccggagcgagtgacattcgggaccagtctagaaactggcttcctggaccctgttaccgccagcagcgagtatcaaagacagctgcggacaacaacaacagtgattactcgtggactggagctaccaagtaccacctcaatggaagagactctctggtgaacccgggcccagctatggccagccacaaggatgatgaagaaaaatattttcctcagagcggggttctcatcttcgggaaacaaggctcaaataaaactaatgtggacattgaaaaggttatgattacagacgaagaggaaatcaggaccaccaatcccgtggctacggagcagtatggttctgtatctaccaaccttcaaagcggcaacacacaagcagctacctcagatgtcaacacacaaggcgttcttcctggcatggtctggcaggacagagatgtgtacctgcaggggcccatctgggcaaagattcctcacacggacggacactttcacccttctcccctcatgggcggatttggattgaagcaccctcccccacagattctcatcaagaataccccggtacctgcgaatccttcgaccaccttcagtgcggcaaagtttgcttccttcatcacacagtattccacgggacaggtcagcgtggagatagagtgggagctgcagaaggagaacagcaaacgctggaaccccgagatccagtatacttccaactacaacaaatctgttaatgtggactttactgtggacactaatggtgtgtattcagagcctcgccccattggcaccagatacctgactcgtaatctgtaa

SEQ ID NO: 3510 - DNA, 2208 bp, synthetic construct
  misc_feature 1..2208: note = source = /note="Description of Artificial Sequence: Synthetic polynucleotide"
  source 1..2208: mol_type = other DNA
atggctgccgatggttatcttccagattggctcgaggacactctctctgaaggaataagacagtggtggaagctcaaacctggcccaccaccgccaaagcccgcagagcggcataaggrcgacagcaggggtcttgtgcttcctgggtacaagtacctcggacccttcaacggactcgacaagggggagccggtcaacgaggcagacgccgcggccctcgagcacgacaaggcctacgaccggcagctcgacagcggagacaacccgtacctcaagtacaaccacgccgacgcggagtttcaggagcgtcttaaagaagatacgtcttttgggggcaacctcggacgagcagtcttccaggcgaaaaagagggttcttgaacctctgggcctggttgaggaacctgttaagacggctccgggaaaaaagaggccggtagagcactctcctgtggagccagactcctcctcgggaaccggaaaggcgggccagcagcctgcaagaaaaagattgaatttcggtcagactggagacgcagactccgtacctgacccccagcctctcggacagccaccagcagccccctctggtctgggaactaatacgatggctacaggcagtggcgcaccaatggcagacaataacgagggcgccgacggagtgggtaattcctcgggaaattggcattgcgattccacatggatgggcgacagagtcatcaccaccagcacccgcacctgggctctgcccacctacaacaaccatctgtacaagcaaatttccagccaatcaggagcatcgaacgacaaccactactttggctacagcaccccctgggggtattttgacttcaacagattccactgccacttttcgccacgtgactggcaaagactcatcaacaacaactggggattccggcccaagagactcagcttcaagctctttaacattcaagtcaaggaggtcacgcagaatgacggtacgacgacgattgccaataaccttaccagcacggttcaggtctttactgactcggagtaccagctcccgtacgtcctcggctcggcgcatcaaggatgcctcccgccgttcccagcagacgtcttcatggtgccacagtatggatacctcaccctgaacaacgggagtcaggcggtaggacgctcttcattttactgcctggagtacttcccttctcagatgcttcgcacgggaaacaactttaccttcagctacacctttgaggacgtgccttttcacagcagctacgctcacagccaaagtctggaccgtctcatgaatcctctcatcgaccaatacctgtattacttgagcaaaacaaacgctccaagcggaaccaccacgatgtccaggcttcagttttctcaggccggagcgagtgacattcgggaccagtctagaaactggcttcctggaccctgttaccgccagcagcgagtatcaaagacagctgcggacaacaacaacagtgattactcgtggactggagctaccaagtaccacctcaatggaagagactctctggtgaacccgggcccagctatggccagccacaaggatgatgaagaaaaatattttcctcagagcggggttctcatcttcgggaaacaaggctcaaataaaactaatgtggacattgaaaaggttatgattacagacgaagaggaaatcaggaccaccaatcccgtggctacggagcagtatggttctgtatctaccaaccttcaaagcggcaacacacaagcagctacctcagatgtcaacacacaaggcgttcttcctggcatggtctggcaggacagagatgtgtacctgcaggggcccatctgggcaaagattcctcacacggacggacactttcacccttctcccctcatgggcggatttggattgaagcaccctcccccacagattctcatcaagaataccccggtacctgcgaatccttcgaccaccttcagtgcggcaaagtttgcttccttcatcacacagtattccacgggacaggtcagcgtggagatagagtgggagctgcagaaggagaacagcaaacgctggaaccccgagatccagtatacttccaactacaacaaatctgttaatgtggactttactgtggacactaatggtgtgtattcagagcctcaccccattggcaccagatacctgactcgtaatctgtaa

SEQ ID NO: 3511 - DNA, 2208 bp, synthetic construct
  misc_feature 1..2208: note = source = /note="Description of Artificial Sequence: Synthetic polynucleotide"
  source 1..2208: mol_type = other DNA
atggctgccgatggttatcttccagattggctcgaggacactctctctgaaggaataagacagtggtggaagttcaaacctggcccaccaccgccaaagcccgcagagcggcataaggacgacagcaggggtcttgtgcttcctgggtacaagtacctcggacccttcaacggactcgacaagggggagccggtcaacgaggcagacgccgcggccctcgagcacgacaaggcctacgaccggcagctcgacagcggagacaacccgtacctcaagtacaaccacgccgacgcggagtttcaggagcgtcttaaagaagatacgtcttttgggggcaacctcggacgagcagtcttccaggcgaaaaagagggttcttgaacctctgggcctggttgaggaacctgttaagacggctccgggaaaaaagaggccggtagagcactctcctgtggagccagactcctcctcgggaaccggaaaggcgggccagcagcctgcaagaaaaagattgaatttcggtcagactggagacgcagactccgtacctgacccccagcctctcggacagccaccagcagccccctctggtctgggaactaatacgatggctacaggcagtggcgcaccaatggcagacaataacgagggcgccgacggagtgggtaattcctcgggaaattggcattgcgattccacatggatgggcgacagagtcatcaccaccagcacccgcacctgggctctgcccacctacaacaaccatctgtacaagcaaatttccagccaatcaggagcatcgaacgacaaccactactttggctacagcaccccctgggggtattttgacttcaacagattccactgccacttttcgccacgtgactggcaaagactcatcaacaacaactggggattccggcccaagagactcagcttcaagctctttaacattcaagtcaaggaggtcacgcagaatgacggtacgacgacgattgccaataaccttaccagcacggttcaggtctttactgactcggagtaccagctcccgtacgtcctcggctcggcgcatcaaggatgcctcccgccgttcccagcagacgtcttcatggtgccacagtatggatacctcaccctgaacaacgggagtcaggcggtaggacgctcttcattttactgcctggagtacttcccttctcagatgcttcgcacgggaaacaactttaccttcagctacacctttgaggacgtgccttttcacagcagctacgctcacagccaaagtctggaccgtctcatgaatcctctcatcgaccaatacctgtattacttgagcaaaacaaacgctccaagcggaaccaccacgatgtccaggcttcagttttctcaggccggagcgagtgacattcgggaccagtctagaaactggcttcctggaccctgttaccgccagcagcgagtatcaaagacagctgcggacaacaacaacagtgattactcgtggactggagctaccaagtaccacctcaatggaagagactctctggtgaacccgggcccagctatggccagccacaaggatgatgaagaaaaatattttcctcagagcggggttctcatcttcgggaaacaaggctcaaataaaactaatgtggacattgaaaaggttatgattacagacgaagaggaaatcaggaccaccaatcccgtggctacggagcagtatggttctgtatctaccaaccttcaaagcggcaacacacaagcagctacctcagatgtcaacacacaaggcgttcttcctggcatggtctggcaggacagagatgtgtacctgcaggggcccatctgggcaaagattcctcacacggacggacactttcacccttctcccctcatgggcggatttggattgaagcaccctcccccacagattctcatcaagaataccccggtacctgcgaatccttcgaccaccttcagtgcggcaaagtttgcttccttcatcacacagtattccacgggacaggtcagcgtggagatagagtgggagctgcagaaggagaacagcaaacgctggaaccccgagatccagtatacttccaactacaacaaatctgttaatgtggactttactgtggacactaatggtgtgtattcagagcctcgccccattggcaccagatacctgactcgtaatctgtaa

SEQ ID NO: 3512 - DNA, 2208 bp, synthetic construct
  misc_feature 1..2208: note = source = /note="Description of Artificial Sequence: Synthetic polynucleotide"
  source 1..2208: mol_type = other DNA
atggctgccgatggttatcttccagattggctcgaggacactctctctgaaggaataagacagtggtggaagctcaaacctggcccaccaccgccaaagcccgcagagcggcataaggacgacagcaggggtcttgtgcttcctgggtacaagtacctcggacccttcaacggactcgacaagggggagccggtcaacgaggcagacgccgcggccctcgagcacgacaaggcctacgaccggcagctcgacagcggagacaacccgtacctcaagtacaaccacgccgacgcggagtttcaggagcgtcttaaagaagatacgtcttttgggggcaacctcggacgagcagtcttccaggcgaaaaagagggttcttgaacctctgggcctggttgaggaacctgttaagacggctccgggaaaaaagaggccggtagagcactctcctgtggagccagactcctcctcgggaaccggaaaggcgggccagcagcctgcaagaaaaagattgaatttcggtcagactggagacgcagactccgtacctgacccccagcctctcggacagccaccagcagccccctctggtctgggaactaatacgatggctacaggcagtggcgcaccaatggcagacaataacgagggcgccgacggagtgggtaattcctcgggaaattggcattgcgattccacatggatgggcgacagagtcatcaccaccagcacccgcacctgggctctgcccacctacaacaaccatctgtacaagcaaatttccagccaatcaggagcatcgaacgacaaccactactttggctacagcaccccctgggggtattttgacttcaacagattccactgccacttttcgtcacgtgactggcaaagactcatcaacaacaactggggattccggcccaagagactcagcttcaagctctttaacattcaagtcaaggaggtcacgcagaatgacggtacgacgacgattgccaataaccttaccagcacggttcaggtctttactgactcggagtaccagctcccgtacgtcctcggctcggcgcatcaaggatgcctcccgccgttcccagcagacgtcttcatggtgccacagtatggatacctcaccctgaacaacgggagtcaggcggtaggacgctcttcattttactgcctggagtacttcccttctcagatgcttcgcacgggaaacaactttaccttcagctacacctttgaggacgtgccttttcacagcagctacgctcacagccaaagtctggaccgtctcatgaatcctctcatcgaccaatacctgtattacttgagcaaaacaaacgctccaagcggaaccaccacgatgtccaggcttcagttttctcaggccggagcgagtgacattcgggaccagtctagaaactggcttcctggaccctgttaccgccagcagcgagtatcaaagacagctgcggacaacaacaacagtgattactcgtggactggagctaccaagtaccacctcaatggaagagactctctggtgaacccgggcccagctatggccagccacaaggatgatgaagaaaaatattttcctcagagcggggttctcatcttcgggaaacaaggctcaaataaaactaatgtggacattgaaaaggttatgattacagacgaagaggaaatcaggaccaccaatcccgtggctacggagcagtatggttctgtatctaccaaccttcaaagcggcaacacacaagcagctacctcagatgtcaacacacaaggcgttcttcctggcatggtctggcaggacagagatgtgtacctgcaggggcccatctgggcaaagattcctcacacggacggacactttcacccttctcccctcatgggcggatttggattgaagcaccctcccccacagattctcatcaagaataccccggtacctgcgaatccttcgaccaccttcagtgcggcaaagtttgcttccttcatcacacagtattccacgggacaggtcagcgtggagatagagtgggagctgcagaaggagaacagcaaacgctggaaccccgagatccagtatacttccaactacaacaaatctgttaatgtggactttactgtggacactaatggtgtgtattcagagcctcgccccattggcaccagatacctgactcgtaatctgtaa

SEQ ID NO: 3513 - DNA, 2208 bp, synthetic construct
  misc_feature 1..2208: note = source = /note="Description of Artificial Sequence: Synthetic polynucleotide"
  source 1..2208: mol_type = other DNA
atggctgccgatggttatcttccagattggctcgaggacactctctctgaaggaataagacagtggtggaagctcaaacctggcccaccaccgccaaagcccgcagagcggcatgaggacgacagcaggggtcttgtgcttcctgggtacaagtacctcggacccttcaacggactcgacaagggggagccggtcaacgaggcagacgccgcggccctcgagcacgacaaggcctacgaccggcagctcgacagcggagacaacccgtacctcaagtacaaccacgccgacgcggagtttcaggagcgtcttaaagaagatacgtcttttgggggcaacctcggacgagcagtcttccaggcgaaaaagagggttcttgaacctctgggcctggttgaggaacctgttaagacggctccgggaaaaaagaggccggtagagcactctcctgtggagccagactcctcctcgggaaccggaaaggcgggccagcagcctgcaagaaaaagattgaatttcggtcagactggagacgcagactccgtacctgacccccagcctctcggacagccaccagcagccccctctggtctgggaactaatacgatggctacaggcagtggcgcaccaatggcagacaataacgagggcgccgacggagtgggtaattcctcgggaaattggcattgcgattccacatggatgggcgacagagtcatcaccaccagcacccgcacctgggctctgcccacctacaacaaccatctgtacaagcaaatttccagccaatcaggagcatcgaacgacaaccactactttggctacagcaccccctgggggtattttgacttcaacagattccactgccacttttcgccacgtgactggcaaagactcatcaacaacaactggggattccggcccaagagactcagcttcaagctctttaacattcaagtcaaggaggtcacgcagaatgacggtacgacgacgattgccaataaccttaccagcacggttcaggtctttactgactcggagtaccagctcccgtacgtcctcggctcggcgcatcaaggatgcctcccgccgttcccagcagacgtcttcatggtgccacagtatggatacctcaccctgaacaacgggagtcaggcggtaggacgctcttcattttactgcctggagtacttcccttctcagatgcttcgcacgggaaacaactttaccttcagctacacctttgaggacgtgccttttcacagcagctacgctcacagccaaagtctggaccgtctcatgaatcctctcatcgaccaatacctgtattacttgagcaaaacaaacgctccaagcggaaccaccacgatgtccaggcttcagttttctcaggccggagcgagtgacattcgggaccagtctagaaactggcttcctggaccctgttaccgccagcagcgagtatcaaagacagctgcggacaacaacaacagtgattactcgtggactggagctaccaagtaccacctcaatggaagagactctctggtgaacccgggcccagctatggccagccacaaggatgatgaagaaaaatattttcctcagagcggggttctcatcttcgggaaacaaggctcaaataaaactaatgtggacattgaaaaggttatgattacagacgaagaggaaatcaggaccaccaatcccgtggctacggagcagtatggttctgtatctaccaaccttcaaagcggcaacacacaagcagctacctcagatgtcaacacacaaggcgttcttcctggcatggtctggcaggacagagatgtgtacctgcaggggcccatctgggcaaagattcctcacacggacggacactttcacccttctcccctcatgggcggatttggattgaagcaccctcccccacagattctcatcaagaataccccggtacctgcgaatccttcgaccaccttcagtgcggcaaagtttgcttccttcatcacacagtattccacgggacaggtcagcgtggagatagagtgggagctgcagaaggagaacagcaaacgctggaaccccgagatccagtatacttccaactacaacaaatctgttaatgtggactttactgtggacactaatggtgtgtattcagagcctcgccccattggcaccagatacctgactcgtaatctgtaa

SEQ ID NO: 3514 - DNA, 2205 bp, synthetic construct
  misc_feature 1..2205: note = source = /note="Description of Artificial Sequence: Synthetic polynucleotide"
  source 1..2205: mol_type = other DNA
atggctgccgatggttatcttccagattggctcgaggacactctctctgaaggaataagacagtggtggaagctcaaacctggcccaccaccgccaaagcccgcagagcggcataaggacgacagcaggggtcttgtgcttcctgggtacaagtacctcggacccttcaacggactcgacaagggggagccggtcaacgaggcagacgccgcggccctcgagcacgacaaggcctacgaccggcagctcgacagcggagacaacccgtacctcaagtacaaccacgccgacgcggagtttcaggagcgtcttaaagaagatacgtcttttgggggcaacctcggacgagcagtcttccaggcgaaaaagagggttcttgaacctctgggcctggttgaggaacctgttaagacggctccgggaaaaaagaggccggtagagcactctcctgtggagccagactcctcctcgggaaccggaaaggcgggccagcagcctgcaagaaaaagattgaatttcggtcagactggagacgcagactccgtacctgacccccagcctctcggacagccaccagcagccccctctggtctgggaactaatacgatggctacaggcagtggcgcaccaatggcagacaataacgagggcgccgacggagtgggtaattcctcgggaaattggcattgcgattccacatggatgggcgacagagtcatcaccaccagcacccgcacctgggctctgcccacctacaacaaccatctgtacaagcaaatttccagccaatcaggagcatcgaacgacaaccactactttggctacagcaccccctgggggtattttgacttcaacagattccactgccacttttcgccacgtgactggcaaagactcatcaacaacaactggggattccggcccaagagactcagcttcaagctctttaacattcaagtcaaggaggtcacgcagaatgacggtacgacgacgattgccaataaccttaccagcacggttcaggtctttactgactcggagtaccagctcccgtacgtcctcggctcggcgcatcaaggatgcctcccgccgttcccagcagacgtcttcatggtgccacagtatggatacctcaccctgaacaacgggagtcaggcggtaggacgctcttcattttactgcctggagtacttcccttctcagatgcttcgcacgggaaacaactttaccttcagctacacctttgaggacgtgccttttcacagcagctacgctcacagccaaagtctggaccgtctcatgaatcctctcatcgaccaatacctgtattacttgagcaaaacaaacgctccaagcggaaccaccacgatgtccaggcttcagttttctcaggccggagcgagtgacattcgggaccagtctagaaactggcttcctggaccctgttaccgccagcagcgagtatcaaagacagctgcggacaacaacagtgattactcgtggactggagctaccaagtaccacctcaatggaagagactctctggtgaacccgggcccagctatggccagccacaaggatgatgaagaaaaatattttcctcagagcggggttctcatcttcgggaaacaaggctcaaataaaactaatgtggacattgaaaaggttatgattacagacgaagaggaaatcaggaccaccaatcccgtggctacggagcagtatggttctgtatctaccaaccttcaaagcggcaacacacaagcagctacctcagatgtcaacacacaaggcgttcttcctggcatggtctggcaggacagagatgtgtacctgcaggggcccatctgggcaaagattcctcacacggacggacactttcacccttctcccctcatgggcggatttggattgaagcaccctcccccacagattctcatcaagaataccccggtacctgcgaatccttcgaccaccttcagtgcggcaaagtttgcttccttcatcacacagtattccacgggacaggtcagcgtggagatagagtgggagctgcagaaggagaacagcaaacgctggaaccccgagatccagtatacttccaactacaacaaatctgttaatgtggactttactgtggacactaatggtgtgtattcagagcctcgccccattggcaccagatacctgactcgtaatctgtaa

SEQ ID NO: 3515 - DNA, 2208 bp, synthetic construct
  misc_feature 1..2208: note = source = /note="Description of Artificial Sequence: Synthetic polynucleotide"
  source 1..2208: mol_type = other DNA
atggctgccgatggttatcttccagattggctcgaggacactctctctgaaggaataagacagtggtggaagctcaaacctggcccaccaccgccaaagcccgcagagtggcataaggacgacagcaggggtcttgtgcttcctgggtacaagtacctcggacccttcaacggactcgacaagggggagccggtcaacgaggcagacgccgcggccctcgagcacgacaaggcctacgaccggcagctcgacagcggagacaacccgtacctcaagtacaaccacgccgacgcggagtttcaggagcgtcttaaagaagatacgtcttttgggggcaacctcggacgagcagtcttccaggcgaaaaagagggttcttgaacctctgggcctggttgaggaacctgttaagacggctccgggaaaaaagaggccggtagagcactctcctgtggagccagactcctcctcgggaaccggaaaggcgggccagcagcctgcaagaaaaagattgaatttcggtcagactggagacgcagactccgtacctgacccccagcctctcggacagccaccagcagccccctctggtctgggaactaatacgatggctacaggcagtggcgcaccaatggcagacaataacgagggcgccgacggagtgggtaattcctcgggaaattggcattgcgattccacatggatgggcgacagagtcatcaccaccagcacccgcacctgggctctgcccacctacaacaaccatctgtacaagcaaatttccagccaatcaggagcatcgaacgacaaccactactttggctacagcaccccctgggggtattttgacttcaacagattccactgccacttttcgccacgtgactggcaaagactcatcaacaacaactggggattccggcccaagagactcagcttcaagctctttaacattcaagtcaaggaggtcacgcagaatgacggtacgacgacgattgccaataaccttaccagcacggttcaggtctttactgactcggagtaccagctcccgtacgtcctcggctcggcgcatcaaggatgcctcccgccgttcccagcagacgtcttcatggtgccacagtatggatacctcaccctgaacaacgggagtcaggcggtaggacgctcttcattttactgcctggagtacttcccttctcagatgcttcgcacgggaaacaactttaccttcagctacacctttgaggacgtgccttttcacagcagctacgctcacagccaaagtctggaccgtctcatgaatcctctcatcgaccaatacctgtattacttgagcaaaacaaacgctccaagcggaaccaccacgatgtccaggcttcagttttctcaggccggagcgagtgacattcgggaccagtctagaaactggcttcctggaccctgttaccgccagcagcgagtatcaaagacagctgcggacaacaacaacagtgattactcgtggactggagctaccaagtaccacctcaatggaagagactctctggtgaacccgggcccagctatggccagccacaaggatgatgaagaaaaatattttcctcagagcggggttctcatcttcgggaaacaaggctcaaataaaactaatgtggacattgaaaaggttatgattacagacgaagaggaaatcaggaccaccaatcccgtggctacggagcagtatggttctgtatctaccaaccttcaaagcggcaacacacaagcagctacctcagatgtcaacacacaaggcgttcttcctggcatggtctggcaggacagagatgtgtacctgcaggggcccatctgggcaaagattcctcacacggacggacactttcacccttctcccctcatgggcggatttggattgaagcaccctcccccacagattctcatcaagaataccccggtacctgcgaatccttcgaccaccttcagtgcggcaaagtttgcttccttcatcacacagtattccacgggacaggtcagcgtggagatagagtgggagctgcagaaggagaacagcaaacgctggaaccccgagatccagtatacttccaactacaacaaatctgttaatgtggactttactgtggacactaatggtgtgtattcagagcctcgccccattggcaccagatacctgactcgtaatctgtaa

SEQ ID NO: 3516 - DNA, 2208 bp, synthetic construct
  misc_feature 1..2208: note = source = /note="Description of Artificial Sequence: Synthetic polynucleotide"
  source 1..2208: mol_type = other DNA
atggctgccgatggttatcttccagattggctcgaggacactctctctgaaggaataagacagtggtggaagctcaaacctggcccaccaccgccaaagcccgcagagcggcataaggacgacagcaggggtcttgtgcttcctgggtacaagtacctcggacccttcaacggactcgacaagggggagccggtcaacgaggcagacgccgcggccctcgagcacgacaaggcctacgaccggcagctcgacagcggagacaacccgtacctcaagtacaaccacgccgacgcggagtttcaggagcgtcttaaagaagatacgtcttttgggggcaacctcggacgagcagtcttccaggcgaaaaagagggttcttgaacctctgggcctggttgaggaacctgttaagacggctccgggaaaaaagaggccggtagagcactctcctgtggagccagactcctcctcgggaaccggaaaggcgggccagcagcctgcaagaaaaagattgaatttcggtcagactggagacgcagactccgtacctgacccccagcctctcggacagccaccagcagccccctctggtctgggaactaatacgatggctacaggcagtggcgcaccaatggcagacaataacgagggcgccgacggagtgggtaattcctcgggaaattggcattgcgattccacatggatgggcgacagagtcatcaccaccagcacccgcacctgggctctgcccacctacaacaaccatctgtacaagcaaatttccagccaatcaggagcatcgaacgacaaccactactttggctacagcaccccctgggggtattttgacttcaacagattccactgccacttttcgccacgtgactggcaaagactcatcaacaacaactggggattccggcccaagagactcagcttcaagctctttaacattcaagtcaaggaggtcacgcagaatgacggtacgacgacgattgccaataaccttaccagcacggttcaggtctttactgactcggagtaccagctcccgtacgtcctcggctcggcgcatcaaggatgcctcccgccgttcccagcagacgtcttcatggtgccacagtatggatacctcaccctgaacaacgggagtcaggcggtaggacgctcttcattttactgcctggagtacttcccttctcagatgcttcgcacgggaaacaactttaccttcagctacacctttgaggacgtgccttttcacagcagctacgctcacagccaaagtctggaccgtctcatgaatcctctcatcgaccaatacctgtattacttgagcaaaacaaacgctccaagcggaaccaccacgatgtccaggcttcagttttctcaggccggagcgagtgacattcgggaccagtctagaaactggcttcctggaccctgttaccgccagcagcgagtatcaaagacagctgcggacaacaacaacagtgattactcgtggactggagctaccaagtaccacctcaatggaagagactctctggtgaacccgggcccagctatggccagccacaaggatgatgaagaaaaatattttcctcagagcggggttctcatcttcgggaaacaaggctcaaataaaactaatgtggacattgaaaaggttatgattacagacgaagaggaaatcaggaccaccaatcccgtggctacggagcagtatggttctgtatctaccaaccttcaaagcggcaacacacaagcagctacctcagatgtcaacacacaaggcgttcttcctgacatggtctggcaggacagagatgtgtacctgcaggggcccatctgggcaaagattcctcacacggacggacactttcacccttctcccctcatgggcggatttggattgaagcaccctcccccacagattctcatcaagaataccccggtacctgcgaatccttcgaccaccttcagtgcggcaaagtttgcttccttcatcacacagtattccacgggacaggtcagcgtggagatagagtgggagctgcagaaggagaacagcaaacgctggaaccccgagatccagtatacttccaactacaacaaatctgttaatgtggactttactgtggacactaatggtgtgtattcagagcctcgccccattggcaccagatacctgactcgtaatctgtaa

SEQ ID NO: 3517 - DNA, 2208 bp, synthetic construct
  misc_feature 1..2208: note = source = /note="Description of Artificial Sequence: Synthetic polynucleotide"
  source 1..2208: mol_type = other DNA
atggctgccgatggttatcttccagattggctcgaggacactctctctgaaggaataagacagtggtggaagctcaaacctggcccaccaccgccaaagcccgcagagcggcataaggacgacagcaggggtcttgtgcttcctgggtacaagtacctcggacccttcaacggactcgacaagggggagccggtcaacgaggcagacgccgcggccctcgagcacgacaaggcctacgaccggcagctcgacagcggagacaacccgtacctcaagtacaaccacgccgacgcggagtttcaggagcgtcttaaagaagatacgtcttttggggacaacctcggacgagcagtcttccaggcgaaaaagagggttcttgaacctctgggcctggttgaggaacctgttaagacggctccgggaaaaaagaggccggtagagcactctcctgtggagccagactcctcctcgggaaccggaaaggcgggccagcagcctgcaagaaaaagattgaatttcggtcagactggagacgcagactccgtacctgacccccagcctctcggacagccaccagcagccccctctggtctgggaactaatacgatggctacaggcagtggcgcaccaatggcagacaataacgagggcgccgacggagtgggtaattcctcgggaaattggcattgcgattccacatggatgggcgacagagtcatcaccaccagcacccgcacctgggctctgcccacctacaacaaccatctgtacaagcaaatttccagccaatcaggagcatcgaacgacaaccactactttggctacagcaccccctgggggtattttgacttcaacagattccactgccacttttcgccacgtgactggcaaagactcatcaacaacaactggggattccggcccaagagactcagcttcaagctctttaacattcaagtcaaggaggtcacgcagaatgacggtacgacgacgattgccaataaccttaccagcacggttcaggtctttactgactcggagtaccagctcccgtacgtcctcggctcggcgcatcaaggatgcctcccgccgttcccagcagacgtcttcatggtgccacagtatggatacctcaccctgaacaacgggagtcaggcggtaggacgctcttcattttactgcctggagtacttcccttctcagatgcttcgcacgggaaacaactttaccttcagctacacctttgaggacgtgccttttcacagcagctacgctcacagccaaagtctggaccgtctcatgaatcctctcatcgaccaatacctgtattacttgagcaaaacaaacgctccaagcggaaccaccacgatgtccaggcttcagttttctcaggccggagcgagtgacattcgggaccagtctagaaactggcttcctggaccctgttaccgccagcagcgagtatcaaagacagctgcggacaacaacaacagtgattactcgtggactggagctaccaagtaccacctcaatggaagagactctctggtgaacccgggcccagctatggccagccacaaggatgatgaagaaaaatattttcctcagagcggggttctcatcttcgggaaacaaggctcaaataaaactaatgtggacattgaaaaggttatgattacagacgaagaggaaatcaggaccaccaatcccgtggctacggagcagtatggttctgtatctaccaaccttcaaagcggcaacacacaagcagctacctcagatgtcaacacacaaggcgttcttcctggcatggtctggcaggacagagatgtgtacctgcaggggcccatctgggcaaagattcctcacacggacggacactttcacccttctcccctcatgggcggatttggattgaagcaccctcccccacagattctcatcaagaataccccggtacctgcgaatccttcgaccaccttcagtgcggcaaagtttgcttccttcatcacacagtattccacgggacaggtcagcgtggagatagagtgggagctgcagaaggagaacagcaaacgctggaaccccgagatccagtatacttccaactacaacaaatctgttaatgtggactttactgtggacactaatggtgtgtattcagagcctcgccccattggcaccagatacctgactcgtaatctgtaa

SEQ ID NO: 3518 - DNA, 2208 bp, synthetic construct
  misc_feature 1..2208: note = source = /note="Description of Artificial Sequence: Synthetic polynucleotide"
  source 1..2208: mol_type = other DNA
atggctgccgatggttatcttccagattggctcgaggacactctctctgaaggaataagacagtggtggaagctcaaacctggcccaccaccgccaaagcccgcagagcggcataaggacgacagcaggggtcttgtgcttcctgggtacaagtacctcggacccttcaacggactcgacaagggggagccggtcaacgaggcagacgccgcggccctcgagcacgacaaggcctacgaccggcagctcgacagcggagacaacccgtacctcaagtacaaccacgccgacgcggagtttcaggagcgtcttaaagaagatacgtcttttgggggcaacctcggacgagcagtcttccaggcgaaaaagagggttcttgaacctctgggcctggttgaggaacctgttaagacggctccgggaaaaaagaggccggtagagcactctcctgtggagccagactcctcctcgggaaccggaaaggcgggccagcagcctgcaagaaaaagattgaatttcggtcagactggagacgcagactccgtacctgacccccagcctctcggacagccaccagcagccccctctggtctgggaactaatacgatggctacaggcagtggcgcaccaatggcagacaataacgagggcgccgacggagtgggtaattcctcgggaaattggcattgcgattccacatggatgggcgacagagtcatcaccaccagcacccgcacctgggctctgcccacctacaacaaccatctgtacaagcaaatttccagccaatcaggagcatcgaacgacaaccactactttggctacagcaccccctgggggtattttgacttcaacagattccactgccacttttcgccacgtgactggcaaagactcatcaacaacaactggggattccggcccaagagactcagcttcaagctctttaacattcaagtcaaggaggtcacgcagaatgacggtacgacgacgattgccaataaccttaccagcacggttcaggtctttactgactcggagtaccagctcccgtacgtcctcgactcggcgcatcaaggatgcctcccgccgttcccagcagacgtcttcatggtgccacagtatggatacctcaccctgaacaacgggagtcaggcggtaggacgctcttcattttactgcctggagtacttcccttctcagatgcttcgcacgggaaacaactttaccttcagctacacctttgaggacgtgccttttcacagcagctacgctcacagccaaagtctggaccgtctcatgaatcctctcatcgaccaatacctgtattacttgagcaaaacaaacgctccaagcggaaccaccacgatgtccaggcttcagttttctcaggccggagcgagtgacattcgggaccagtctagaaactggcttcctggaccctgttaccgccagcagcgagtatcaaagacagctgcggacaacaacaacagtgattactcgtggactggagctaccaagtaccacctcaatggaagagactctctggtgaacccgggcccagctatggccagccacaaggatgatgaagaaaaatattttcctcagagcggggttctcatcttcgggaaacaaggctcaaataaaactaatgtggacattgaaaaggttatgattacagacgaagaggaaatcaggaccaccaatcccgtggctacggagcagtatggttctgtatctaccaaccttcaaagcggcaacacacaagcagctacctcagatgtcaacacacaaggcgttcttcctggcatggtctggcaggacagagatgtgtacctgcaggggcccatctgggcaaagattcctcacacggacggacactttcacccttctcccctcatgggcggatttggattgaagcaccctcccccacagattctcatcaagaataccccggtacctgcgaatccttcgaccaccttcagtgcggcaaagtttgcttccttcatcacacagtattccacgggacaggtcagcgtggagatagagtgggagctgcagaaggagaacagcaaacgctggaaccccgagatccagtatacttccaactacaacaaatctgttaatgtggactttactgtggacactaatggtgtgtattcagagcctcgccccattggcaccagatacctgactcgtaatctgtaa

SEQ ID NO: 3519 - DNA, 2208 bp, synthetic construct
  misc_feature 1..2208: note = source = /note="Description of Artificial Sequence: Synthetic polynucleotide"
  source 1..2208: mol_type = other DNA
atggctgccgatggttatcttccagattggctcgaggacactctctctgaaggaataagacagtggtggaagctcaaacctggcccaccaccgccaaagcccgcagagcggcataaggacgacagcaggggtcttgtgcttcctgggtacaagtacctcggacccttcaacggactcgacaagggggagccggtcaacgaggcagacgccgcggccctcgagcacgacaaggcctacgaccggcagctcgacagcggagacaacccgtacctcaagtacaaccacgccgacgcggagtttcaggagcgtcttaaagaagatacgtcttttgggggcaacctcggacgagcagtcttccaggcgaaaaagagggttcttgaacctctgggcctggttgaggaacctgttaagacggctccgggaaaaaagaggccggtagagcactctcctgtggagccagactcctcctcgggaaccggaaaggcgggccagcagcctgcaagaaaaagattgaatttcggtcagactggagacgcagactccgtacctgacccccagcctctcggacagccaccagcagccccctctggtctgggaactaatacgatggctacaggcagtggcgcaccaatggcagacaataacgagggcgccgacggagtgggtaattcctcgggaaattggcattgcgattccacatggatgggcgacagagtcatcaccaccagcacccgcacctgggctctgcccacctacaacaaccatctgtacaagcaaatttccagccaatcaggagcatcgaacgacaaccactactttggctacagcaccccctgggggtattttgacttcaacagattccactgccacttttcgccacgtgactggcaaagactcatcaacaacaactggggattccggcccaagagactcagcttcaagctctttaacattcaagtcaaggaggtcacgcagaatgacggtacgacgacgattgccaataaccttaccagcacggttcaggtctttactgactcggagtaccagctcccgtacgtcctcggctcggcgcatcaaggatgcctcccgccgttcccagcagacgtcttcatggtgccacagtatggatacctcaccctgaacaacgggagtcaggcggtaggacgctcttcattttactgcctggagtacttcccttctcagatgcttcgcacgggaaacaactttaccttcagctacacctttgaggacgtgccttttcacagcagctacgctcacagccaaagtctggaccgtctcatgaatcctctcatcgaccaatacctgtattacttgagcaaaacaaacgctccaagcggaaccaccacgatgtccaggcttcagttttctcaggccggagcgagtgacattcgggaccagtctagaaactggcttcctggaccctgttaccgccagcagcgagtatcaaagacagctgcggacaacaacaacagtgattactcgtggactggagctaccaagtaccacctcaatggaagagactctctggtgaacccgggcccagctatggccagccacaaggatgatgaagaaaaatattttcctcagagcggggttctcatcttcgggaaacaaggctcaaataaaactaatgtggacattgaaaaggttatgattacagacgaagaggaaatcaggaccaccaatcccgtggctacggagcagtatggttctgtatctaccaaccttcaaagcggcaacacacaagcagctacctcagatgtcaacacacaaggcgttcttcctggcatggtctggcaggacagagatgtgtacctgcaggggcccatctgggcaaagattcctcacacggacggacactttcacccttctcccctcatgggcggatttggattgaagcaccctcccccacagattctcatcaagaataccccggtacctgcgaatccttcgaccaccttcagtgcgacaaagtttgcttccttcatcacacagtattccacgggacaggtcagcgtggagatagagtgggagctgcagaaggagaacagcaaacgctggaaccccgagatccagtatacttccaactacaacaaatctgttaatgtggactttactgtggacactaatggtgtgtattcagagcctcgccccattggcaccagatacctgactcgtaatctgtaa

SEQ ID NO: 3520 - DNA, 2208 bp, synthetic construct
  misc_feature 1..2208: note = source = /note="Description of Artificial Sequence: Synthetic polynucleotide"
  source 1..2208: mol_type = other DNA
atggctgccgatggttatcttccagattggctcgaggacactctctctgaaggaataagacagtggtggaagctcaaacctggcccaccaccgccaaagcccgcagagcggcataaggacgacagcaggggtcttgtgcttcctgggtacaagtacctcggacccttcaacggactcgacaagggggagtcggtcaacgaggcagacgccgcggccctcgagcacgacaaggcctacgaccggcagctcgacagcggagacaacccgtacctcaagtacaaccacgccgacgcggagtttcaggagcgtcttaaagaagatacgtcttttgggggcaacctcggacgagcagtcttccaggcgaaaaagagggttcttgaacctctgggcctggttgaggaacctgttaagacggctccgggaaaaaagaggccggtagagcactctcctgtggagccagactcctcctcgggaaccggaaaggcgggccagcagcctgcaagaaaaagattgaatttcggtcagactggagacgcagactccgtacctgacccccagcctctcggacagccaccagcagccccctctggtctgggaactaatacgatggctacaggcagtggcgcaccaatggcagacaataacgagggcgccgacggagtgggtaattcctcgggaaattggcattgcgattccacatggatgggcgacagagtcatcaccaccagcacccgcacctgggctctgcccacctacaacaaccatctgtacaagcaaatttccagccaatcaggagcatcgaacgacaaccactactttggctacagcaccccctgggggtattttgacttcaacagattccactgccacttttcgccacgtgactggcaaagactcatcaacaacaactggggattccggcccaagagactcagcttcaagctctttaacattcaagtcaaggaggtcacgcagaatgacggtacgacgacgattgccaataaccttaccagcacggttcaggtctttactgactcggagtaccagctcccgtacgtcctcggctcggcgcatcaaggatgcctcccgccgttcccagcagacgtcttcatggtgccacagtatggatacctcaccctgaacaacgggagtcaggcggtaggacgctcttcattttactgcctggagtacttcccttctcagatgcttcgcacgggaaacaactttaccttcagctacacctttgaggacgtgccttttcacagcagctacgctcacagccaaagtctggaccgtctcatgaatcctctcatcgaccaatacctgtattacttgagcaaaacaaacgctccaagcggaaccaccacgatgtccaggcttcagttttctcaggccggagcgagtgacattcgggaccagtctagaaactggcttcctggaccctgttaccgccagcagcgagtatcaaagacagctgcggacaacaacaacagtgattactcgtggactggagctaccaagtaccacctcaatggaagagactctctggtgaacccgggcccagctatggccagccacaaggatgatgaagaaaaatattttcctcagagcggggttctcatcttcgggaaacaaggctcaaataaaactaatgtggacattgaaaaggttatgattacagacgaagaggaaatcaggaccaccaatcccgtggctacggagcagtatggttctgtatctaccaaccttcaaagcggcaacacacaagcagctacctcagatgtcaacacacaaggcgttcttcctggcatggtctggcaggacagagatgtgtacctgcaggggcccatctgggcaaagattcctcacacggacggacactttcacccttctcccctcatgggcggatttggattgaagcaccctcccccacagattctcatcaagaataccccggtacctgcgaatccttcgaccaccttcagtgcggcaaagtttgcttccttcatcacacagtattccacgggacaggtcagcgtggagatagagtgggagctgcagaaggagaacagcaaacgctggaaccccgagatccagtatacttccaactacaacaaatctgttaatgtggactttactgtggacactaatggtgtgtattcagagcctcgccccattggcaccagatacctgactcgtaatctgtaa

SEQ ID NO: 3521 - DNA, 2208 bp, synthetic construct
  misc_feature 1..2208: note = source = /note="Description of Artificial Sequence: Synthetic polynucleotide"
  source 1..2208: mol_type = other DNA
atggctgccgatggttatcttccagattggctcgaggacactctctctgaaggaataagacagtggtggaagctcaaacctggcccaccaccgccaaagcccgcagagcggcataaggacgacagcaggggtcttgtgcttcctgggtacaagtacctcggacccttcaacggactcgacaagggggagccggtcaacgaggcagacgccgcggccctcgagcacgacaaggcctacgaccggcagctcgacagcggagacaacccgtacctcaagtacaaccacgccgacgcggagtttcaggagcgtcttaaagaagatacgtcttttgggggcaacctcggacgagcagtcttccaggcgaaaaagagggttcttgaacctctgggcctggttgaggaacctgttaagacggctccgggaaaaaagaggccggtagagcactctcctgtggagccagactcctcctcgggaaccggaaaggcgggccagcagcctgcaagaaaaagattgaatttcggtcagactggagacgcagactccgtacctgacccccagcctctcggacagccaccagcagccccctctggtctgggaactaatacgatggctacaggcagtggcgcaccaatggcagacaataacgagggcgccgacggagtgggtaattcctcgggaaattggcattgcgattccacatggatgggcgacagagtcatcaccaccagcacccgcacctgggctctgcccacctacaacaaccatctgtacaagcaaatttccagccaatcaggagcatcgaacgacaaccactactttggctacagcaccccctgggggtattttgacttcaacagattccactgccacttttcgccacgtgactggcaaagactcatcaacaacaactggggattccggcccaagagactcagcttcaagctctttaacattcaagtcaaggaggtcacgcagaatgacggtacgacgacgattgccaataaccttaccagcacggttcaggtctttactgactcggagtaccagctcccgtacgtcctcggctcggtgcatcaaggatgcctcccgccgttcccagcagacgtcttcatggtgccacagtatggatacctcaccctgaacaacgggagtcaggcggtaggacgctcttcattttactgcctggagtacttcccttctcagatgcttcgcacgggaaacaactttaccttcagctacacctttgaggacgtgccttttcacagcagctacgctcacagccaaagtctggaccgtctcatgaatcctctcatcgaccaatacctgtattacttgagcaaaacaaacgctccaagcggaaccaccacgatgtccaggcttcagttttctcaggccggagcgagtgacattcgggaccagtctagaaactggcttcctggaccctgttaccgccagcagcgagtatcaaagacagctgcggacaacaacaacagtgattactcgtggactggagctaccaagtaccacctcaatggaagagactctctggtgaacccgggcccagctatggccagccacaaggatgatgaagaaaaatattttcctcagagcggggttctcatcttcgggaaacaaggctcaaataaaactaatgtggacattgaaaaggttatgattacagacgaagaggaaatcaggaccaccaatcccgtggctacggagcagtatggttctgtatctaccaaccttcaaagcggcaacacacaagcagctacctcagatgtcaacacacaaggcgttcttcctggcatggtctggcaggacagagatgtgtacctgcaggggcccatctgggcaaagattcctcacacggacggacactttcacccttctcccctcatgggcggatttggattgaagcaccctcccccacagattctcatcaagaataccccggtacctgcgaatccttcgaccaccttcagtgcggcaaagtttgcttccttcatcacacagtattccacgggacaggtcagcgtggagatagagtgggagctgcagaaggagaacagcaaacgctggaaccccgagatccagtatacttccaactacaacaaatctgttaatgtggactttactgtggacactaatggtgtgtattcagagcctcgccccattggcaccagatacctgactcgtaatctgtaa

SEQ ID NO: 3522 - DNA, 2208 bp, synthetic construct
  misc_feature 1..2208: note = source = /note="Description of Artificial Sequence: Synthetic polynucleotide"
  source 1..2208: mol_type = other DNA
atggctgccgatggttatcttccagattggctcgaggacactctctctgaaggaataagacagtggtggaagctcaaacctggcccaccaccgccaaagcccgcagagcggcataaggacgacagcaggggtcttgtgcttcctgggtacaagtacctcggacccttcaacggactcgacaagggggagccggtcaacgaggcagacgccgcggccctcgagcacgacaaggcctacgaccggcagctcgacagcggagacaacccgtacctcaagtacaaccacgccgacgcggagtttcaggagcgtcttaaagaagatacgtcttttgggggcaacctcggacgagcagtcttccaggcgaaaaagagggttcttgaacctctgggcctggttgaggaacctgttaagacggctccgggaaaaaagaggccggtagagcactctcctgtggagtcagactcctcctcgggaaccggaaaggcgggccagcagcctgcaagaaaaagattgaatttcggtcagactggagacgcagactccgtacctgacccccagcctctcggacagccaccagcagccccctctggtctgggaactaatacgatggctacaggcagtggcgcaccaatggcagacaataacgagggcgccgacggagtgggtaattcctcgggaaattggcattgcgattccacatggatgggcgacagagtcatcaccaccagcacccgcacctgggctctgcccacctacaacaaccatctgtacaagcaaatttccagccaatcaggagcatcgaacgacaaccactactttggctacagcaccccctgggggtattttgacttcaacagattccactgccacttttcgccacgtgactggcaaagactcatcaacaacaactggggattccggcccaagagactcagcttcaagctctttaacattcaagtcaaggaggtcacgcagaatgacggtacgacgacgattgccaataaccttaccagcacggttcaggtctttactgactcggagtaccagctcccgtacgtcctcggctcggcgcatcaaggatgcctcccgccgttcccagcagacgtcttcatggtgccacagtatggatacctcaccctgaacaacgggagtcaggcggtaggacgctcttcattttactgcctggagtacttcccttctcagatgcttcgcacgggaaacaactttaccttcagctacacctttgaggacgtgccttttcacagcagctacgctcacagccaaagtctggaccgtctcatgaatcctctcatcgaccaatacctgtattacttgagcaaaacaaacgctccaagcggaaccaccacgatgtccaggcttcagttttctcaggccggagcgagtgacattcgggaccagtctagaaactggcttcctggaccctgttaccgccagcagcgagtatcaaagacagctgcggacaacaacaacagtgattactcgtggactggagctaccaagtaccacctcaatggaagagactctctggtgaacccgggcccagctatggccagccacaaggatgatgaagaaaaatattttcctcagagcggggttctcatcttcgggaaacaaggctcaaataaaactaatgtggacattgaaaaggttatgattacagacgaagaggaaatcaggaccaccaatcccgtggctacggagcagtatggttctgtatctaccaaccttcaaagcggcaacacacaagcagctacctcagatgtcaacacacaaggcgttcttcctggcatggtctggcaggacagagatgtgtacctgcaggggcccatctgggcaaagattcctcacacggacggacactttcacccttctcccctcatgggcggatttggattgaagcaccctcccccacagattctcatcaagaataccccggtacctgcgaatccttcgaccaccttcagtgcggcaaagtttgcttccttcatcacacagtattccacgggacaggtcagcgtggagatagagtgggagctgcagaaggagaacagcaaacgctggaaccccgagatccagtatacttccaactacaacaaatctgttaatgtggactttactgtggacactaatggtgtgtattcagagcctcgccccattggcaccagatacctgactcgtaatctgtaa

SEQ ID NO: 3523 - DNA, 2208 bp, synthetic construct
  misc_feature 1..2208: note = source = /note="Description of Artificial Sequence: Synthetic polynucleotide"
  source 1..2208: mol_type = other DNA
atggctgccgatggttatcttccagattggctcgaggacactctctctgaaggaataagacagtggtggaagctcaaacctggcccaccaccgccaaagcccgcagagcggcataaggacgacagcaggggtcttgtgcttcctgggtacaagtacctcggacccttcaacggactcgacaagggggagccggtcaacgaggcagacgccgcggccctcgagcacgacaaggcctacgaccggcagctcgacagcggagacaacccgtacctcaagtacaaccacgccgacgcggagtttcaggagcgtcttaaagaagatacgtcttttgggggcaacctcggacgagcagtcttccaggcgaaaaagagggttcttgaacctctgggcctggttgaggaacctgttaagacggctccgggaaaaaagaggccggtagagcactctcctgtggagccagactcctcctcgggaaccggaaaggcgggccagcagcctgcaagaaaaagattgaatttcggtcagactggagacgcagactccgtacctgacccccagcctctcggacagccaccagcagccccctctggtctgggaactaatacgatggctacaggcagtggcgcaccaatggcagacaataacgagggcgccgacggagtgggtaattcctcgggaaattggcattgcgattccacatggatgggcgacagagtcatcaccaccagcacccgcacctgggctctgcccacctacaacaaccatctgtacaagcaaatttccagccaatcaggagcatcgaacgacaaccactactttggctacagcaccccctgggggtattttgacttcaacagattccactgccacttttcgccacgtgactggcaaagactcatcaacaacaactggggattccggcccaagagactcagcttcaagctctttaacattcaagtcaaggaggtcacgcagaatgacggtacgacgacgattgccaataaccttaccagcacggttcaggtctttactgactcggagtaccagctcccgtacgtcctcggctcggcgcatcaaggatgcctcccgccgttcccagcagacgtcttcatggtgccacagtatggatacctcaccctgaacaacgggagtcaggcggtaggacgctcttcattttactgcctggagtacttcccttctcagatgcttcgcacgggaaacaactttaccttcagctacacctttgaggacgtgccttttcacagcagctacgctcacagccaaagtatggaccgtctcatgaatcctctcatcgaccaatacctgtattacttgagcaaaacaaacgctccaagcggaaccaccacgatgtccaggcttcagttttctcaggccggagcgagtgacattcgggaccagtctagaaactggcttcctggaccctgttaccgccagcagcgagtatcaaagacagctgcggacaacaacaacagtgattactcgtggactggagctaccaagtaccacctcaatggaagagactctctggtgaacccgggcccagctatggccagccacaaggatgatgaagaaaaatattttcctcagagcggggttctcatcttcgggaaacaaggctcaaataaaactaatgtggacattgaaaaggttatgattacagacgaagaggaaatcaggaccaccaatcccgtggctacggagcagtatggttctgtatctaccaaccttcaaagcggcaacacacaagcagctacctcagatgtcaacacacaaggcgttcttcctggcatggtctggcaggacagagatgtgtacctgcaggggcccatctgggcaaagattcctcacacggacggacactttcacccttctcccctcatgggcggatttggattgaagcaccctcccccacagattctcatcaagaataccccggtacctgcgaatccttcgaccaccttcagtgcggcaaagtttgcttccttcatcacacagtattccacgggacaggtcagcgtggagatagagtgggagctgcagaaggagaacagcaaacgctggaaccccgagatccagtatacttccaactacaacaaatctgttaatgtggactttactgtggacactaatggtgtgtattcagagcctcgccccattggcaccagatacctgactcgtaatctgtaa

SEQ ID NO: 3524 - DNA, 2208 bp, synthetic construct
  misc_feature 1..2208: note = source = /note="Description of Artificial Sequence: Synthetic polynucleotide"
  source 1..2208: mol_type = other DNA
atggctgccgatggttatcttccagattggctcgaggacactctctctgaaggaataagacagtggtggaagctcaaacctggcccaccaccgccaaagcccgcagagcggcataaggacgacagcaggggtcttgtgcttcctgggtacaagtacctcggacccttcaacggactcgacaagggggagccggtcaacgaggcagacgccgcggccctcgagcacgacaaggcctacgaccggcagctcgacagcggagacaacccgtacctcaagtacaaccacgccgacgcggagtttcaggagcgtcttaaagaagatacgtcttttgggggcaacctcggacgagcagtcttccaggcgaaaaagagggttcttgaacctctgggcctggttgaggaacctgttaagacggctccgggaaaaaagaggccggtagagcactctcctgtggagccagactcctcctcgggaaccggaaaggcgggccagcagcctgcaagaaaaagattgaatttcggtcagactggagacgcagactccgtacctgacccccagcctctcggacagccaccagcagccccctctggtctgggaactaatacgatggctacaggcagtggcgcaccaatggcagacaataacgagggcgccgacggagtgggtaattcctcgggaaattggcattgcgattccacatggatgggcgacagagtcatcaccaccagcacccgcacctgggctctgcccacctacaacaaccatctgtacaagcaaatttccagccaatcaggagcatcgaacgacaaccactactttggctacagcaccccctgggggtattttgacttcaacagattccactgccacttttcgccacgtgactggcaaagactcatcaacaacaactggggattccggcccaagagactcagcttcaagctctttaacattcaagtcaaggaggtcacgcagaatgacggtacgacgacgattgccaataaccttaccagcacggttcaggtctttactgactcggagtaccagctcccgtacgtcctcggctcggcgcatcaaggatgcctcccgccgttcccagcagacgtcttcatggtgccacagtatggatacctcaccctgaacaacgggagtcaggcggtaggacgctcttcattttactgcctggagtacttcccttctcagatgcttcgcacgggaaacaactttaccttcagctacacctttgaggacgtgccttttcacagcagctacgctcacagccaaagtctggaccgtctcatgaatcctctcatcgaccaatacctgtattacttgagcaaaacaaacgctccaagcggaaccaccacgatgtccaggcttcagttttctcaggccggagcgagtgacattcgggaccagtctagaaactggcttcctggaccctgttaccgccagcagcgagtatcaaagacagctgcggacaacaacaacagtgattactcgtggactggagctaccaagtaccacctcaatggaagagactctctggtgaacccgggcccagctatggccagccacaaggatgatgaagaaaaatattttcctcagagcggggttctcatctttcggaaacaaggctcaaataaaactaatgtggacattgaaaaggttatgattacagacgaagaggaaatcaggaccaccaatcccgtggctacggagcagtatggttctgtatctaccaaccttcaaagcggcaacacacaagcagctacctcagatgtcaacacacaaggcgttcttcctggcatggtctggcaggacagagatgtgtacctgcaggggcccatctgggcaaagattcctcacacggacggacactttcacccttctcccctcatgggcggatttggattgaagcaccctcccccacagattctcatcaagaataccccggtacctgcgaatccttcgaccaccttcagtgcggcaaagtttgcttccttcatcacacagtattccacgggacaggtcagcgtggagatagagtgggagctgcagaaggagaacagcaaacgctggaaccccgagatccagtatacttccaactacaacaaatctgttaatgtggactttactgtggacactaatggtgtgtattcagagcctcgccccattggcaccagatacctgactcgtaatctgtaa

SEQ ID NO: 3525 - DNA, 2208 bp, synthetic construct
  misc_feature 1..2208: note = source = /note="Description of Artificial Sequence: Synthetic polynucleotide"
  source 1..2208: mol_type = other DNA
atggctgccgatggttatcttccagattggctcgaggacactctctctgaaggaataagacagtggtggaagctcaaacctggcccaccaccgccaaagcccgcagagcggcataaggacgacagcaggggtcttgtgcttcctgggtacaagtacctcggacccttcaacggactcgacaagggggagccggtcaacgaggcagacaccgcggccctcgagcacgacaaggcctacgaccggcagctcgacagcggagacaacccgtacctcaagtacaaccacgccgacgcggagtttcaggagcgtcttaaagaagatacgtcttttgggggcaacctcggacgagcagtcttccaggcgaaaaagagggttcttgaacctctgggcctggttgaggaacctgttaagacggctccgggaaaaaagaggccggtagagcactctcctgtggagccagactcctcctcgggaaccggaaaggcgggccagcagcctgcaagaaaaagattgaatttcggtcagactggagacgcagactccgtacctgacccccagcctctcggacagccaccagcagccccctctggtctgggaactaatacgatggctacaggcagtggcgcaccaatggcagacaataacgagggcgccgacggagtgggtaattcctcgggaaattggcattgcgattccacatggatgggcgacagagtcatcaccaccagcacccgcacctgggctctgcccacctacaacaaccatctgtacaagcaaatttccagccaatcaggagcatcgaacgacaaccactactttggctacagcaccccctgggggtattttgacttcaacagattccactgccacttttcgccacgtgactggcaaagactcatcaacaacaactggggattccggcccaagagactcagcttcaagctctttaacattcaagtcaaggaggtcacgcagaatgacggtacgacgacgattgccaataaccttaccagcacggttcaggtctttactgactcggagtaccagctcccgtacgtcctcggctcggcgcatcaaggatgcctcccgccgttcccagcagacgtcttcatggtgccacagtatggatacctcaccctgaacaacgggagtcaggcggtaggacgctcttcattttactgcctggagtacttcccttctcagatgcttcgcacgggaaacaactttaccttcagctacacctttgaggacgtgccttttcacagcagctacgctcacagccaaagtctggaccgtctcatgaatcctctcatcgaccaatacctgtattacttgagcaaaacaaacgctccaagcggaaccaccacgatgtccaggcttcagttttctcaggccggagcgagtgacattcgggaccagtctagaaactggcttcctggaccctgttaccgccagcagcgagtatcaaagacagctgcggacaacaacaacagtgattactcgtggactggagctaccaagtaccacctcaatggaagagactctctggtgaacccgggcccagctatggccagccacaaggatgatgaagaaaaatattttcctcagagcggggttctcatcttcgggaaacaaggctcaaataaaactaatgtggacattgaaaaggttatgattacagacgaagaggaaatcaggaccaccaatcccgtggctacggagcagtatggttctgtatctaccaaccttcaaagcggcaacacacaagcagctacctcagatgtcaacacacaaggcgttcttcctggcatggtctggcaggacagagatgtgtacctgcaggggcccatctgggcaaagattcctcacacggacggacactttcacccttctcccctcatgggcggatttggattgaagcaccctcccccacagattctcatcaagaataccccggtacctgcgaatccttcgaccaccttcagtgcggcaaagtttgcttccttcatcacacagtattccacgggacaggtcagcgtggagatagagtgggagctgcagaaggagaacagcaaacgctggaaccccgagatccagtatacttccaactacaacaaatctgttaatgtggactttactgtggacactaatggtgtgtattcagagcctcgccccattggcaccagatacctgactcgtaatctgtaa

SEQ ID NO: 3526 - DNA, 2208 bp, synthetic construct
  misc_feature 1..2208: note = source = /note="Description of Artificial Sequence: Synthetic polynucleotide"
  source 1..2208: mol_type = other DNA
atggctgccgatggttatcttccagattggctcgaggacactctctctgaaggaataagacagtggtggaagctcaaacctggcccaccaccgccaaagcccgcagagcggcataaggacgacagcaggggtcttgtgcttcctgggtacaagtacctcggacccttcaacggactcgacaagggggagccggtcaacgaggcagacgccgcggccctcgagcacgacaaggcctacgaccggcagctcgacagcggagacaacccgtacctcaagtacaaccacgccgacgcggagtttcaggagcgtcttaaagaagatacgtcttttgggggcaacctcggacgagcagtcttccaggcgaaaaagagggttcttgaacctctgggcctggttgaggaacctgttaagacggctccgggaaaaaagaggccggtagagcactctcctgtggagccagactcctcctcgggaaccggaaaggcgggccagcagcctgcaagaaaaagattgaatttcggtcagactggagacgcagactccgtacctgacccccagcctctcggacagccaccagcagccccctctggtctgggaactaatacgatggctacaggcagtggcacaccaatggcagacaataacgagggcgccgacggagtgggtaattcctcgggaaattggcattgcgattccacatggatgggcgacagagtcatcaccaccagcacccgcacctgggctctgcccacctacaacaaccatctgtacaagcaaatttccagccaatcaggagcatcgaacgacaaccactactttggctacagcaccccctgggggtattttgacttcaacagattccactgccacttttcgccacgtgactggcaaagactcatcaacaacaactggggattccggcccaagagactcagcttcaagctctttaacattcaagtcaaggaggtcacgcagaatgacggtacgacgacgattgccaataaccttaccagcacggttcaggtctttactgactcggagtaccagctcccgtacgtcctcggctcggcgcatcaaggatgcctcccgccgttcccagcagacgtcttcatggtgccacagtatggatacctcaccctgaacaacgggagtcaggcggtaggacgctcttcattttactgcctggagtacttcccttctcagatgcttcgcacgggaaacaactttaccttcagctacacctttgaggacgtgccttttcacagcagctacgctcacagccaaagtctggaccgtctcatgaatcctctcatcgaccaatacctgtattacttgagcaaaacaaacgctccaagcggaaccaccacgatgtccaggcttcagttttctcaggccggagcgagtgacattcgggaccagtctagaaactggcttcctggaccctgttaccgccagcagcgagtatcaaagacagctgcggacaacaacaacagtgattactcgtggactggagctaccaagtaccacctcaatggaagagactctctggtgaacccgggcccagctatggccagccacaaggatgatgaagaaaaatattttcctcagagcggggttctcatcttcgggaaacaaggctcaaataaaactaatgtggacattgaaaaggttatgattacagacgaagaggaaatcaggaccaccaatcccgtggctacggagcagtatggttctgtatctaccaaccttcaaagcggcaacacacaagcagctacctcagatgtcaacacacaaggcgttcttcctggcatggtctggcaggacagagatgtgtacctgcaggggcccatctgggcaaagattcctcacacggacggacactttcacccttctcccctcatgggcggatttggattgaagcaccctcccccacagattctcatcaagaataccccggtacctgcgaatccttcgaccaccttcagtgcggcaaagtttgcttccttcatcacacagtattccacgggacaggtcagcgtggagatagagtgggagctgcagaaggagaacagcaaacgctggaaccccgagatccagtatacttccaactacaacaaatctgttaatgtggactttactgtggacactaatggtgtgtattcagagcctcgccccattggcaccagatacctgactcgtaatctgtaa

SEQ ID NO: 3527 - DNA, 2208 bp, synthetic construct
  misc_feature 1..2208: note = source = /note="Description of Artificial Sequence: Synthetic polynucleotide"
  source 1..2208: mol_type = other DNA
atggctgccgatggttatcttccagattggctcgaggacactctctctgaaggaataagacagtggtggaagctcaaacctggcccaccaccgccaaagcccgcagagcggcataaggacgacagcaggggtcttgtgcttcctgggtacaagtacctcggacccttcaacggactcgacaagggggagccggtcaacgaggcagacgccgcggccctcgagcacgacaaggcctacgaccggcagctcgacagcggagacaacccgtacctcaagtacaaccacgccgacgcggagtttcaggagcgtcttaaagaagatacgtcttttgggggcaacctcggacgagcagtcttccaggcgaaaaagagggttcttgaacctctgggcctggttgaggaacctgttaagacggctccgggaaaaaagaggccggtagagcactctcctgtggagccagactcctcctcgggaaccggaaaggcgggccagcagcctgcaagaaaaagattgaatttcggtcagactggagacgcagactccgtacctgacccccagcctctcggacagccaccagcagccccctctggtctgggaactaatacgatggctacaggcagtggcgcaccaatggcagacaataacgagggcgccgacggagtgggtaattcctcgggaaattggcattgcgattccacatggatgggcgacagagtcatcaccaccagcacccgcacctgggctctgtccacctacaacaaccatctgtacaagcaaatttccagccaatcaggagcatcgaacgacaaccactactttggctacagcaccccctgggggtattttgacttcaacagattccactgccacttttcgccacgtgactggcaaagactcatcaacaacaactggggattccggcccaagagactcagcttcaagctctttaacattcaagtcaaggaggtcacgcagaatgacggtacgacgacgattgccaataaccttaccagcacggttcaggtctttactgactcggagtaccagctcccgtacgtcctcggctcggcgcatcaaggatgcctcccgccgttcccagcagacgtcttcatggtgccacagtatggatacctcaccctgaacaacgggagtcaggcggtaggacgctcttcattttactgcctggagtacttcccttctcagatgcttcgcacgggaaacaactttaccttcagctacacctttgaggacgtgccttttcacagcagctacgctcacagccaaagtctggaccgtctcatgaatcctctcatcgaccaatacctgtattacttgagcaaaacaaacgctccaagcggaaccaccacgatgtccaggcttcagttttctcaggccggagcgagtgacattcgggaccagtctagaaactggcttcctggaccctgttaccgccagcagcgagtatcaaagacagctgcggacaacaacaacagtgattactcgtggactggagctaccaagtaccacctcaatggaagagactctctggtgaacccgggcccagctatggccagccacaaggatgatgaagaaaaatattttcctcagagcggggttctcatcttcgggaaacaaggctcaaataaaactaatgtggacattgaaaaggttatgattacagacgaagaggaaatcaggaccaccaatcccgtggctacggagcagtatggttctgtatctaccaaccttcaaagcggcaacacacaagcagctacctcagatgtcaacacacaaggcgttcttcctggcatggtctggcaggacagagatgtgtacctgcaggggcccatctgggcaaagattcctcacacggacggacactttcacccttctcccctcatgggcggatttggattgaagcaccctcccccacagattctcatcaagaataccccggtacctgcgaatccttcgaccaccttcagtgcggcaaagtttgcttccttcatcacacagtattccacgggacaggtcagcgtggagatagagtgggagctgcagaaggagaacagcaaacgctggaaccccgagatccagtatacttccaactacaacaaatctgttaatgtggactttactgtggacactaatggtgtgtattcagagcctcgccccattggcaccagatacctgactcgtaatctgtaa

SEQ ID NO: 3528 - DNA, 2208 bp, synthetic construct
  misc_feature 1..2208: note = source = /note="Description of Artificial Sequence: Synthetic polynucleotide"
  source 1..2208: mol_type = other DNA
atggctgccgatggttatcttccagattggctcgaggacactctctctgaaggaataagacagtggtggaagctcaaacctggcccaccaccgccaaagcccgcagagcggcataaggacgacagcaggggtcttgtgcttcctgggtacaagtacctcggacccttcaacggactcgacaagggggagccggtcaacgaggcagacgccgcggccctcgagcacgacaaggcctacgaccggcagctcgacagcggagacaacccgtacctcaagtacaaccacgccgacgcggagtttcaggagcgtcttaaagaagatacgtcttttgggggcaacctcggacgagcagtcttccaggcgaaaaagagggttcttgaacctctgggcctggttgaggaacctgttaagacggctccgggaaaaaagaggccggtagagcactctcctgtggagccagactcctcctcgggaaccggaaaggcgggccagcagcctgcaagaaaaagattgaatttcggtcagactggagacgcagactccgtacctgacccccagcctctcggacagccaccagcagccccctctggtctgggaactaatacgatggctacaggcagtggcgcaccaatggcagacaataacgagggcgccgacggagtgggtaattcctcgggaaattggcattgcgattccacatggatgggcgacagagtcatcaccaccagcacccgcacctgggctctgcccacctacaacaaccatctgtacaagcaaatttccagccaatcaggagcatcgaacgacaaccactactttggctacagcaccccctgggggtattttgacttcaacagattccactgccacttttcgccacgtgactggcaaagactcatcaacaacaactggggattccggcccaagagactcagcttcaagctctttaacattcaagtcaaggaggtcacgcagaatgacggtacgacgacgattgccaataaccttaccagcacggttcaggtctttactgactcggagtaccagctcccgtacgtcctcggctcggcgcatcaaggatgcctcccgccgttcccagcagacgtcttcatggtgccacagtatggatacctcaccctgaacaacgggagtcaggcggtaggacgctcttcattttactgcctggagtacttcccttctcagatgcttcgcacgggaaacaactttaccttcagctacacctttgaggacgtgccttttcacagcagctacgctcacagccaaagtctggaccgtctcatgaatcctctcatcgaccaatacctgtattacttgagcaaaacaaacgctccaagcggaaccaccacgatgtccaggcttcagttttctcaggccggagcgagtgacattcgggaccagtctagaaactggcttcctggaccctgttaccgccagcagcgagtatcaaagacagctgtggacaacaacaacagtgattactcgtggactggagctaccaagtaccacctcaatggaagagactctctggtgaacccgggcccagctatggccagccacaaggatgatgaagaaaaatattttcctcagagcggggttctcatcttcgggaaacaaggctcaaataaaactaatgtggacattgaaaaggttatgattacagacgaagaggaaatcaggaccaccaatcccgtggctacggagcagtatggttctgtatctaccaaccttcaaagcggcaacacacaagcagctacctcagatgtcaacacacaaggcgttcttcctggcatggtctggcaggacagagatgtgtacctgcaggggcccatctgggcaaagattcctcacacggacggacactttcacccttctcccctcatgggcggatttggattgaagcaccctcccccacagattctcatcaagaataccccggtacctgcgaatccttcgaccaccttcagtgcggcaaagtttgcttccttcatcacacagtattccacgggacaggtcagcgtggagatagagtgggagctgcagaaggagaacagcaaacgctggaaccccgagatccagtatacttccaactacaacaaatctgttaatgtggactttactgtggacactaatggtgtgtattcagagcctcgccccattggcaccagatacctgactcgtaatctgtaa

SEQ ID NO: 3529 - DNA, 2208 bp, synthetic construct
  misc_feature 1..2208: note = source = /note="Description of Artificial Sequence: Synthetic polynucleotide"
  source 1..2208: mol_type = other DNA
atggctgccgatggttatcttccagattggctcgaggacactctctctgaaggaataagacagtggtggaagctcaaacctggcccaccaccgccaaagcccgcagagcggcataaggacgacagcaggggtcttgtgcttcctgggtacaagtacctcggacccttcaacggactcgacaagggggagccggtcaacgaggcagacgccgcggccctcgagcacgacaaggcctacgaccggcagctcgacagcggagacaacccgtacctcaagtacaaccacgccgacgcggagtttcaggagcgtcttaaagaagatacgtcttttgggggcaacctcggacgagcagtcttccaggcgaaaaagagggttcttgaacctctgggcctggttgaggaacctgttaagacggctccgggaaaaaagaggccggtagagcactctcctgtggagccagactcctcctcgggaaccggaaaggcgggccagcagcctgcaagaaaaagattgaatttcggtcagactggagacgcagactccgtacctgacccccagcctctcggacagccaccagcagccccctctggtctgggaactaatacgatggctacaggcagtggcgcaccaatggcagacaataacgagggcgccgacggagtgggtaattcctcgggaaattggcattgcgattccacatggatgggcgacagagtcatcaccaccagcacccgcacctgggctctgcccacctacaacaaccatctgtacaagcaaatttccagccaatcaggagcatcgaacgacaaccactactttggctacagcaccccctgggggtattttgacttcaacagattccactgccacttttcgccacgtgactggcaaagactcatcaacaacaactggggattccggcccaagagactcagcttcaagctctttaacattcaagtcaaggaggtcacgcagaatgacggtacgacgacgattgccaataaccttaccagcacggttcaggtctttactgactcggagtaccagctcccgtacgtcctcggctcggcgcatcaaggatgcctcccgccgttcccagcagacgtcttcatggtgccacagtatggatacctcaccctgaacaacgggagtcaggcggtaggacgctcttcattttactgcctggagtacttcccttctcagatacttcgcacgggaaacaactttaccttcagctacacctttgaggacgtgccttttcacagcagctacgctcacagccaaagtctggaccgtctcatgaatcctctcatcgaccaatacctgtattacttgagcaaaacaaacgctccaagcggaaccaccacgatgtccaggcttcagttttctcaggccggagcgagtgacattcgggaccagtctagaaactggcttcctggaccctgttaccgccagcagcgagtatcaaagacagctgcggacaacaacaacagtgattactcgtggactggagctaccaagtaccacctcaatggaagagactctctggtgaacccgggcccagctatggccagccacaaggatgatgaagaaaaatattttcctcagagcggggttctcatcttcgggaaacaaggctcaaataaaactaatgtggacattgaaaaggttatgattacagacgaagaggaaatcaggaccaccaatcccgtggctacggagcagtatggttctgtatctaccaaccttcaaagcggcaacacacaagcagctacctcagatgtcaacacacaaggcgttcttcctggcatggtctggcaggacagagatgtgtacctgcaggggcccatctgggcaaagattcctcacacggacggacactttcacccttctcccctcatgggcggatttggattgaagcaccctcccccacagattctcatcaagaataccccggtacctgcgaatccttcgaccaccttcagtgcggcaaagtttgcttccttcatcacacagtattccacgggacaggtcagcgtggagatagagtgggagctgcagaaggagaacagcaaacgctggaaccccgagatccagtatacttccaactacaacaaatctgttaatgtggactttactgtggacactaatggtgtgtattcagagcctcgccccattggcaccagatacctgactcgtaatctgtaa

SEQ ID NO: 3530 - DNA, 2208 bp, synthetic construct
  misc_feature 1..2208: note = source = /note="Description of Artificial Sequence: Synthetic polynucleotide"
  source 1..2208: mol_type = other DNA
atggctgccgatggttatcttccagattggctcgaggacactctctctgaaggaataagacagtggtggaagctcaaacctggcccaccaccgccaaagcccgcagagcggcataaggacgacagcaggggtcttgtgcttcctgggtacaagtacctcggacccttcaacggactcgacaagggggagccggtcaacgaggcagacgccgcggccctcgagcacgacaaggcctacgaccggcagctcgacagcggagacaacccgtacctcaagtacaaccacgccgacgcggagtttcaggagcgtcttaaagaagatacgtcttttgggggcaacctcggacgagcagtcttccaggcgaaaaagagggttcttgaacctctgggcctggttgaggaacctgttaagacggctccgggaaaaaagaggccggtagagcactctcctgtggagccagactcctcctcgggaaccggaaaggtgggccagcagcctgcaagaaaaagattgaatttcggtcagactggagacgcagactccgtacctgacccccagcctctcggacagccaccagcagccccctctggtctgggaactaatacgatggctacaggcagtggcgcaccaatggcagacaataacgagggcgccgacggagtgggtaattcctcgggaaattggcattgcgattccacatggatgggcgacagagtcatcaccaccagcacccgcacctgggctctgcccacctacaacaaccatctgtacaagcaaatttccagccaatcaggagcatcgaacgacaaccactactttggctacagcaccccctgggggtattttgacttcaacagattccactgccacttttcgccacgtgactggcaaagactcatcaacaacaactggggattccggcccaagagactcagcttcaagctctttaacattcaagtcaaggaggtcacgcagaatgacggtacgacgacgattgccaataaccttaccagcacggttcaggtctttactgactcggagtaccagctcccgtacgtcctcggctcggcgcatcaaggatgcctcccgccgttcccagcagacgtcttcatggtgccacagtatggatacctcaccctgaacaacgggagtcaggcggtaggacgctcttcattttactgcctggagtacttcccttctcagatgcttcgcacgggaaacaactttaccttcagctacacctttgaggacgtgccttttcacagcagctacgctcacagccaaagtctggaccgtctcatgaatcctctcatcgaccaatacctgtattacttgagcaaaacaaacgctccaagcggaaccaccacgatgtccaggcttcagttttctcaggccggagcgagtgacattcgggaccagtctagaaactggcttcctggaccctgttaccgccagcagcgagtatcaaagacagctgcggacaacaacaacagtgattactcgtggactggagctaccaagtaccacctcaatggaagagactctctggtgaacccgggcccagctatggccagccacaaggatgatgaagaaaaatattttcctcagagcggggttctcatcttcgggaaacaaggctcaaataaaactaatgtggacattgaaaaggttatgattacagacgaagaggaaatcaggaccaccaatcccgtggctacggagcagtatggttctgtatctaccaaccttcaaagcggcaacacacaagcagctacctcagatgtcaacacacaaggcgttcttcctggcatggtctggcaggacagagatgtgtacctgcaggggcccatctgggcaaagattcctcacacggacggacactttcacccttctcccctcatgggcggatttggattgaagcaccctcccccacagattctcatcaagaataccccggtacctgcgaatccttcgaccaccttcagtgcggcaaagtttgcttccttcatcacacagtattccacgggacaggtcagcgtggagatagagtgggagctgcagaaggagaacagcaaacgctggaaccccgagatccagtatacttccaactacaacaaatctgttaatgtggactttactgtggacactaatggtgtgtattcagagcctcgccccattggcaccagatacctgactcgtaatctgtaa

SEQ ID NO: 3531 - DNA, 2208 bp, synthetic construct
  misc_feature 1..2208: note = source = /note="Description of Artificial Sequence: Synthetic polynucleotide"
  source 1..2208: mol_type = other DNA
atggctgccgatggttatcttccagattggctcgaggacactctctctgaaggaataagacagtggtggaagctcaaacctggcccaccaccgccaaagcccgcagagcggcataaggacgacagcaggggtcttgtgcttcctgggtacaagtacctcggacccttcaacggactcgacaagggggagccggtcaacgaggcagacgccgcggccctcgagcacgacaaggcctacgaccggcagctcgacagcggagacaacccgtacctcaagtacaaccacgccgacgcggagtttcaggagcgtcttaaagaagatacgtcttttgggggcaacctcggacgagcagtcttccaggcgaaaaagagggttcttgaacctctgggcctggttgaggaacctgttaagacggctccgggaaaaaagaggccggtagagcactctcctgtggagccagactcctcctcgggaaccggaaaggcgggccagcagcctgcaagaaaaagattgaatttcggtcagactggagacgcagactccgtacctgacccccagcctctcggacagccaccagcagccccctctggtctgggaactaatacgatggctgcaggcagtggcgcaccaatggcagacaataacgagggcgccgacggagtgggtaattcctcgggaaattggcattgcgattccacatggatgggcgacagagtcatcaccaccagcacccgcacctgggctctgcccacctacaacaaccatctgtacaagcaaatttccagccaatcaggagcatcgaacgacaaccactactttggctacagcaccccctgggggtattttgacttcaacagattccactgccacttttcgccacgtgactggcaaagactcatcaacaacaactggggattccggcccaagagactcagcttcaagctctttaacattcaagtcaaggaggtcacgcagaatgacggtacgacgacgattgccaataaccttaccagcacggttcaggtctttactgactcggagtaccagctcccgtacgtcctcggctcggcgcatcaaggatgcctcccgccgttcccagcagacgtcttcatggtgccacagtatggatacctcaccctgaacaacgggagtcaggcggtaggacgctcttcattttactgcctggagtacttcccttctcagatgcttcgcacgggaaacaactttaccttcagctacacctttgaggacgtgccttttcacagcagctacgctcacagccaaagtctggaccgtctcatgaatcctctcatcgaccaatacctgtattacttgagcaaaacaaacgctccaagcggaaccaccacgatgtccaggcttcagttttctcaggccggagcgagtgacattcgggaccagtctagaaactggcttcctggaccctgttaccgccagcagcgagtatcaaagacagctgcggacaacaacaacagtgattactcgtggactggagctaccaagtaccacctcaatggaagagactctctggtgaacccgggcccagctatggccagccacaaggatgatgaagaaaaatattttcctcagagcggggttctcatcttcgggaaacaaggctcaaataaaactaatgtggacattgaaaaggttatgattacagacgaagaggaaatcaggaccaccaatcccgtggctacggagcagtatggttctgtatctaccaaccttcaaagcggcaacacacaagcagctacctcagatgtcaacacacaaggcgttcttcctggcatggtctggcaggacagagatgtgtacctgcaggggcccatctgggcaaagattcctcacacggacggacactttcacccttctcccctcatgggcggatttggattgaagcaccctcccccacagattctcatcaagaataccccggtacctgcgaatccttcgaccaccttcagtgcggcaaagtttgcttccttcatcacacagtattccacgggacaggtcagcgtggagatagagtgggagctgcagaaggagaacagcaaacgctggaaccccgagatccagtatacttccaactacaacaaatctgttaatgtggactttactgtggacactaatggtgtgtattcagagcctcgccccattggcaccagatacctgactcgtaatctgtaa

SEQ ID NO: 3532 - DNA, 2208 bp, synthetic construct
  misc_feature 1..2208: note = source = /note="Description of Artificial Sequence: Synthetic polynucleotide"
  source 1..2208: mol_type = other DNA
atggctgccgatggttatcttccagattggctcgaggacactctctctgaaggaataagacagtggtggaagctcaaacctggcccaccaccgccaaagcccgcagagcggcataaggacgacagcaggggtcttgtgcttcctgggtacaagtacctcggacccttcaacggactcgacaagggggagccggtcaacgaggcagacgccgcggccctcgagcacgacaaggcctacgaccggcagctcgacagcggagacaacccgtacctcaagtacaaccacgccgacgcggagtttcaggagcgtcttaaagaagatacgtcttttgggggcaacctcggacgagcagtcttccaggcgaaaaagagggttcttgaacctctgggcctggttgaggaacctgttaagacggctccgggaaaaaagaggccggtagagcactctcctgtggagccagactcctcctcgggaaccggaaaggcgggccagcagcctgcaagaaaaagattgaatttcggtcagactggagacgcagactccgtacctgacccccagcctctcggacagccaccagcagccccctctggtctgggaactaatacgatggctacaggcagtggcgcaccaatggcagacaataacgagggcgccgacggagtgggtaattcctcgggaaattggcattgcgattccacatggatgggcgacagagtcatcaccaccagcacccgcacctgggctctgcccacctacaacaaccatctgtacaagcaaatttccagccaatcaggagcatcgaacgacaaccactactttggctacagcaccccctgggggtattttgacttcaacagattccactgccacttttcgccacgtgactggcaaagactcatcaacaacaactggggattccggcccaagagactcagcttcaagctctttaacattcaagtcaaggaggtcacgcagaatgacggtacgacgacgattgccaataaccttaccagcacggttcaggtctttactgactcggagtaccagctcccgtacgtcctcggctcggcgcatcaaggatgcctcccgccgttcccagcagacgtcttcatggtgccacagtatggatacctcaccctgaacaacgggagtcaggcggtaggacgctcttcattttactgcctggagtacttcccttctcagatgcttcgcacgggaaacaactttaccttcagctacacctttgaggacgtgccttttcacagcagctacgctcacagccaaagtctggaccgtctcatgaatcctctcatcgaccaatacctgtattacttgagcaaaacaaacgctccaagcggaaccaccacgatgtccaggcttcagttttctcaggccggagcgagtgacattcgggaccagtctagaaactggcttcctggaccctgttaccgccagcagcgagtatcaaagacagctgcggacaacaacaacagtgattactcgtggactggagctaccaagtaccacctcaatggaagagactctctggtgaacccgggcccagctatggccagccacaaggatgatgaagaaaaatattttcctcagagcggggttctcatcttcgggaaacaaggctcaaataaaactaatgtggacattgaaaaggttatgattacagacgaagaggaaatcaggaccaccaatcccgtggctacggagcagtatggttctgtatctaccaaccttcaaagcgacaacacacaagcagctacctcagatgtcaacacacaaggcgttcttcctggcatggtctggcaggacagagatgtgtacctgcaggggcccatctgggcaaagattcctcacacggacggacactttcacccttctcccctcatgggcggatttggattgaagcaccctcccccacagattctcatcaagaataccccggtacctgcgaatccttcgaccaccttcagtgcggcaaagtttgcttccttcatcacacagtattccacgggacaggtcagcgtggagatagagtgggagctgcagaaggagaacagcaaacgctggaaccccgagatccagtatacttccaactacaacaaatctgttaatgtggactttactgtggacactaatggtgtgtattcagagcctcgccccattggcaccagatacctgactcgtaatctgtaa

SEQ ID NO: 3533 - DNA, 2208 bp, synthetic construct
  misc_feature 1..2208: note = source = /note="Description of Artificial Sequence: Synthetic polynucleotide"
  source 1..2208: mol_type = other DNA
atggctgccgatggttatcttccagattggctcgaggacactctctctgaaggaataagacagtggtggaagctcaaacctggcccaccaccgccaaagcccgcagagcggcataaggacgacagcaggggtcttgtgcttcctgggtacaagtacctcggacccttcaacggactcgacaagggggagccggtcaacgaggcagacgccgcggccctcgagcacgacaaggcctacgaccggcagctcgacagcggagacaacccgtacctcaagtacaaccacgccgacgcggagtttcaggagcgtcttaaagaagatacgtcttttgggggcaacctcggacgagcagtcttccaggcgaaaaagagggttcttgaacctctgggcctggttgaggaacctgttaagacggctccgggaaaaaagaggccggtagagcactctcctgtggagccagactcctcctcgggaaccggaaaggcgggccagcagcctgcaagaaaaagattgaatttcggtcagactggagacgcagactccgtacctgacccccagcctctcggacagccaccagcagccccctctggtctgggaactaatacgatggctacaggcagtggcgcaccaatggcagacaataacgagggcgccgacggagtgggtaattcctcgggaaattggcattgcgattccacatggatgggcgacagagtcatcaccaccagcacccgcacctgggctctgcccacctacaacaaccatctgtacaagcaaatttccagccaatcaggagcatcgaacgacaaccactactttggctacagcaccccctgggggtattttgacttcaacagattccactgccacttttcgccacgtgactggcaaagactcatcaacaacaactggggattccggcccaagagactcagcttcaagctctttaacattcaagtcaaggaggtcacgcagaatgacggtaygacgacgattgccaataaccttaccagcacggttcaggtctttactgactcggagtaccagctcccgtacgtcctcggctcggcgcatcaaggatgcctcccgccgttcccagcagacgtcttcatggtgccacagtatggatacctcaccctgaacaacgggagtcaggcggtaggacgctcttcattttactgcctggagtacttcccttctcagatgcttcgcacgggaaacaactttaccttcagctacacctttgaggacgtgccttttcacagcagctacgctcacagccaaagtctggaccgtctcatgaatcctctcatcgaccaatacctgtattacttgagcaaaacaaacgctccaagcggaaccaccacgatgtccaggcttcagttttctcaggccggagcgagtgacattcgggaccagtctagaaactggcttcctggaccctgttaccgccagcagcgagtatcaaagacagctgcggacaacaacaacagtgattactcgtggactggagctaccaagtaccacctcaatggaagagactctctggtgaacccgggcccagctatggccagccacaaggatgatgaagaaaaatattttcctcagagcggggttctcatcttcgggaaacaaggctcaaataaaactaatgtggacattgaaaaggttatgattacagacgaagaggaaatcaggaccaccaatcccgtggctacggagcagtatggttctgtatctaccaaccttcaaagcggcaacacacaagcagctacctcagatgtcaacacacaaggcgttcttcctggcatggtctggcaggacagagatgtgtacctgcaggggcccatctgggcaaagattcctcacacggacggacactttcacccttctcccctcatgggcggatttggattgaagcaccctcccccacagattctcatcaagaataccccggtacctgcgaatccttcgaccaccttcagtgcggcaaagtttgcttccttcatcacacagtattccacgggacaggtcagcgtggagatagagtgggagctgcagaaggagaacagcaaacgctggaaccccgagatccagtatacttccaactacaacaaatctgttaatgtggactttactgtggacactaatggtgtgtattcagagcctcgccccattggcaccagatacctgactcgtaatctgtaa

SEQ ID NO: 3534 - DNA, 2208 bp, synthetic construct
  misc_feature 1..2208: note = source = /note="Description of Artificial Sequence: Synthetic polynucleotide"
  source 1..2208: mol_type = other DNA
atggctgccgatggttatcttccagattggctcgaggacactctctctgaaggaataagacagtggtggaagctcaaacctggcccaccaccgccaaagcccgcagagcggcataaggacgacagcaggggtcttgtgcttcctgggtacaagtacctcggacccttcaacggactcgacaagggggagccggtcaacgaggcagacgccgcggccctcgagcacgacaaggcctacgaccggcagctcgacagcggagacaacccgtacctcaagtacaaccacgccgacgcggagtttcaggagcgtcttaaagaagatacgtcttttgggggcaacctcggacgagcagtcttccaggcgaaaaagagggttcttgaacctctgggcctggttgaggaacctgttaagacggctccgggaaaaaagaggccggtagagcactctcctgtggagccagactcctcctcgggaaccggaaaggcgggccagcagcctgcaagaaaaagattgaatttcggtcagactggagacgcagactccgtacctgacccccagcctctcggacagccaccagcagccccctctggtctgggaactaatacgatggctacaggcagtggcgcaccaatggcagacaataacgagggcgccgacggagtgggtaattcctcgggaaattggcattgcgattccacatggatgggcgacagagtcatcaccaccagcacccgcacctgggctctgcccacctacaacaaccatctgtacaagcaaatttccagccaatcaggagcatcgaacgacaaccactactttggctacagcaccccctgggggtattttgacttcaacagattccactgccacttttcgccacgtgactggcaaagactcatcaacaacaactggggattccggcccaagagactcagcttcaagctctttaacattcaagtcaaggaggtcacgcagaatgacggtacgacgacgattgccaataaccttaccagcacggttcaggtctttactgactcggagtaccagctcccgtacgtcctcggctcggcgcatcaaggatgcctcccgccgttcccagcagacgtcttcatggtgccacagtatggatacctcaccctgaacaacgggagtcaggcggtaggacgctcttcattttactgcctggagtacttcccttctcagatgcttcgcacgggaaacaactttaccttcagctacacctttgaggacgtgccttttcacagcagctacgctcacagccaaagtctggaccgtctcatgaatcctctcatcgaccaatacctgtattacttgagcaaaacaaacgctccaagcggaaccaccacgatgtccaggcttcagttttctcaggccggagcgagtgacattcgggaccagtctagaaactggcttcctggaccctgttaccgccagcagcgagtatcaaagacagctgcggacaacaacaacagtgattactcgtggactggagctaccaagtaccacctcaatggaagagactctctggtgaacccgggcccagctatggccagccacaaggatgatgaagaaaaatattttcctcagagcggggttctcatcttcgggaaacaaggctcaaataaaactaatgtggacattgaaaaggttatgattacagacgaagaggaaatcaggaccaccaatcccgtggctacggagcagtatggttctgtatctaccaaccttcaaagcggcaacacacaagcagctacctcagatgtcaacacacaaggcgttcttcctggcatggtctggcaggacagagatgtgtacctgcaggggcccatctgggcaaagattcctcacacggacggacactttcacccttctcccctcatgggcggatttggattgaagcaccctcccccacagattctcatcaagaataccccggtacctgcgaatccttcgaccaccttcagtgcggcaaagtttgcttccttcatcacacagtattccacgggacaggtcagcgtggagatagagtgggagctgcagaaggagaacagcaaacgctggaaccccgagatccagtatacttccaactacaacaaatctgttaatgtggactttactgtggacactaatggtgtgtattcagagcctcgccccattgacaccagatacctgactcgtaatctgtaa

SEQ ID NO: 3535 - DNA, 2208 bp, synthetic construct
  misc_feature 1..2208: note = source = /note="Description of Artificial Sequence: Synthetic polynucleotide"
  source 1..2208: mol_type = other DNA
atggctgccgatggttatcttccagattggctcgaggacactctctctgaaggaataagacagtggtggaagctcaaacctggcccaccaccgccaaagcccgcagagcggcataaggacgacagcaggggtcttgtgcttcctgggtacaagtacctcggacccttcaacggactcgacaagggggagccggtcaacgaggcagacgccgcggccctcgagcacgacaaggcctacgaccggcagctcgacagcggagacaacccgtacctcaagtacaaccacgccgacgcggagtttcaggagcgtcttaaagaagatacgtcttttgggggcaacctcggacgagcagtcttccaggcgaaaaagagggttcttgaacctctgggcctggttgaggaacctgttaagacggctccgggaaaaaagaggccggtagagcactctcctgtggagccagactcctcctcgggaaccggaaaggcgggccagcagcctgcaagaaaaagattgaatttcggtcagactggagacacagactccgtacctgacccccagcctctcggacagccaccagcagccccctctggtctgggaactaatacgatggctacaggcagtggcgcaccaatggcagacaataacgagggcgccgacggagtgggtaattcctcgggaaattggcattgcgattccacatggatgggcgacagagtcatcaccaccagcacccgcacctgggctctgcccacctacaacaaccatctgtacaagcaaatttccagccaatcaggagcatcgaacgacaaccactactttggctacagcaccccctgggggtattttgacttcaacagattccactgccacttttcgccacgtgactggcaaagactcatcaacaacaactggggattccggcccaagagactcagcttcaagctctttaacattcaagtcaaggaggtcacgcagaatgacggtacgacgacgattgccaataaccttaccagcacggttcaggtctttactgactcggagtaccagctcccgtacgtcctcggctcggcgcatcaaggatgcctcccgccgttcccagcagacgtcttcatggtgccacagtatggatacctcaccctgaacaacgggagtcaggcggtaggacgctcttcattttactgcctggagtacttcccttctcagatgcttcgcacgggaaacaactttaccttcagctacacctttgaggacgtgccttttcacagcagctacgctcacagccaaagtctggaccgtctcatgaatcctctcatcgaccaatacctgtattacttgagcaaaacaaacgctccaagcggaaccaccacgatgtccaggcttcagttttctcaggccggagcgagtgacattcgggaccagtctagaaactggcttcctggaccctgttaccgccagcagcgagtatcaaagacagctgcggacaacaacaacagtgattactcgtggactggagctaccaagtaccacctcaatggaagagactctctggtgaacccgggcccagctatggccagccacaaggatgatgaagaaaaatattttcctcagagcggggttctcatcttcgggaaacaaggctcaaataaaactaatgtggacattgaaaaggttatgattacagacgaagaggaaatcaggaccaccaatcccgtggctacggagcagtatggttctgtatctaccaaccttcaaagcggcaacacacaagcagctacctcagatgtcaacacacaaggcgttcttcctggcatggtctggcaggacagagatgtgtacctgcaggggcccatctgggcaaagattcctcacacggacggacactttcacccttctcccctcatgggcggatttggattgaagcaccctcccccacagattctcatcaagaataccccggtacctgcgaatccttcgaccaccttcagtgcggcaaagtttgcttccttcatcacacagtattccacgggacaggtcagcgtggagatagagtgggagctgcagaaggagaacagcaaacgctggaaccccgagatccagtatacttccaactacaacaaatctgttaatgtggactttactgtggacactaatggtgtgtattcagagcctcgccccattggcaccagatacctgactcgtaatctgtaa

SEQ ID NO: 3536 - DNA, 2208 bp, synthetic construct
  misc_feature 1..2208: note = source = /note="Description of Artificial Sequence: Synthetic polynucleotide"
  source 1..2208: mol_type = other DNA
atggctgccgatggttatcttccagattggctcgaggacactctctctgaaggaataagacagtggtggaagctcaaacctggcccaccaccgccaaagcccgcagagcggcataaggacgacagcaggggtcttgtgcttcctgggtacaagtacctcggacccttcaacggactcgacaagggggagccggtcaacgaggcagacgccgcggccctcgagcacgacaaggcctacgaccggcagctcgacagcggagacaacccgtacctcaagtacaaccacgccgacgcggagtttcaggagcgtcttaaagaagatacgtcttttgggggcaacctcggacgagcagtcttccaggcgaaaaagagggttcttgaacctctgggcctggttgaggaacctgttaagacgactccgggaaaaaagaggccggtagagcactctcctgtggagccagactcctcctcgggaaccggaaaggcgggccagcagcctgcaagaaaaagattgaatttcggtcagactggagacgcagactccgtacctgacccccagcctctcggacagccaccagcagccccctctggtctgggaactaatacgatggctacaggcagtggcgcaccaatggcagacaataacgagggcgccgacggagtgggtaattcctcgggaaattggcattgcgattccacatggatgggcgacagagtcatcaccaccagcacccgcacctgggctctgcccacctacaacaaccatctgtacaagcaaatttccagccaatcaggagcatcgaacgacaaccactactttggctacagcaccccctgggggtattttgacttcaacagattccactgccacttttcgccacgtgactggcaaagactcatcaacaacaactggggattccggcccaagagactcagcttcaagctctttaacattcaagtcaaggaggtcacgcagaatgacggtacgacgacgattgccaataaccttaccagcacggttcaggtctttactgactcggagtaccagctcccgtacgtcctcggctcggcgcatcaaggatgcctcccgccgttcccagcagacgtcttcatggtgccacagtatggatacctcaccctgaacaacgggagtcaggcggtaggacgctcttcattttactgcctggagtacttcccttctcagatgcttcgcacgggaaacaactttaccttcagctacacctttgaggacgtgccttttcacagcagctacgctcacagccaaagtctggaccgtctcatgaatcctctcatcgaccaatacctgtattacttgagcaaaacaaacgctccaagcggaaccaccacgatgtccaggcttcagttttctcaggccggagcgagtgacattcgggaccagtctagaaactggcttcctggaccctgttaccgccagcagcgagtatcaaagacagctgcggacaacaacaacagtgattactcgtggactggagctaccaagtaccacctcaatggaagagactctctggtgaacccgggcccagctatggccagccacaaggatgatgaagaaaaatattttcctcagagcggggttctcatcttcgggaaacaaggctcaaataaaactaatgtggacattgaaaaggttatgattacagacgaagaggaaatcaggaccaccaatcccgtggctacggagcagtatggttctgtatctaccaaccttcaaagcggcaacacacaagcagctacctcagatgtcaacacacaaggcgttcttcctggcatggtctggcaggacagagatgtgtacctgcaggggcccatctgggcaaagattcctcacacggacggacactttcacccttctcccctcatgggcggatttggattgaagcaccctcccccacagattctcatcaagaataccccggtacctgcgaatccttcgaccaccttcagtgcggcaaagtttgcttccttcatcacacagtattccacgggacaggtcagcgtggagatagagtgggagctgcagaaggagaacagcaaacgctggaaccccgagatccagtatacttccaactacaacaaatctgttaatgtggactttactgtggacactaatggtgtgtattcagagcctcgccccattggcaccagatacctgactcgtaatctgtaa

SEQ ID NO: 3537 - DNA, 2208 bp, synthetic construct
  misc_feature 1..2208: note = source = /note="Description of Artificial Sequence: Synthetic polynucleotide"
  source 1..2208: mol_type = other DNA
atggctgccgatggttatcttccagattggctcgaggacactctctctgaaggaataagacagtggtggaagctcaaacctggcccaccaccgccaaagcccgcagagcggcataaggacgacagcaggggtcttgtgcttcctgggtacaagtacctcggacccttcaacggactcgacaagggggagccggtcaacgaggcagacgccgcggccctcgagcacgacaaggcctacgaccggcagctcgacagcggagacaacccgtacctcaagtacaaccacgccgacgcggagtttcaggagcgtcttaaagaagatacgtcttttgggggcaacctcggacgagcagtcttccaggcgaaaaagagggttcttgaacctctgggcctggttgaggaacctgttaagacggctccgggaaaaaagaggccggtagagcactctcctgtggagccagactcctcctcgggaaccggaaaggcgggccagcagcctgcaagaaaaagattgaatttcggtcagactggagacgcagactccgtacctgacccccagcctctcggacagtcaccagcagccccctctggtctgggaactaatacgatggctacaggcagtggcgcaccaatggcagacaataacgagggcgccgacggagtgggtaattcctcgggaaattggcattgcgattccacatggatgggcgacagagtcatcaccaccagcacccgcacctgggctctgcccacctacaacaaccatctgtacaagcaaatttccagccaatcaggagcatcgaacgacaaccactactttggctacagcaccccctgggggtattttgacttcaacagattccactgccacttttcgccacgtgactggcaaagactcatcaacaacaactggggattccggcccaagagactcagcttcaagctctttaacattcaagtcaaggaggtcacgcagaatgacggtacgacgacgattgccaataaccttaccagcacggttcaggtctttactgactcggagtaccagctcccgtacgtcctcggctcggcgcatcaaggatgcctcccgccgttcccagcagacgtcttcatggtgccacagtatggatacctcaccctgaacaacgggagtcaggcggtaggacgctcttcattttactgcctggagtacttcccttctcagatgcttcgcacgggaaacaactttaccttcagctacacctttgaggacgtgccttttcacagcagctacgctcacagccaaagtctggaccgtctcatgaatcctctcatcgaccaatacctgtattacttgagcaaaacaaacgctccaagcggaaccaccacgatgtccaggcttcagttttctcaggccggagcgagtgacattcgggaccagtctagaaactggcttcctggaccctgttaccgccagcagcgagtatcaaagacagctgcggacaacaacaacagtgattactcgtggactggagctaccaagtaccacctcaatggaagagactctctggtgaacccgggcccagctatggccagccacaaggatgatgaagaaaaatattttcctcagagcggggttctcatcttcgggaaacaaggctcaaataaaactaatgtggacattgaaaaggttatgattacagacgaagaggaaatcaggaccaccaatcccgtggctacggagcagtatggttctgtatctaccaaccttcaaagcggcaacacacaagcagctacctcagatgtcaacacacaaggcgttcttcctggcatggtctggcaggacagagatgtgtacctgcaggggcccatctgggcaaagattcctcacacggacggacactttcacccttctcccctcatgggcggatttggattgaagcaccctcccccacagattctcatcaagaataccccggtacctgcgaatccttcgaccaccttcagtgcggcaaagtttgcttccttcatcacacagtattccacgggacaggtcagcgtggagatagagtgggagctgcagaaggagaacagcaaacgctggaaccccgagatccagtatacttccaactacaacaaatctgttaatgtggactttactgtggacactaatggtgtgtattcagagcctcgccccattggcaccagatacctgactcgtaatctgtaa

SEQ ID NO: 3538 - DNA, 2208 bp, synthetic construct
  misc_feature 1..2208: note = source = /note="Description of Artificial Sequence: Synthetic polynucleotide"
  source 1..2208: mol_type = other DNA
atggctgccgatggttatcttccagattggctcgaggacactctctctgaaggaataagacagtggtggaagctcaaacctggcccaccaccgccaaagcccgcagagcggcataaggacgacagcaggggtcttgtgcttcctgggtacaagtacctcggacccttcaacggactcgacaagggggagccggtcaacgaggcagacgccgcggccctcgagcacgacaaggcctacgaccggcagctcgacagcggagacaacccgtacctcaagtacaaccacgccgacgcggagtttcaggagcgtcttaaagaagatacgtcttttgggggcaacctcggacgagcagtcttccaggcgaaaaagagggttcttgaacctctgggcctggttgaggaacctgttaagacggctccgggaaaaaagaggccggtagagcactctcctgtggagccagactcctcctcgggaaccggaaaggcgggccagcagcctgcaagaaaaagattgaatttcggtcagactggagacgcagactccgtacctgacccccagcctctcggacagccaccagcagccccctctggtctgggaactaatacgatggctacaggcagtggcgcaccaatggcagacaataacgagggcgccgacggagtgggtaattcctcgggaaattggcattgcgattccacatggatgggcgacagagtcatcaccaccagcacccgcacctgggctctgcccacctacaacaaccatctgtacaagcaaatttccagccaatcaggagcatcgaacgacaaccactactttggctacagcaccccctgggggtattttgacttcaacagattccactgccacttttcgccacgtgactggcaaagactcatcaacaacaactggggattccggcccaagagactcagcttcaagctctttaacattcaagtcaaggaggtcacgcagaatgacggtacgacgacgattgccaataaccttaccagcacggttcaggtctttactgactcggagtaccagctcccgtacgtcctcggctcggcgcatcaaggatgcctcccgccgttcccagcagacgtcttcatggtgccacagtatggatacctcaccctgaacaacgggagtcaggcggtaggacgctcttcattttactgcctggagtacttcccttctcagatgcttcgcacgggaaacaactttaccttcagctacacctttgaggacgtgccttttcacagcagctacgctcacagccaaagtctggaccgtctcatgaatcctctcatcgaccaatacctgtattacttgagcaaaacaaacgctccaagcggaaccaccacgatgtccaggcttcagttttctcaggccggagcgagtgacattcgggaccagtctagaaactggcttcctggaccctgttaccgccagcagcgagtatcaaagacagctgcggacaacaacaacagtgattactcgtggactggagctaccaagtaccacctcaatggaagagactctctggtgaacccgggcccagctatggtcagccacaaggatgatgaagaaaaatattttcctcagagcggggttctcatcttcgggaaacaaggctcaaataaaactaatgtggacattgaaaaggttatgattacagacgaagaggaaatcaggaccaccaatcccgtggctacggagcagtatggttctgtatctaccaaccttcaaagcggcaacacacaagcagctacctcagatgtcaacacacaaggcgttcttcctggcatggtctggcaggacagagatgtgtacctgcaggggcccatctgggcaaagattcctcacacggacggacactttcacccttctcccctcatgggcggatttggattgaagcaccctcccccacagattctcatcaagaataccccggtacctgcgaatccttcgaccaccttcagtgcggcaaagtttgcttccttcatcacacagtattccacgggacaggtcagcgtggagatagagtgggagctgcagaaggagaacagcaaacgctggaaccccgagatccagtatacttccaactacaacaaatctgttaatgtggactttactgtggacactaatggtgtgtattcagagcctcgccccattggcaccagatacctgactcgtaatctgtaa

SEQ ID NO: 3539 - DNA, 2208 bp, synthetic construct
  misc_feature 1..2208: note = source = /note="Description of Artificial Sequence: Synthetic polynucleotide"
  source 1..2208: mol_type = other DNA
atggctgccgatggttatcttccagattggctcgaggacactctctctgaaggaataagacagtggtggaagctcaaacctggcccaccaccgccaaagcccgcagagcggcataaggacgacagcaggggtcttgtgcttcctgggtacaagtacctcggacccttcaacggactcgacaagggggagccggtcaacgaggcagacgccgcggccctcgagcacgacaaggcctacgaccggcagctcgacagcggagacaacccgtacctcaagtacaaccacgccgacgcggagtttcaggagcgtcttaaagaagatacgtcttttgggggcaacctcggacgagcagtcttccaggcgaaaaagagggttcttgaacctctgggcctggttgaggaacctgttaagacggctccgggaaaaaagaggccggtagagcactctcctgtggagccagactcctcctcgggaaccggaaaggcgggccagcagcctgcaagaaaaagattgaatttcggtcagactggagacgcagactccgtacctgacccccagcctctcggacagccaccagcagccccctctggtctgggaactaatacgatggctacaggcagtggcgcaccaatggcagacaataacgagggcgccgacggagtgggtaattcctcgggaaattggcattgcgattccacatggatgggcgacagagtcatcaccaccagcacccgcacctgggctctgcccacctacaacaaccatctgtacaagcaaatttccagccaatcaggagcatcgaacgacaaccactactttggctacagcaccccctgggggtattttgacttcaacagattccactgccacttttcgccacgtgactggcaaagactcatcaacaacaactggggattccggcccaagagactcagcttcaagctctttaacattcaagtcaaggaggtcacgcagaatgacggtacgacgacgattgccaataaccttaccagcacggttcaggtctttactgactcggagtaccagctcccgtacgtcctcggctcggcgcatcaaggatgcctcccgccgttcccagcagacgtcttcatggtgccacagtatggatacctcaccctgaacaacgggagtcaggcggtaggacgctcttcattttactgcctggagtacttcccttctcagatgcttcgcacgggaaacaactttaccttcagctacacctttgaggacgtgccttttcacagcagctacgctcacagccaaagtctggaccgtctcatgaatcctctcatcgaccaatacctgtattacttgagcaaaacaaacgctccaagcggaaccaccacgatgtccaggcttcagttttctcaggccggagcgagtgacattcgggaccagtctagaaactggcttcctggaccctgttaccgccagcagcgagtatcaaagacagctgcggacaacaacaacagtgattactcgtggactggagctaccaagtaccacctcaatggaagagactctctggtgaacccgggcccagctatggccagccacaaggatgatgaagaaaaatattttcctcagagcggggttctcatcttcgggaaacaaggctcaaataaaactaatgtggacattgaaaaggttatgattacagacgaagaggaaatcaggaccaccaatcccgtggctacggagcagtatggttctgtatctaccaaccttcaaagcggcaacacacaagcagctacctcagatgtcaacacacaaggcgttcttcctggcatggtctggcaggacagagatgtgtacctgcaggggcccatctgggcaaagattcctcacacggacggacactttcacccttctcccctcatgggcggatttggattgaagcaccctcccccacagattctcatcaagaataccccggtacctgcgaatccttcgaccaccttcagtgcggcaaagtttgcttccttcatcacacagtattccatgggacaggtcagcgtggagatagagtgggagctgcagaaggagaacagcaaacgctggaaccccgagatccagtatacttccaactacaacaaatctgttaatgtggactttactgtggacactaatggtgtgtattcagagcctcgccccattggcaccagatacctgactcgtaatctgtaa

SEQ ID NO: 3540 - DNA, 2208 bp, synthetic construct
  misc_feature 1..2208: note = source = /note="Description of Artificial Sequence: Synthetic polynucleotide"
  source 1..2208: mol_type = other DNA
atggctgccgatggttatcttccagattggctcgaggacactctctctgaaggaataagacagtggtggaagctcaaacctggcccaccaccgccaaagcccgcagagcggcataaggacgacagcaggggtcttgtgcttcctgggtacaagtacctcggacccttcaacggactcgacaagggggagccggtcaacgaggcagacgccgcggccctcgagcacgacaaggtctacgaccggcagctcgacagcggagacaacccgtacctcaagtacaaccacgccgacgcggagtttcaggagcgtcttaaagaagatacgtcttttgggggcaacctcggacgagcagtcttccaggcgaaaaagagggttcttgaacctctgggcctggttgaggaacctgttaagacggctccgggaaaaaagaggccggtagagcactctcctgtggagccagactcctcctcgggaaccggaaaggcgggccagcagcctgcaagaaaaagattgaatttcggtcagactggagacgcagactccgtacctgacccccagcctctcggacagccaccagcagccccctctggtctgggaactaatacgatggctacaggcagtggcgcaccaatggcagacaataacgagggcgccgacggagtgggtaattcctcgggaaattggcattgcgattccacatggatgggcgacagagtcatcaccaccagcacccgcacctgggctctgcccacctacaacaaccatctgtacaagcaaatttccagccaatcaggagcatcgaacgacaaccactactttggctacagcaccccctgggggtattttgacttcaacagattccactgccacttttcgccacgtgactggcaaagactcatcaacaacaactggggattccggcccaagagactcagcttcaagctctttaacattcaagtcaaggaggtcacgcagaatgacggtacgacgacgattgccaataaccttaccagcacggttcaggtctttactgactcggagtaccagctcccgtacgtcctcggctcggcgcatcaaggatgcctcccgccgttcccagcagacgtcttcatggtgccacagtatggatacctcaccctgaacaacgggagtcaggcggtaggacgctcttcattttactgcctggagtacttcccttctcagatgcttcgcacgggaaacaactttaccttcagctacacctttgaggacgtgccttttcacagcagctacgctcacagccaaagtctggaccgtctcatgaatcctctcatcgaccaatacctgtattacttgagcaaaacaaacgctccaagcggaaccaccacgatgtccaggcttcagttttctcaggccggagcgagtgacattcgggaccagtctagaaactggcttcctggaccctgttaccgccagcagcgagtatcaaagacagctgcggacaacaacaacagtgattactcgtggactggagctaccaagtaccacctcaatggaagagactctctggtgaacccgggcccagctatggccagccacaaggatgatgaagaaaaatattttcctcagagcggggttctcatcttcgggaaacaaggctcaaataaaactaatgtggacattgaaaaggttatgattacagacgaagaggaaatcaggaccaccaatcccgtggctacggagcagtatggttctgtatctaccaaccttcaaagcggcaacacacaagcagctacctcagatgtcaacacacaaggcgttcttcctggcatggtctggcaggacagagatgtgtacctgcaggggcccatctgggcaaagattcctcacacggacggacactttcacccttctcccctcatgggcggatttggattgaagcaccctcccccacagattctcatcaagaataccccggtacctgcgaatccttcgaccaccttcagtgcggcaaagtttgcttccttcatcacacagtattccacgggacaggtcagcgtggagatagagtgggagctgcagaaggagaacagcaaacgctggaaccccgagatccagtatacttccaactacaacaaatctgttaatgtggactttactgtggacactaatggtgtgtattcagagcctcgccccattggcaccagatacctgactcgtaatctgtaa

SEQ ID NO: 3541 - DNA, 2208 bp, synthetic construct
  misc_feature 1..2208: note = source = /note="Description of Artificial Sequence: Synthetic polynucleotide"
  source 1..2208: mol_type = other DNA
atggctgccgatggttatcttccagattggctcgaggacactctctctgaaggaataagacagtggtggaagctcaaacctggcccaccaccgccaaagcccgcagagcggcataaggacgacagcaggggtcttgtgcttcctgggtacaagtacctcggacccttcaacggactcgacaagggggagccggtcaacgaggcagacgccgcggccctcgagcacgacaaggcctacgaccggcagctcgacagcggagacaacccgtacctcaagtacaaccacgccgacgcggagtttcaggagcgtcttaaagaagatacgtcttttgggggcaacctcggacgagcagtcttccaggcgaaaaagagggttcttgaacctctgggcctggttgaggaacctgttaagacggctccgggaaaaaagaggccggtagagcactctcctgtggagccagactcctcctcgggaaccggaaaggcgggccagcagcctgcaagaaaaagattgaatttcggtcagactggagacgcagactccgtacctgacccccagcctctcggacagccaccagcagccccctctggtctgggaactaatacgatggctacaggcagtggcgcaccaatggcagacaataacgagggcgccgacggagtgggtaattcctcgggaaattggcattgcgattccacatggatgggcgacagagtcatcaccaccagcacccgcacctgggctctgcccacctacaacaaccatctgtacaagcaaatttccagccaatcaggagcatcgaacgacaaccactactttggctacagcaccccctgggggtattttgacttcaacagattccactgccacttttcgccacgtgactggcaaagactcatcaacaacaactggggattccggcccaagagactcagcttcaagctctttaacattcaagtcaaggaggtcacgcagaatgacggtacgacgacgattgccaataaccttaccagcacggttcaggtctttactgactcggagtaccagctcccgtacgtcctcggctcggcgcatcaaggatgcctcccgccgttcccagcagacgtcttcatggtgccacagtatggatacctcaccctgaacaacgggagtcaggcggtaggacgctcttcattttactgcctggagtacttcccttctcagatgcttcgcacgggaaacaactttaccttcagctacacctttgaggacgtgccttttcacagcagctacgctcacagccaaagtctggaccgtctcatgaatcctctcatcgaccaatacctgtattacttgagcaaaacaaacgctccaagcggaaccaccacgatgtccaggcttcagttttctcaggccggagcgagtgacattcgggaccagtctagaaactggcttcctggaccctgttaccgccagcagcgagtatcaaagacagctgcggacaacaacaacagtgattactcgtggactggagctaccaagtaccacctcaatggaagagactctctggtgaacccgggcccagctatggccagccacaaggatgatgaagaaaaatattttcctcagagcggggttctcatcttcgggaaacaaggctcaaataaaactaatgtggacattgaaaaggttatgattacagacgaagaggaaatcaggaccaccaatcccgtggctacggagcagtatggttctgtatctaccaaccttcaaagcggcaacacacaagcagctacctcagatgtcaacacacaaggcgttcttcctggcatggtctggcaggacagagatgtgtacctgcaggggcccatctgggcaaagattcctcacacggacggacactttcacccttctcccctcatgggcggatttggattgaagcaccctcccccacagattctcatcaagaataccccggtacctgcgaatccttcgaccaccttcagtgcggcaaagtttgcttccttcatcacacagtattccacgggacaggtcagcgtggagatagagtgggagctgcagaaggagaacaacaaacgctggaaccccgagatccagtatacttccaactacaacaaatctgttaatgtggactttactgtggacactaatggtgtgtattcagagcctcgccccattggcaccagatacctgactcgtaatctgtaa

SEQ ID NO: 3542 - DNA, 2208 bp, synthetic construct
  misc_feature 1..2208: note = source = /note="Description of Artificial Sequence: Synthetic polynucleotide"
  source 1..2208: mol_type = other DNA
atggctgccgatggttatcttccagattggctcgaggacactctctctgaaggaataagacagtggtggaagctcaaacctggcccaccaccgccaaagcccgcagagcggcataaggacgacagcaggggtcttgtgcttcctgggtacaagtacctcggacccttcaacggactcgacaagggggagccggtcaacgaggcagacgccgcggccctcgagcacgacaaggcctacgaccggcagctcgacagcggagacaacccgtacctcaagtacaaccacgccgacgcggagtttcaggagcgtcttaaagaagatacgtcttttgggggcaacctcggacgagcagtcttccaggcgaaaaagagggttcttgaacctctgggcctggttgaggaacctgttaagacggctccgggaaaaaagaggccggtagagcactctcctgtggagccagactcctcctcgggaaccggaaaggcgggccagcagcctacaagaaaaagattgaatttcggtcagactggagacgcagactccgtacctgacccccagcctctcggacagccaccagcagccccctctggtctgggaactaatacgatggctacaggcagtggcgcaccaatggcagacaataacgagggcgccgacggagtgggtaattcctcgggaaattggcattgcgattccacatggatgggcgacagagtcatcaccaccagcacccgcacctgggctctgcccacctacaacaaccatctgtacaagcaaatttccagccaatcaggagcatcgaacgacaaccactactttggctacagcaccccctgggggtattttgacttcaacagattccactgccacttttcgccacgtgactggcaaagactcatcaacaacaactggggattccggcccaagagactcagcttcaagctctttaacattcaagtcaaggaggtcacgcagaatgacggtacgacgacgattgccaataaccttaccagcacggttcaggtctttactgactcggagtaccagctcccgtacgtcctcggctcggcgcatcaaggatgcctcccgccgttcccagcagacgtcttcatggtgccacagtatggatacctcaccctgaacaacgggagtcaggcggtaggacgctcttcattttactgcctggagtacttcccttctcagatgcttcgcacgggaaacaactttaccttcagctacacctttgaggacgtgccttttcacagcagctacgctcacagccaaagtctggaccgtctcatgaatcctctcatcgaccaatacctgtattacttgagcaaaacaaacgctccaagcggaaccaccacgatgtccaggcttcagttttctcaggccggagcgagtgacattcgggaccagtctagaaactggcttcctggaccctgttaccgccagcagcgagtatcaaagacagctgcggacaacaacaacagtgattactcgtggactggagctaccaagtaccacctcaatggaagagactctctggtgaacccgggcccagctatggccagccacaaggatgatgaagaaaaatattttcctcagagcggggttctcatcttcgggaaacaaggctcaaataaaactaatgtggacattgaaaaggttatgattacagacgaagaggaaatcaggaccaccaatcccgtggctacggagcagtatggttctgtatctaccaaccttcaaagcggcaacacacaagcagctacctcagatgtcaacacacaaggcgttcttcctggcatggtctggcaggacagagatgtgtacctgcaggggcccatctgggcaaagattcctcacacggacggacactttcacccttctcccctcatgggcggatttggattgaagcaccctcccccacagattctcatcaagaataccccggtacctgcgaatccttcgaccaccttcagtgcggcaaagtttgcttccttcatcacacagtattccacgggacaggtcagcgtggagatagagtgggagctgcagaaggagaacagcaaacgctggaaccccgagatccagtatacttccaactacaacaaatctgttaatgtggactttactgtggacactaatggtgtgtattcagagcctcgccccattggcaccagatacctgactcgtaatctgtaa

SEQ ID NO: 3543 - DNA, 2208 bp, synthetic construct
  misc_feature 1..2208: note = source = /note="Description of Artificial Sequence: Synthetic polynucleotide"
  source 1..2208: mol_type = other DNA
atggctgccgatggttatcttccagattggctcgaggacactctctctgaaggaataagacagtggtggaagctcaaacctggcccaccaccgccaaagcccgcagagcggcataaggacgacagcaggggtcttgtgcttcctgggtacaagtacctcggacccttcaacggactcgacaagggggagccggtcaacgaggcagacgccgcggccctcgagcacgacaaggcctacgaccggcagctcgacagcggagacaacccgtacctcaagtacaaccacgccgacgcggagtttcaggagcgtcttaaagaagatacgtcttttgggggcaacctcggacgagcagtcttccaggcgaaaaagagggttcttgaacctctgggcctggttgaggaacctgttaagacggctccgggaaaaaagaggccggtagagcactctcctgtggagccagactcctcctcgggaaccggaaaggcgggccagcagcctgcaagaaaaagattgaatttcggtcagactggagacgcagactccgtacctgacccccagcctctcggacagccaccagcagccccctctggtctgggaactaatacgatggctacaggcagtggcgcaccaatggcagacaataacgagggcgccgacggagtgggtaattcctcgggaaattggcattgcgattccacatggatgggcgacagagtcatcaccaccagcacccgcacctgggctctgcccacctacaacaaccatctgtacaagcaaatttccagccaatcaggagcatcgaacgacaaccactactttggctacagcaccccctgggggtattttgacttcaacagattccactgccacttttcgccacgtgactggcaaagactcatcaacaacaactggggattccggcccaagagactcagcttcaagctctttaacattcaagtcaaggaggtcacgcagaatgacggtacgacgacgattgccaataaccttaccagcacggttcaggtctttactgactcggagtaccagctcccgtacgtcctcggctcggcgcatcaaggatgcctcccgccgttcccagcagacgtcttcatggtgccacagtatggatacctcaccctgaacaacgggagtcaggcggtaggacgctcttcattttactgcctggagtacttcccttctcagatgcttcgcacgggaaacaactttaccttcagctacacctttgaggacgtgccttttcacagcagctacgctcacagccaaagtctggaccgtctcatgaatcctctcatcgaccaatacctgtattacttgagcaaaacaaacgctccaagcggaaccaccacgatgtccaggcttcagttttctcaggccggagcgagtgacattcgggaccagtctagaaactggcttcctggaccctgttaccgccagcagcgagtatcaaagacagctgcggacaacaacaacagtgattactcgtggactggagctaccaagtaccacctcaatggaagagactctctggtgaacccgggcccagctatggccagccacaaggatgatgaagaaaaatattttcctcagagcggggttctcatcttcgggaaacaaggctcaaataaaactaatgtggacattgaaagggttatgattacagacgaagaggaaatcaggaccaccaatcccgtggctacggagcagtatggttctgtatctaccaaccttcaaagcggcaacacacaagcagctacctcagatgtcaacacacaaggcgttcttcctggcatggtctggcaggacagagatgtgtacctgcaggggcccatctgggcaaagattcctcacacggacggacactttcacccttctcccctcatgggcggatttggattgaagcaccctcccccacagattctcatcaagaataccccggtacctgcgaatccttcgaccaccttcagtgcggcaaagtttgcttccttcatcacacagtattccacgggacaggtcagcgtggagatagagtgggagctgcagaaggagaacagcaaacgctggaaccccgagatccagtatacttccaactacaacaaatctgttaatgtggactttactgtggacactaatggtgtgtattcagagcctcgccccattggcaccagatacctgactcgtaatctgtaa

SEQ ID NO: 3544 - DNA, 2208 bp, synthetic construct
  misc_feature 1..2208: note = source = /note="Description of Artificial Sequence: Synthetic polynucleotide"
  source 1..2208: mol_type = other DNA
atggctgccgatggttatcttccagattggctcgaggacactctctctgaaggaataagacagtggtggaagctcaaacctggcccaccaccgccaaagcccgcagagcggcataaggacgacagcaggggtcttgtgcttcctgggtacaagtacctcggacccttcaacggactcgacaagggggagccggtcaacgaggcagacgccgcggccctcgagcacgacaaggcctacgaccggcagctcgacagcggagacaacccgtacctcaagtacaaccacgccgacgcggagtttcaggagcgtcttaaagaagatacgtcttttgggggcaacctcggacgagcagtcttccaggcgaaaaagagggttcttgaacctctgggcctggttgaggaacctgttaagacggctccgggaaaaaagaggccggtagagcactctcctgtggagccagactcctcctcgggaaccggaaaggcgggccagcagcctgtaagaaaaagattgaatttcggtcagactggagacgcagactccgtacctgacccccagcctctcggacagccaccagcagccccctctggtctgggaactaatacgatggctacaggcagtggcgcaccaatggcagacaataacgagggcgccgacggagtgggtaattcctcgggaaattggcattgcgattccacatggatgggcgacagagtcatcaccaccagcacccgcacctgggctctgcccacctacaacaaccatctgtacaagcaaatttccagccaatcaggagcatcgaacgacaaccactactttggctacagcaccccctgggggtattttgacttcaacagattccactgccacttttcgccacgtgactggcaaagactcatcaacaacaactggggattccggcccaagagactcagcttcaagctctttaacattcaagtcaaggaggtcacgcagaatgacggtacgacgacgattgccaataaccttaccagcacggttcaggtctttactgactcggagtaccagctcccgtacgtcctcggctcggcgcatcaaggatgcctcccgccgttcccagcagacgtcttcatggtgccacagtatggatacctcaccctgaacaacgggagtcaggcggtaggacgctcttcattttactgcctggagtacttcccttctcagatgcttcgcacgggaaacaactttaccttcagctacacctttgaggacgtgccttttcacagcagctacgctcacagccaaagtctggaccgtctcatgaatcctctcatcgaccaatacctgtattacttgagcaaaacaaacgctccaagcggaaccaccacgatgtccaggcttcagttttctcaggccggagcgagtgacattcgggaccagtctagaaactggcttcctggaccctgttaccgccagcagcgagtatcaaagacagctgcggacaacaacaacagtgattactcgtggactggagctaccaagtaccacctcaatggaagagactctctggtgaacccgggcccagctatggccagccacaaggatgatgaagaaaaatattttcctcagagcggggttctcatcttcgggaaacaaggctcaaataaaactaatgtggacattgaaaaggttatgattacagacgaagaggaaatcaggaccaccaatcccgtggctacggagcagtatggttctgtatctaccaaccttcaaagcggcaacacacaagcagctacctcagatgtcaacacacaaggcgttcttcctggcatggtctggcaggacagagatgtgtacctgcaggggcccatctgggcaaagattcctcacacggacggacactttcacccttctcccctcatgggcggatttggattgaagcaccctcccccacagattctcatcaagaataccccggtacctgcgaatccttcgaccaccttcagtgcggcaaagtttgcttccttcatcacacagtattccacgggacaggtcagcgtggagatagagtgggagctgcagaaggagaacagcaaacgctggaaccccgagatccagtatacttccaactacaacaaatctgttaatgtggactttactgtggacactaatggtgtgtattcagagcctcgccccattggcaccagatacctgactcgtaatctgtaa

SEQ ID NO: 3545 - DNA, 2208 bp, synthetic construct
  misc_feature 1..2208: note = source = /note="Description of Artificial Sequence: Synthetic polynucleotide"
  source 1..2208: mol_type = other DNA
atggctgccgatggttatcttccagattggctcgaggacactctctctgaaggaataagacagtggtggaagctcaaacctggcccaccaccgccaaagcccgcagagcggcataaggacgacagcaggggtcttgtgcttcctgggtacaagtacctcggacccttcaacggactcgacaagggggagccggtcaacgaggcagacgccgcggccctcgagcacgacaaggcctacgaccggcagctcgacagcggagacaacccgtacctcaagtacaaccacgccgacgcggagtttcaggagcgtcttaaagaagatacgtcttttgggggcaacctcggacgagcagtcttccaggcgaaaaagagggttcttgaacctctgggcctggttgaggaacctgttaagacggctccgggaaaaaagaggccggtagagcactctcctgtggagccagactcctcctcgggaaccggaaaggcgggccagcagcctgcaagaaaaagattgaatttcggtcagactggagacgcagactccgtacctgacccccagcctctcggacagccaccagcagccccctctggtctgggaactaatacgatggctacaggcagtggcgcaccaatggcagacaataacgagggcgccgacggagtgggtaattcctcgggaaattggcattgcgattccacatggatgggcgacagagtcatcaccaccagcacccgcacctgggctctgcccacctacaacaaccatctgtacaagcaaatttccagccaatcaggagcatcgaacgacaaccactactttggctacagcaccccctgggggtattttgacttcaacagattccactgccacttttcgccacgtgactggcaaagactcatcaacaacaactggggattccggcccaagagactcagcttcaagctctttaacattcaagtcaaggaggtcacgcagaatgacggtacgacgacgattgccaataaccttaccagcacggttcaggtctttactgactcggagtaccagctcccgtacgtcctcggctcggcgcatcaaggatgcctcccgccgttcccagcagacgtcttcatggtgccacagtatggataccccaccctgaacaacgggagtcaggcggtaggacgctcttcattttactgcctggagtacttcccttctcagatgcttcgcacgggaaacaactttaccttcagctacacctttgaggacgtgccttttcacagcagctacgctcacagccaaagtctggaccgtctcatgaatcctctcatcgaccaatacctgtattacttgagcaaaacaaacgctccaagcggaaccaccacgatgtccaggcttcagttttctcaggccggagcgagtgacattcgggaccagtctagaaactggcttcctggaccctgttaccgccagcagcgagtatcaaagacagctgcggacaacaacaacagtgattactcgtggactggagctaccaagtaccacctcaatggaagagactctctggtgaacccgggcccagctatggccagccacaaggatgatgaagaaaaatattttcctcagagcggggttctcatcttcgggaaacaaggctcaaataaaactaatgtggacattgaaaaggttatgattacagacgaagaggaaatcaggaccaccaatcccgtggctacggagcagtatggttctgtatctaccaaccttcaaagcggcaacacacaagcagctacctcagatgtcaacacacaaggcgttcttcctggcatggtctggcaggacagagatgtgtacctgcaggggcccatctgggcaaagattcctcacacggacggacactttcacccttctcccctcatgggcggatttggattgaagcaccctcccccacagattctcatcaagaataccccggtacctgcgaatccttcgaccaccttcagtgcggcaaagtttgcttccttcatcacacagtattccacgggacaggtcagcgtggagatagagtgggagctgcagaaggagaacagcaaacgctggaaccccgagatccagtatacttccaactacaacaaatctgttaatgtggactttactgtggacactaatggtgtgtattcagagcctcgccccattggcaccagatacctgactcgtaatctgtaa

SEQ ID NO: 3546 - DNA, 2208 bp, synthetic construct
  misc_feature 1..2208: note = source = /note="Description of Artificial Sequence: Synthetic polynucleotide"
  source 1..2208: mol_type = other DNA
atggctgccgatggttatcttccagattggctcgaggacactctctctgaaggaataagacagtggtggaagctcaaacctggcccaccaccgccaaagcccgcagagcggcataaggacgacagcaggggtcttgtgcttcctgggtacaagtacctcggacccttcaacggactcgacaagggggagccggtcaacgaggcagacgccgcggccctcgagcacgacaaggcctacgaccggcagctcgacagcggagacaacccgtacctcaagtacaaccacgccgacgcggagtttcaggagcgtcttaaagaagatacgtcttttgggggcaacctcggacgagcagtcttccaggcgaaaaagagggttcttgaacctctgggcctggttgaggaacctgttaagacggctccgggaaaaaagaggccggtagagcactctcctgtggagccagactcctcctcgggaaccggaaaggcgggccagcagcctgcaagaaaaagattgaatttcggtcagactggagacgcagactccgtacctgacccccagtctctcggacagccaccagcagccccctctggtctgggaactaatacgatggctacaggcagtggcgcaccaatggcagacaataacgagggcgccgacggagtgggtaattcctcgggaaattggcattgcgattccacatggatgggcgacagagtcatcaccaccagcacccgcacctgggctctgcccacctacaacaaccatctgtacaagcaaatttccagccaatcaggagcatcgaacgacaaccactactttggctacagcaccccctgggggtattttgacttcaacagattccactgccacttttcgccacgtgactggcaaagactcatcaacaacaactggggattccggcccaagagactcagcttcaagctctttaacattcaagtcaaggaggtcacgcagaatgacggtacgacgacgattgccaataaccttaccagcacggttcaggtctttactgactcggagtaccagctcccgtacgtcctcggctcggcgcatcaaggatgcctcccgccgttcccagcagacgtcttcatggtgccacagtatggatacctcaccctgaacaacgggagtcaggcggtaggacgctcttcattttactgcctggagtacttcccttctcagatgcttcgcacgggaaacaactttaccttcagctacacctttgaggacgtgccttttcacagcagctacgctcacagccaaagtctggaccgtctcatgaatcctctcatcgaccaatacctgtattacttgagcaaaacaaacgctccaagcggaaccaccacgatgtccaggcttcagttttctcaggccggagcgagtgacattcgggaccagtctagaaactggcttcctggaccctgttaccgccagcagcgagtatcaaagacagctgcggacaacaacaacagtgattactcgtggactggagctaccaagtaccacctcaatggaagagactctctggtgaacccgggcccagctatggccagccacaaggatgatgaagaaaaatattttcctcagagcggggttctcatcttcgggaaacaaggctcaaataaaactaatgtggacattgaaaaggttatgattacagacgaagaggaaatcaggaccaccaatcccgtggctacggagcagtatggttctgtatctaccaaccttcaaagcggcaacacacaagcagctacctcagatgtcaacacacaaggcgttcttcctggcatggtctggcaggacagagatgtgtacctgcaggggcccatctgggcaaagattcctcacacggacggacactttcacccttctcccctcatgggcggatttggattgaagcaccctcccccacagattctcatcaagaataccccggtacctgcgaatccttcgaccaccttcagtgcggcaaagtttgcttccttcatcacacagtattccacgggacaggtcagcgtggagatagagtgggagctgcagaaggagaacagcaaacgctggaaccccgagatccagtatacttccaactacaacaaatctgttaatgtggactttactgtggacactaatggtgtgtattcagagcctcgccccattggcaccagatacctgactcgtaatctgtaa

SEQ ID NO: 3547 - DNA, 2208 bp, synthetic construct
  misc_feature 1..2208: note = source = /note="Description of Artificial Sequence: Synthetic polynucleotide"
  source 1..2208: mol_type = other DNA
atggctgccgatggttatcttccagattggctcgaggacactctctctgaaggaataagacagtggtggaagctcaaacctggcccaccaccgccaaagcccgcagagcggcataaggacgacagcaggggtcttgtgcttcctgggtacaagtacctcggacccttcaacggactcgacaagggggagccggtcaacgaggcagacgccgcggccctcgagcacgacaaggcctacgaccggcagctcgacagcggagacaacccgtacctcaagtacaaccacgccgacgcggagtttcaggagcgtcttaaagaagatacgtcttttgggggcaacctcggacgagcagtcttccaggcgaaaaagagggttcttgaacctctgggcctggttgaggaacctgttaagacggctccgggaaaaaagaggccggtagagcactctcctgtggagccagactcctcctcgggaaccggaaaggcgggccagcagcctgcaagaaaaagattgaatttcggtcagactggagacgcagactccgtacctgacccccagcctctcggacagccaccagcagccccctctggtctgggaactaatacgatggctacaggcagtggcgcaccaatggcagacaataacgagggcgccgacggagtgggtaattcctcgggaaattggcattgcgattccacatggatgggcgacagagtcatcaccaccagcacccgcacctgggctctgcccacctacaacaaccatctgtacaagcaaatttccagccaatcaggagcatcgaacgacaaccactactttggctacagcaccccctgggggtattttgacttcaacagattccactgccacttttcgccacgtgactggcaaagactcatcaacaacaactggggattccggcccaagagactcagcttcaagctctttaacattcaagtcaaggaggtcacgcagaatggcggtacgacgacgattgccaataaccttaccagcacggttcaggtctttactgactcggagtaccagctcccgtacgtcctcggctcggcgcatcaaggatgcctcccgccgttcccagcagacgtcttcatggtgccacagtatggatacctcaccctgaacaacgggagtcaggcggtaggacgctcttcattttactgcctggagtacttcccttctcagatgcttcgcacgggaaacaactttaccttcagctacacctttgaggacgtgccttttcacagcagctacgctcacagccaaagtctggaccgtctcatgaatcctctcatcgaccaatacctgtattacttgagcaaaacaaacgctccaagcggaaccaccacgatgtccaggcttcagttttctcaggccggagcgagtgacattcgggaccagtctagaaactggcttcctggaccctgttaccgccagcagcgagtatcaaagacagctgcggacaacaacaacagtgattactcgtggactggagctaccaagtaccacctcaatggaagagactctctggtgaacccgggcccagctatggccagccacaaggatgatgaagaaaaatattttcctcagagcggggttctcatcttcgggaaacaaggctcaaataaaactaatgtggacattgaaaaggttatgattacagacgaagaggaaatcaggaccaccaatcccgtggctacggagcagtatggttctgtatctaccaaccttcaaagcggcaacacacaagcagctacctcagatgtcaacacacaaggcgttcttcctggcatggtctggcaggacagagatgtgtacctgcaggggcccatctgggcaaagattcctcacacggacggacactttcacccttctcccctcatgggcggatttggattgaagcaccctcccccacagattctcatcaagaataccccggtacctgcgaatccttcgaccaccttcagtgcggcaaagtttgcttccttcatcacacagtattccacgggacaggtcagcgtggagatagagtgggagctgcagaaggagaacagcaaacgctggaaccccgagatccagtatacttccaactacaacaaatctgttaatgtggactttactgtggacactaatggtgtgtattcagagcctcgccccattggcaccagatacctgactcgtaatctgtaa

SEQ ID NO: 3548 - DNA, 2208 bp, synthetic construct
  misc_feature 1..2208: note = source = /note="Description of Artificial Sequence: Synthetic polynucleotide"
  source 1..2208: mol_type = other DNA
atggctgccgatggttatcttccagattggctcgaggacactctctctgaaggaataagacagtggtggaagctcaaacctggcccaccaccgccaaagcccgcagagcggcataaggacgacagcaggggtcttgtgcttcctgggtacaagtacctcggacccttcaacggactcgacaagggggagccggtcaacgaggcagacgccgcggccctcgagcacgacaaggcctacgaccggcagctcgacagcggagacaacccgtacctcaagtacaaccacgccgacgcggagtttcaggagcgtcttaaagaagatacgtcttttgggggcaacctcggacgagcagtcttccaggcgaaaaagagggttcttgaacctctgggcctggttgaggaacctgttaagacggctccgggaaaaaagaggccggtagagcactctcctgtggagccagactcctcctcgggaaccggaaaggcgggccagcagcctgcaagaaaaagattgaatttcggtcagactggagacgcagactccgtacctgacccccagcctctcggacagccaccagcagccccctctggtctgggaactaatacgatggctacaggcagtggcgcaccaatggcagacaataacgagggcgccgacggagtgggtaattcctcgggaaattggcattgcgattccacatggatgggcgacagagtcatcaccaccagcacccgcacctgggctctgcccacctacaacaaccatctgtacaagcaaatttccagccaatcaggagcatcgaacgacaaccactactttggctacagcaccccctgggggtattttgacttcaacagattccactgccacttttcgccacgtgactggcaaagactcatcaacaacaactggggattccggcccaagagactcagcttcaagctctttaacattcaagtcaaggaggtcacgcagaatgacggtacgacgacgattgccaataaccttaccagcacggttcaggtctttactgactcggagtaccagctcccgtacgtcctcggctcggcgcatcaaggatgcctcccgccgttcccagcagacgtcttcatggtgccacagtatggatacctcaccctgaacaacgggagtcaggcggtaggacgctcttcattttactgcctggagtacttcccttctcagatgcttcgcacgggaaacaactttaccttcagctacacctttgaggacgtgccttttcacagcagctacgctcacagccaaagtctggaccgtctcatgaatcctctcatcgaccaatacctgtattacttgagcaaaacaaacgctccaagcggaaccaccacgatgtccgggcttcagttttctcaggccggagcgagtgacattcgggaccagtctagaaactggcttcctggaccctgttaccgccagcagcgagtatcaaagacagctgcggacaacaacaacagtgattactcgtggactggagctaccaagtaccacctcaatggaagagactctctggtgaacccgggcccagctatggccagccacaaggatgatgaagaaaaatattttcctcagagcggggttctcatcttcgggaaacaaggctcaaataaaactaatgtggacattgaaaaggttatgattacagacgaagaggaaatcaggaccaccaatcccgtggctacggagcagtatggttctgtatctaccaaccttcaaagcggcaacacacaagcagctacctcagatgtcaacacacaaggcgttcttcctggcatggtctggcaggacagagatgtgtacctgcaggggcccatctgggcaaagattcctcacacggacggacactttcacccttctcccctcatgggcggatttggattgaagcaccctcccccacagattctcatcaagaataccccggtacctgtgaatccttcgaccaccttcagtgcggcaaagtttgcttccttcatcacacagtattccacgggacaggtcagcgtggagatagagtgggagctgcagaaggagaacagcaaacgctggaaccccgagatccagtatacttccaactacaacaaatctgttaatgtggactttactgtggacactaatggtgtgtattcagagcctcgccccattggcaccagatacctgactcgtaatctgtaa

SEQ ID NO: 3549 - DNA, 2208 bp, synthetic construct
  misc_feature 1..2208: note = source = /note="Description of Artificial Sequence: Synthetic polynucleotide"
  source 1..2208: mol_type = other DNA
atggctgccgatggttatcttccagattggctcgaggacactctctctgaaggaataagacagtggtggaagctcaaacctggcccaccaccgccaaagcccgcagagcggcataaggacgacagcaggggtcttgtgcttcctgggtacaagtacctcggacccttcaacggactcgacaagggggagccggtcaacgaggcagacgccgcggccctcgagcacgacaaggcctacgaccggcagctcgacagcggagacaacccgtacctcaagtacaaccacgccgacgcggagtttcaggagcgtcttaaagaagatacgtcttttgggggcaacctcggacgagcagtcttccaggcgaaaaagagggttcttgaacctctgggcctggttgaggaacctgttaagacggctccgggaaaaaagaggccggtagagcactctcctgtggagccagactcctcctcgggaaccggaaaggcgggccagcagcctgcaagaaaaagattgaatttcggtcagactggagacgcagactccgtacctgacccccagcctctcggacagccaccagcagccccctctggtctgggaactaatacgatggctacaggcagtggcgcaccaatggcagacaataacgagggcgccgacggagtgggtaattcctcgggaaattggcattgcgattccacatggatgggcgacagagtcatcaccaccagcacccgcacctgggctctgcccacctacaacaaccatctgtacaagcaaatttccagccaatcaggagcatcgaacgacaaccactactttggctacagcaccccctgggggtattttgacttcaacagattccactgccacttttcgccacgtgactggcaaagactcatcaacaacaactggggattccggcccaagagactcagcttcaagctctttaacattcaagtcaaggaggtcacgcagaatgacggtacgacgacgattgccaataaccttaccagcacggttcaggtctttactgactcggagtaccagctcccgtacgtcctcggctcggcgcatcaaggatgcctcccgccgttcccagcagacgtcttcatggtgccacagtatggatacctcaccctgaacaacgggagtcaggcggtaggacgctcttcattttactgcctggagtacttcccttctcagatgcttcgcacgggaaacaactttaccttcagctacacctttgaggacgtgccttttcacagcagctacgctcacagccaaagtctggaccgtctcatgaatcctctcatcgaccaatacctgtattacttgagcaaaacaaacgctccaagcggaaccaccacgatgtccaggcttcagttttctcaggccggagcgagtgacattcgggaccagtctagaaactggcttcctggaccctgttaccgccagcagcgagtatcaaagacagctgcggacaacaacaacagtgattactcgtggactggagctaccaagtaccacctcaatggaagagactctctggtgaacccgggcccaactatggccagccacaaggatgatgaagaaaaatattttcctcagagcggggttctcatcttcgggaaacaaggctcaaataaaactaatgtggacattgaaaaggttatgattacagacgaagaggaaatcaggaccaccaatcccgtggctacggagcagtatggttctgtatctaccaaccttcaaagcggcaacacacaagcagctacctcagatgtcaacacacaaggcgttcttcctggcatggtctggcaggacagagatgtgtacctgcaggggcccatctgggcaaagattcctcacacggacggacactttcacccttctcccctcatgggcggatttggattgaagcaccctcccccacagattctcatcaagaataccccggtacctgcgaatccttcgaccaccttcagtgcggcaaagtttgcttccttcatcacacagtattccacgggacaggtcagcgtggagatagagtgggagctgcagaaggagaacagcaaacgctggaaccccgagatccagtatacttccaactacaacaaatctgttaatgtggactttactgtggacactaatggtgtgtattcagagcctcgccccattggcaccagatacctgactcgtaatctgtaa

SEQ ID NO: 3550 - DNA, 2208 bp, synthetic construct
  misc_feature 1..2208: note = source = /note="Description of Artificial Sequence: Synthetic polynucleotide"
  source 1..2208: mol_type = other DNA
atggctgccgatggttatcttccagattggctcgaggacactctctctgaaggaataagacagtggtggaagctcaaacctggcccaccaccgccaaagcccgcagagcggcataaggacgacagcaggggtcttgtgcttcctgggtacaagtacctcggacccctcaacggactcgacaagggggagccggtcaacgaggcagacgccgcggccctcgagcacgacaaggcctacgaccggcagctcgacagcggagacaacccgtacctcaagtacaaccacgccgacgcggagtttcaggagcgtcttaaagaagatacgtcttttgggggcaacctcggacgagcagtcttccaggcgaaaaagagggttcttgaacctctgggcctggttgaggaacctgttaagacggctccgggaaaaaagaggccggtagagcactctcctgtggagccagactcctcctcgggaaccggaaaggcgggccagcagcctgcaagaaaaagattgaatttcggtcagactggagacgcagactccgtacctgacccccagcctctcggacagccaccagcagccccctctggtctgggaactaatacgatggctacaggcagtggcgcaccaatggcagacaataacgagggcgccgacggagtgggtaattcctcgggaaattggcattgcgattccacatggatgggcgacagagtcatcaccaccagcacccgcacctgggctctgcccacctacaacaaccatctgtacaagcaaatttccagccaatcaggagcatcgaacgacaaccactactttggctacagcaccccctgggggtattttgacttcaacagattccactgccacttttcgccacgtgactggcaaagactcatcaacaacaactggggattccggcccaagagactcagcttcaagctctttaacattcaagtcaaggaggtcacgcagaatgacggtacgacgacgattgccaataaccttaccagcacggttcaggtctttactgactcggagtaccagctcccgtacgtcctcggctcggcgcatcaaggatgcctcccgccgttcccagcagacgtcttcatggtgccacagtatggatacctcaccctgaacaacgggagtcaggcggtaggacgctcttcattttactgcctggagtacttcccttctcagatgcttcgcacgggaaacaactttaccttcagctacacctttgaggacgtgccttttcacagcagctacgctcacagccaaagtctggaccgtctcatgaatcctctcatcgaccaatacctgtattacttgagcaaaacaaacgctccaagcggaaccaccacgatgtccaggcttcagttttctcaggccggagcgagtgacattcgggaccagtctagaaactggcttcctggaccctgttaccgccagcagcgagtatcaaagacagctgcggacaacaacaacagtgattactcgtggactggagctaccaagtaccacctcaatggaagagactctctggtgaacccgggcccagctatggccagccacaaggatgatgaagaaaaatattttcctcagagcggggttctcatcttcgggaaacaaggctcaaataaaactaatgtggacattgaaaaggttatgattacagacgaagaggaaatcaggaccaccaatcccgtggctacggagcagtatggttctgtatctaccaaccttcaaagcggcaacacacaagcagctacctcagatgtcaacacacaaggcgttcttcctggcatggtctggcaggacagagatgtgtacctgcaggggcccatctgggcaaagattcctcacacggacggacactttcacccttctcccctcatgggcggatttggattgaagcaccctcccccacagattctcatcaagaataccccggtacctgcgaatccttcgaccaccttcagtgcggcaaagtttgcttccttcatcacacagtattccacgggacaggtcagcgtggagatagagtgggagctgcagaaggagaacagcaaacgctggaaccccgagatccagtatacttccaactacaacaaatctgttaatgtggactttactgtggacactaatggtgtgtattcagagcctcgccccattggcaccagatacctgactcgtaatctgtaa

SEQ ID NO: 3551 - DNA, 2208 bp, synthetic construct
  misc_feature 1..2208: note = source = /note="Description of Artificial Sequence: Synthetic polynucleotide"
  source 1..2208: mol_type = other DNA
atggctgccgatggttatcttccagattggctcgaggacactctctctgaaggaataagacagtggtggaagctcaaacctggcccaccaccgccaaagcccgcagagcggcataaggacgacagcaggggtcttgtgcttcctgggtacaagtacctcggacccttcaacggactcgacaagggggagccggtcaacgaggcagacgccgcggccctcgagcacgacaaggcctacgaccggcagctcgacagcggagacaacccgtacctcaagtacaaccacgccgacgcggagtttcaggagcgtcttaaagaagatacgtcttttgggggcaacctcggacgagcagtcttccaggcgaaaaagagggttcttgaacctctgggcctggttgaggaacctgttaagacggctccgggaaaaaagaggccggtagagcactctcctgtggagccagactcctcctcgggaaccggaaaggcgggccagcagcctgcaagaaaaagattgaatttcggtcagactggagacgcagactccgtacctgacccccagcctctcggacagccaccagcagccccctctggtctgggaactaatacgatggctacaggcagtggcgcaccaatggcagacaataacgagggcgccgacggagtgggtaattcctcgggaaattggcattgcgattccacatggatgggcgacagagtcatcaccaccagcacccgcacctgggctctgcccacctacaacaaccatctgtacaagcaaatttccagccaatcaggagcatcgaacgacaaccactactttggctacagcaccccctgggggtattttgacttcaacagattccactgccacttttcgccacgtgactggcaaagactcatcaacaacaactggggattccggcccaagagactcagcttcaagctctttaacattcaagtcaaggaggtcacgcagaatgacggtacgacgacgattgccaataaccttaccagcacggttcaggtctttactgactcggagtaccagctcccgtacgtcctcggctcggcgcatcaaggatgcctcccgccgttcccagcagacgtcttcatggtgccacagtatggatacctcaccctgaacaacgggagtcaggcggtaggacgctcttcattttactgcctggagtacttcccttctcagatgcttcgcacgggaaacaactttaccttcagctacacctttgaggacgtgccttttcacagcagctacgctcacagccaaagtctggaccgtctcatgaatcctctcatcgaccaatacctgtattacttgagcaaaacaaacgctccaagcggaaccaccacgatgtccaggcttcagttttctcaggccggagcgagtgacattcgggaccagtctagaaactggcttcctggaccctgttaccgccagcagcgagtatcaaagacagctgcggacaacaacaacagtgattactcgtggactggagctaccaagtaccacctcaatggaagagactctctggtgaacccgggcccagctatgaccagccacaaggatgatgaagaaaaatattttcctcagagcggggttctcatcttcgggaaacaaggctcaaataaaactaatgtggacattgaaaaggttatgattacagacgaagaggaaatcaggaccaccaatcccgtggctacggagcagtatggttctgtatctaccaaccttcaaagcggcaacacacaagcagctacctcagatgtcaacacacaaggcgttcttcctggcatggtctggcaggacagagatgtgtacctgcaggggcccatctgggcaaagattcctcacacggacggacactttcacccttctcccctcatgggcggatttggattgaagcaccctcccccacagattctcatcaagaataccccggtacctgcgaatccttcgaccaccttcagtgcggcaaagtttgcttccttcatcacacagtattccacgggacaggtcagcgtggagatagagtgggagctgcagaaggagaacagcaaacgctggaaccccgagatccagtatacttccaactacaacaaatctgttaatgtggactttactgtggacactaatggtgtgtattcagagcctcgccccattggcaccagatacctgactcgtaatctgtaa

SEQ ID NO: 3552 - DNA, 2208 bp, synthetic construct
  misc_feature 1..2208: note = source = /note="Description of Artificial Sequence: Synthetic polynucleotide"
  source 1..2208: mol_type = other DNA
atggctgccgatggttatcttccagattggctcgaggacactctctctgaaggaataagacagtggtggaagctcaaacctggcccaccaccgccaaagcccgcagagcggcataaggacgacagcaggggtcttgtgcttcctgggtacaagtacctcggacccttcaacggactcgacaagggggagccggtcaacgaggcagacgccgcggccctcgagcacgacaaggcctacgaccggcagctcgacagcggagacaacccgtacctcaagtacaaccacgccgacgcggagtttcaggagcgtcttaaagaagatacgtcttttgggggcaacctcggacgagcagtcttccaggcgaaaaagagggttcttgaacctctgggcctggttgaggaacctgttaagacggctccgggaaaaaagaggccggtagagcactctcctgtggagccagactcctcctcgggaaccggaaaggcgggccagcagcctgcaagaaaaagattgaatttcggtcagactggagacgcagactccgtacctgacccccagcctctcggacagccaccagcagccccctctggtctgggaactaatacgatggctacaggcagtggcgcaccaatggcagacaataacgagggcgccgacggagtgggtaattcctcgggaaattggcattgcgattccacatggatgggcgacagagtcatcaccaccagcacccgcacctgggctctgcccacctacaacaaccatctgtacaagcaaatttccagccaatcaggagcatcgaacgacaaccactactttggctacagcaccccctgggggtattttgacttcaacagattccactgccacttttcgccacgtgactggcaaagactcatcaacaacaactggggattccggcccaagagactcagcttcaagctctttaacattcaagtcaaggaggtcacgcagaatgacggtacgacgacgattgccaataaccttaccagcacggttcaggtctttactgactcggagtaccagctcccgtacgtcctcggctcggcgcatcaaggatgcctcccgccgttcccagcagacgtcttcatggtgccacagtatggatacctcaccctgaacaacgggagtcaggcggtaggacgctcttcattttactgcctggagtacttcccttctcagatgcttcgcacgggaaacaactttaccttcagctacacctttgaggacgtgccttttcacagcagctacgctcacagccaaagtctggaccgtctcatgaatcctctcatcgaccaatacctgtattacttgagcaaaacaaacgctccaagcggaaccaccacgatgtccaggcttcagttttctcaggccggagcgagtgacattcgggaccagtctagaaactggcttcctggaccctgttaccgccagcagcgagtatcaaagacagctgcggacaacaacaacagtgattactcgtggactggagctaccaagtaccacctcaatggaagagactctctggtgaacccgggcccagctatggccagccacaaggatgatgaagaaaaatattttcctcagagcggggttctcatcttcgggaaacaaggctcaaataaaactaatgtggacattgaaaaggttatgattacagacgaagaggaaatcaggaccaccaatcccgtggctacggagcagtatggttctgtatctaccaaccttcaaagcggcaacacacaagcagctacctcagatgtcaacacacaaggcgttcttcctggcatggtctggcaggacagagatgtgtacctgcaggggcccatctggacaaagattcctcacacggacggacactttcacccttctcccctcatgggcggatttggattgaagcaccctcccccacagattctcatcaagaataccccggtacctgcgaatccttcgaccaccttcagtgcggcaaagtttgcttccttcatcacacagtattccacgggacaggtcagcgtggagatagagtgggagctgcagaaggagaacagcaaacgctggaaccccgagatccagtatacttccaactacaacaaatctgttaatgtggactttactgtggacactaatggtgtgtattcagagcctcgccccattggcaccagatacctgactcgtaatctgtaa

SEQ ID NO: 3553 - DNA, 2208 bp, synthetic construct
  misc_feature 1..2208: note = source = /note="Description of Artificial Sequence: Synthetic polynucleotide"
  source 1..2208: mol_type = other DNA
atggctgccgatggttatcttccagattggctcgaggacactctctctgaaggaataagacagtggtggaagctcaaacctggcccaccaccgccaaagcccgcagagcggcataaggacgacagcaggggtcttgtgcttcctgggtacaagtacctcggacccttcaacggactcgacaagggggagccggtcaacgaggcagacgccgcggccctcgagcacgacaaggcctacgaccggcagctcgacagcggagacaacccgtacctcaagtacaaccacgccgacgcggagtttcaggagcgtcttaaagaagatacgtcttttgggggcaacctcggacgagcagtcttccaggcgaaaaagagggttcttgaacctctgggcctggttgaggaacctgttaagacggctccgggaaaaaagaggccggtagagcactctcctgtggagccagactcctcctcgggaaccggaaaggcgggccagcagcctgcaagaaaaagattgaatttcggtcagactggagacgcagactccgtacctgacccccagcctctcggacagccaccagtagccccctctggtctgggaactaatacgatggctacaggcagtggcgcaccaatggcagacaataacgagggcgccgacggagtgggtaattcctcgggaaattggcattgcgattccacatggatgggcgacagagtcatcaccaccagcacccgcacctgggctctgcccacctacaacaaccatctgtacaagcaaatttccagccaatcaggagcatcgaacgacaaccactactttggctacagcaccccctgggggtattttgacttcaacagattccactgccacttttcgccacgtgactggcaaagactcatcaacaacaactggggattccggcccaagagactcagcttcaagctctttaacattcaagtcaaggaggtcacgcagaatgacggtacgacgacgattgccaataaccttaccagcacggttcaggtctttactgactcggagtaccagctcccgtacgtcctcggctcggcgcatcaaggatgcctcccgccgttcccagcagacgtcttcatggtgccacagtatggatacctcaccctgaacaacgggagtcaggcggtaggacgctcttcattttactgcctggagtacttcccttctcagatgcttcgcacgggaaacaactttaccttcagctacacctttgaggacgtgccttttcacagcagctacgctcacagccaaagtctggaccgtctcatgaatcctctcatcgaccaatacctgtattacttgagcaaaacaaacgctccaagcggaaccaccacgatgtccaggcttcagttttctcaggccggagcgagtgacattcgggaccagtctagaaactggcttcctggaccctgttaccgccagcagcgagtatcaaagacagctgcggacaacaacaacagtgattactcgtggactggagctaccaagtaccacctcaatggaagagactctctggtgaacccgggcccagctatggccagccacaaggatgatgaagaaaaatattttcctcagagcggggttctcatcttcgggaaacaaggctcaaataaaactaatgtggacattgaaaaggttatgattacagacgaagaggaaatcaggaccaccaatcccgtggctacggagcagtatggttctgtatctaccaaccttcaaagcggcaacacacaagcagctacctcagatgtcaacacacaaggcgttcttcctggcatggtctggcaggacagagatgtgtacctgcaggggcccatctgggcaaagattcctcacacggacggacactttcacccttctcccctcatgggcggatttggattgaagcaccctcccccacagattctcatcaagaataccccggtacctgcgaatccttcgaccaccttcagtgcggcaaagtttgcttccttcatcacacagtattccacgggacaggtcagcgtggagatagagtgggagctgcagaaggagaacagcaaacgctggaaccccgagatccagtatacttccaactacaacaaatctgttaatgtggactttactgtggacactaatggtgtgtattcagagcctcgccccattggcaccagatacctgactcgtaatctgtaa

SEQ ID NO: 3554 - DNA, 2208 bp, synthetic construct
  misc_feature 1..2208: note = source = /note="Description of Artificial Sequence: Synthetic polynucleotide"
  source 1..2208: mol_type = other DNA
atggctgccgatggttatcttccagattggctcgaggacactctctctgaaggaataagacagtggtggaagctcaaacctggcccaccaccgccaaagcccgcagagcggcataaggacgacagcaggggtcttgtgcttcctgggtacaagtacctcggacccttcaacggactcgacaagggggagccggtcaacgaggcagacgccgcggccctcgagcacgacaaggcctacgaccggcagctcgacagcggagacaacccgtacctcaagtacaaccacgccgacgcggagtttcaggagcgtcttaaagaagatacgtcttttgggggcaacctcggacgagcagtcttccaggcgaaaaagagggttcttgaacctctgggcctggttgaggaacctgttaagacggctccgggaaaaaagaggccggtagagcactctcctgtggagccagactcctcctcgggaaccggaaaggcgggccagcagcctgcaagaaaaagattgaatttcggtcagactggagacgcagactccgtacctgacccccagcctctcggacagccaccagcagccccctctggtctgggaactaatacgatggctacaggcagtggcgcaccaatggcagacaataacgagggcgccgacggagtgggtaattcctcgggaaattggcattgcgattccacatggatgggcgacagagtcatcaccaccagcacccgcacctgggctctgcccacctacaacaaccatctgtacaagcaaatttccagccaatcaggagcatcgaacgacaaccactactttggctacagcaccccctgggggtattttgacttcaacagattccactgccacttttcgccacgtgactggcaaagactcatcaacaacaactggggattccggcccaagagactcagcttcaagctctttaacattcaagtcaaggaggtcacgcagaatgacggtacgacgacgattgccaataaccttaccagcacggttcaggtctttactgactcggagtaccagctcccgtacgtcctcggctcggcgcatcaaggatgcctcccgccgttcccagcagacgtcttcatggtgccacagtatggatacctcaccctgaacaacgggagtcaggcggtaggacgctcttcattttactgcctggagtacttcccttctcagatgcttcgcacgggaaacaactttaccttcagctacacctttgaggacgtgccttttcacagcagctacgctcacagccaaagtctggaccgtctcatgaatcctctcatcgaccaatacctgtattacttgagcaaaacaaacgctccaagcggaaccaccacgatgtccaggcttcagttttctcaggccggagcgagtgacattcgggaccagtctagaaactggcttcctggaccctgttaccgccagcagcgagtatcaaagacagctgcggacaacaacaacagtgattactcgtggactggagctaccaagtaccacctcaatggaagagactctctggtgaacccgggcccagctatggccagccacaaggatgatgaagaaaaatattttcctcagagcggggttctcatcttcgggaaacaaggctcaaataaaactaatgtggacattgaaaaggttatgattacagacgaagaggaaatcaggaccaccaatcccgtggctacggagcagtatggttctgtatctaccaaccttcaaagcggcaacacacaagcagctacctcagatgtcaacacacaaggcgttcttcctggcatggtctggcaggacagagatgtgtacctgcaggggcccatctgggcaaagattcctcacacggacggacactttcacccttctcccctcatgggcggatttggattgaagcaccctcccccacagattctcatcaagaataccccggtacctgcgaatccttcgaccaccttcagtgcggcaaagtttgcttccttcatcacacagtattccacgggacaggtcagcgtggagatagagtgggagccgcagaaggagaacagcaaacgctggaaccccgagatccagtatacttccaactacaacaaatctgttaatgtggactttactgtggacactaatggtgtgtattcagagcctcgccccattggcaccagatacctgactcgtaatctgtaa

SEQ ID NO: 3555 - DNA, 2208 bp, synthetic construct
  misc_feature 1..2208: note = source = /note="Description of Artificial Sequence: Synthetic polynucleotide"
  source 1..2208: mol_type = other DNA
atggctgccgatggttatcttccagattggctcgaggacactctctctgaaggaataagacagtggtggaagctcaaacctggcccaccaccgccaaagcccgcagagcggcataaggacgacagcaggggtcttgtgcttcctgggtacaagtacctcggacccttcaacggactcgacaagggggagccggtcaacgaggcagacgccgcggccctcgagcacgacaaggcctacgaccggcagctcgacagcggagacaacccgtacctcaagtacaaccacgccgacgcggagtttcaggagcgtcttaaagaagatacgtcttttgggggcaacctcggacgagcagtcttccaggcgaaaaagagggttcttgaacctctgggcctggttgaggaacctgttaagacggctccgggaaaaaagaggccggtagagcactctcctgtggagccagactcctcctcgggaaccggaaaggcgggccagcagcctgcaagaaaaagattgaatttcggtcagactggagacgcagactccgtacctgacccccagcctctcggacagccaccagcagccccctctggtctgggaactaatacgatggctacaggcagtggcgcaccaatggcagacaataacgagggcgccgacggagtgggtaattcctcgggaaattggcattgcgattccacatggatgggcgacagagtcatcaccaccagcacccgcacctgggctctgcccacctacaacaaccatctgtacaagcaaatttccagccaatcaggagcatcgaacgacaaccactactttggctacagcaccccctgggggtattttgacttcaacagattccactgccacttttcgccacgtgactggcaaagactcatcaacaacaactggggattccggcccaagagactcagcttcaagctctttaacattcaagtcaaggaggtcacgcagaatgacggtacgacgacgattgccaataaccttaccagcacggttcaggtctttactgactcggagtaccagctcccgtacgtcctcggctcggcgcatcaaggatgcctcccgccgttcccagcagacgtcttcatggtgccacagtatggatacctcaccctgaacaacgggagtcaggcggtaggacgctcttcattttactgcctggagtacttcccttctcagatgcttcgcacgggaaacaactttaccttcagctacacctttgaggacgtgccttttcacagcagctacgctcacagccaaagtctggaccgtctcatgaatcctctcatcgaccaatacctgtattacttgagcaaaacaaacgctccaagcggaaccaccacgatgtccaggcttcagttttctcaggccggagcgagtgacattcgggaccagtctagaaactggcttcctggaccctgttaccgccagcagcgagtatcaaagacagttgcggacaacaacaacagtgattactcgtggactggagctaccaagtaccacctcaatggaagagactctctggtgaacccgggcccagctatggccagccacaaggatgatgaagaaaaatattttcctcagagcggggttctcatcttcgggaaacaaggctcaaataaaactaatgtggacattgaaaaggttatgattacagacgaagaggaaatcaggaccaccaatcccgtggctacggagcagtatggttctgtatctaccaaccttcaaagcggcaacacacaagcagctacctcagatgtcaacacacaaggcgttcttcctggcatggtctggcaggacagagatgtgtacctgcaggggcccatctgggcaaagattcctcacacggacggacactttcacccttctcccctcatgggcggatttggattgaagcaccctcccccacagattctcatcaagaataccccggtacctgcgaatccttcgaccaccttcagtgcggcaaagtttgcttccttcatcacacagtattccacgggacaggtcagcgtggagatagagtgggagctgcagaaggagaacagcaaacgctggaaccccgagatccagtatacttccaactacaacaaatctgttaatgtggactttactgtggacactaatggtgtgtattcagagcctcgccccattggcaccagatacctgactcgtaatctgtaa

SEQ ID NO: 3556 - DNA, 2208 bp, synthetic construct
  misc_feature 1..2208: note = source = /note="Description of Artificial Sequence: Synthetic polynucleotide"
  source 1..2208: mol_type = other DNA
atggctgccgatggttatcttccagattggctcgaggacactctctctgaaggaataagacagtggtggaagctcaaacctggcccaccaccgccaaagcccgcagagcggcataaggacgacagcaggggtcttgtgcttcctgggtacaagtacctcggacccttcaacggactcgacaagggggagccggtcaacgaggcagacgccgcggccctcgagcacgacaaggcctacgaccggcagctcgacagcggagacaacccgtacctcaagtacaaccacgccgacgcggagtttcaggagcgtcttaaagaagatacgtcttttgggggcaacctcggacgagcagtcttccaggcgaaaaagagggttcttgaacctctgggcctggttgaggaacctgttaagacggctccgggaaaaaagaggccggtagagcactctcctgtggagccagactcctcctcgggaaccggaaaggcgggccagcagcctgcaagaaaaagattgaatttcggtcagactggagacgcagactccgtacctgacccccagcctctcggacagccaccagcagccccctctggtctgggaactaatacgatggctacaggcagtggcgcaccaatggcagacaataacgagggcgccgacggagtgggtaattcctcgggaaattggcattgcgattccacatggatgggcgacagagtcatcaccaccagcacccgcacctgggctctgcccacctacaacaaccatctgtacaagcaaatttccagccaatcaggagcatcgaacgacaaccactactttggctacagcaccccctgggggtattttgacttcaacagattccactgccacttttcgccacgtgactggcaaagactcatcaacaacaactggggattccggcccaagagactcagcttcaagctctttaacattcaagtcaaggaggtcacgcagaatgacggtacgacgacgattgccaataaccttaccagcacggttcaggtctttactgactcggagtaccagctcccgtacgtcctcggctcggcgcatcaaggatgcctcccgccgttcccagcagacgtcttcatggtgccacagtatggatacctcaccctgaacaacgggagtcaggcggtaggacgctcttcattttactgcctggagtacttcccttctcagatgcttcgcacgggaaacaactttaccttcagctacacctttgaggacgtgccttttcacagcagctacgctcacagccaaagtctggaccgtctcatgaatcctctcatcgaccaatacccgtattacttgagcaaaacaaacgctccaagcggaaccaccacgatgtccaggcttcagttttctcaggccggagcgagtgacattcgggaccagtctagaaactggcttcctggaccctgttaccgccagcagcgagtatcaaagacagctgcggacaacaacaacagtgattactcgtggactggagctaccaagtaccacctcaatggaagagactctctggtgaacccgggcccagctatggccagccacaaggatgatgaagaaaaatattttcctcagagcggggttctcatcttcgggaaacaaggctcaaataaaactaatgtggacattgaaaaggttatgattacagacgaagaggaaatcaggaccaccaatcccgtggctacggagcagtatggttctgtatctaccaaccttcaaagcggcaacacacaagcagctacctcagatgtcaacacacaaggcgttcttcctggcatggtctggcaggacagagatgtgtacctgcaggggcccatctgggcaaagattcctcacacggacggacactttcacccttctcccctcatgggcggatttggattgaagcaccctcccccacagattctcatcaagaataccccggtacctgcgaatccttcgaccaccttcagtgcggcaaagtttgcttccttcatcacacagtattccacgggacaggtcagcgtggagatagagtgggagctgcagaaggagaacagcaaacgctggaaccccgagatccagtatacttccaactacaacaaatctgttaatgtggactttactgtggacactaatggtgtgtattcagagcctcgccccattggcaccagatacctgactcgtaatctgtaa

SEQ ID NO: 3557 - DNA, 2208 bp, synthetic construct
  misc_feature 1..2208: note = source = /note="Description of Artificial Sequence: Synthetic polynucleotide"
  source 1..2208: mol_type = other DNA
atggctgccgatggttatcttccagattggctcgaggacactctctctgaaggaataagacagtggtggaagctcaaacctggcccaccaccgccaaagcccgcagagcggcataaggacgacagcaggggtcttgtgcttcctgggtacaagtacctcggacccttcaacggactcgacaagggggagccggtcaacgaggcagacgccgcggccctcgagcacgacaaggcctacgaccggcagctcgacagcggagacaacccgtacctcaagtacaaccacaccgacgcggagtttcaggagcgtcttaaagaagatacgtcttttgggggcaacctcggacgagcagtcttccaggcgaaaaagagggttcttgaacctctgggcctggttgaggaacctgttaagacggctccgggaaaaaagaggccggtagagcactctcctgtggagccagactcctcctcgggaaccggaaaggcgggccagcagcctgcaagaaaaagattgaatttcggtcagactggagacgcagactccgtacctgacccccagcctctcggacagccaccagcagccccctctggtctgggaactaatacgatggctacaggcagtggcgcaccaatggcagacaataacgagggcgccgacggagtgggtaattcctcgggaaattggcattgcgattccacatggatgggcgacagagtcatcaccaccagcacccgcacctgggctctgcccacctacaacaaccatctgtacaagcaaatttccagccaatcaggagcatcgaacgacaaccactactttggctacagcaccccctgggggtattttgacttcaacagattccactgccacttttcgccacgtgactggcaaagactcatcaacaacaactggggattccggcccaagagactcagcttcaagctctttaacattcaagtcaaggaggtcacgcagaatgacggtacgacgacgattgccaataaccttaccagcacggttcaggtctttactgactcggagtaccagctcccgtacgtcctcggctcggcgcatcaaggatgcctcccgccgttcccagcagacgtcttcatggtgccacagtatggatacctcaccctgaacaacgggagtcaggcggtaggacgctcttcattttactgcctggagtacttcccttctcagatgcttcgcacgggaaacaactttaccttcagctacacctttgaggacgtgccttttcacagcagctacgctcacagccaaagtctggaccgtctcatgaatcctctcatcgaccaatacctgtattacttgagcaaaacaaacgctccaagcggaaccaccacgatgtccaggcttcagttttctcaggccggagcgagtgacattcgggaccagtctagaaactggcttcctggaccctgttaccgccagcagcgagtatcaaagacagctgcggacaacaacaacagtgattactcgtggactggagctaccaagtaccacctcaatggaagagactctctggtgaacccgggcccagctatggccagccacaaggatgatgaagaaaaatattttcctcagagcggggttctcatcttcgggaaacaaggctcaaataaaactaatgtggacattgaaaaggttatgattacagacgaagaggaaatcaggaccaccaatcccgtggctacggagcagtatggttctgtatctaccaaccttcaaagcggcaacacacaagcagctacctcagatgtcaacacacaaggcgttcttcctggcatggtctggcaggacagagatgtgtacctgcaggggcccatctgggcaaagattcctcacacggacggacactttcacccttctcccctcatgggcggatttggattgaagcaccctcccccacagattctcatcaagaataccccggtacctgcgaatccttcgaccaccttcagtgcggcaaagtttgcttccttcatcacacagtattccacgggacaggtcagcgtggagatagagtgggagctgcagaaggagaacagcaaacgctggaaccccgagatccagtatacttccaactacaacaaatctgttaatgtggactttactgtggacactaatggtgtgtattcagagcctcgccccattggcaccagatacctgactcgtaatctgtaa

SEQ ID NO: 3558 - DNA, 2208 bp, synthetic construct
  misc_feature 1..2208: note = source = /note="Description of Artificial Sequence: Synthetic polynucleotide"
  source 1..2208: mol_type = other DNA
atggctgccgatggttatcttccagattggctcgaggacactctctctgaaggaataagacagtggtggaagctcaaacctggcccaccaccgccaaagcccgcagagcggcataaggacgacagcaggggtcttgtgcttcctgggtacaagtacctcggacccttcaacggactcgacaagggggggccggtcaacgaggcagacgccgcggccctcgagcacgacaaggcctacgaccggcagctcgacagcggagacaacccgtacctcaagtacaaccacgccgacgcggagtttcaggagcgtcttaaagaagatacgtcttttgggggcaacctcggacgagcagtcttccaggcgaaaaagagggttcttgaacctctgggcctggttgaggaacctgttaagacggctccgggaaaaaagaggccggtagagcactctcctgtggagccagactcctcctcgggaaccggaaaggcgggccagcagcctgcaagaaaaagattgaatttcggtcagactggagacgcagactccgtacctgacccccagcctctcggacagccaccagcagccccctctggtctgggaactaatacgatggctacaggcagtggcgcaccaatggcagacaataacgagggcgccgacggagtgggtaattcctcgggaaattggcattgcgattccacatggatgggcgacagagtcatcaccaccagcacccgcacctgggctctgcccacctacaacaaccatctgtacaagcaaatttccagccaatcaggagcatcgaacgacaaccactactttggctacagcaccccctgggggtattttgacttcaacagattccactgccacttttcgccacgtgactggcaaagactcatcaacaacaactggggattccggcccaagagactcagcttcaagctctttaacattcaagtcaaggaggtcacgcagaatgacggtacgacgacgattgccaataaccttaccagcacggttcaggtctttactgactcggagtaccagctcccgtacgtcctcggctcggcgcatcaaggatgcctcccgccgttcccagcagacgtcttcatggtgccacagtatggatacctcaccctgaacaacgggagtcaggcggtaggacgctcttcattttactgcctggagtacttcccttctcagatgcttcgcacgggaaacaactttaccttcagctacacctttgaggacgtgccttttcacagcagctacgctcacagccaaagtctggaccgtctcatgaatcctctcatcgaccaatacctgtattacttgagcaaaacaaacgctccaagcggaaccaccacgatgtccaggcttcagttttctcaggccggagcgagtgacattcgggaccagtctagaaactggcttcctggaccctgttaccgccagcagcgagtatcaaagacagctgcggacaacaacaacagtgattactcgtggactggagctaccaagtaccacctcaatggaagagactctctggtgaacccgggcccagctatggccagccacaaggatgatgaagaaaaatattttcctcagagcggggttctcatcttcgggaaacaaggctcaaataaaactaatgtggacattgaaaaggttatgattacagacgaagaggaaatcaggaccaccaatcccgtggctacggagcagtatggttctgtatctaccaaccttcaaagcggcaacacacaagcagctacctcagatgtcaacacacaaggcgttcttcctggcatggtctggcaggacagagatgtgtacctgcaggggcccatctgggcaaagattcctcacacggacggacactttcacccttctcccctcatgggcggatttggattgaagcaccctcccccacagattctcatcaagaataccccggtacctgcgaatccttcgaccaccttcagtgcggcaaagtttgcttccttcatcacacagtattccacgggacaggtcagcgtggagatagagtgggagctgcagaaggagaacagcaaacgctggaaccccgagatccagtatacttccaactacaacaaatctgttaatgtggactttactgtggacactaatggtgtgtattcagagcctcgccccattggcaccagatacctgactcgtaatctgtaa

SEQ ID NO: 3559 - DNA, 2208 bp, synthetic construct
  misc_feature 1..2208: note = source = /note="Description of Artificial Sequence: Synthetic polynucleotide"
  source 1..2208: mol_type = other DNA
atggctgccgatggttatcttccagattggctcgaggacactctctctgaaggaataagacagtggtggaagctcaaacctggcccaccaccgccaaagcccgcagagcggcataaggacgacagcaggggtcttgtgcttcctgggtacaagtacctcggacccttcaacggactcgacaagggggagccggtcaacgaggcagacgccgcggccctcgagcacgacaaggcctacgaccggcagctcgacagcggagacaacccgtacctcaagtacaaccacgccgacgcggagtttcaggagcgtcttaaagaagatacgtcttttgggggcaacctcggacgagcagtcttccaggcgaaaaagagggttcttgaacctctgggcctggttgaggaacctgttaagacggctccgggaaaaaagaggccggtagagcactctcctgtggagccagactcctcctcgggaaccggaaaggcgggccagcagcctgcaagaaaaagattgaatttcggtcagactggagacgcagactccgtacctgacccccagcctctcggacagccaccagcagccccctctggtctgggaactaatacgatggctacaggcagtggcgcaccaatggcagacaataacgagggcgccgacggagtgggtaattcctcgggaaattggcattgcgattccacatggatgggcgacagagtcatcaccaccagcacccgcacctggactctgcccacctacaacaaccatctgtacaagcaaatttccagccaatcaggagcatcgaacgacaaccactactttggctacagcaccccctgggggtattttgacttcaacagattccactgccacttttcgccacgtgactggcaaagactcatcaacaacaactggggattccggcccaagagactcagcttcaagctctttaacattcaagtcaaggaggtcacgcagaatgacggtacgacgacgattgccaataaccttaccagcacggttcaggtctttactgactcggagtaccagctcccgtacgtcctcggctcggcgcatcaaggatgcctcccgccgttcccagcagacgtcttcatggtgccacagtatggatacctcaccctgaacaacgggagtcaggcggtaggacgctcttcattttactgcctggagtacttcccttctcagatgcttcgcacgggaaacaactttaccttcagctacacctttgaggacgtgccttttcacagcagctacgctcacagccaaagtctggaccgtctcatgaatcctctcatcgaccaatacctgtattacttgagcaaaacaaacgctccaagcggaaccaccacgatgtccaggcttcagttttctcaggccggagcgagtgacattcgggaccagtctagaaactggcttcctggaccctgttaccgccagcagcgagtatcaaagacagctgcggacaacaacaacagtgattactcgtggactggagctaccaagtaccacctcaatggaagagactctctggtgaacccgggcccagctatggccagccacaaggatgatgaagaaaaatattttcctcagagcggggttctcatcttcgggaaacaaggctcaaataaaactaatgtggacattgaaaaggttatgattacagacgaagaggaaatcaggaccaccaatcccgtggctacggagcagtatggttctgtatctaccaaccttcaaagcggcaacacacaagcagctacctcagatgtcaacacacaaggcgttcttcctggcatggtctggcaggacagagatgtgtacctgcaggggcccatctgggcaaagattcctcacacggacggacactttcacccttctcccctcatgggcggatttggattgaagcaccctcccccacagattctcatcaagaataccccggtacctgcgaatccttcgaccaccttcagtgcggcaaagtttgcttccttcatcacacagtattccacgggacaggtcagcgtggagatagagtgggagctgcagaaggagaacagcaaacgctggaaccccgagatccagtatacttccaactacaacaaatctgttaatgtggactttactgtggacactaatggtgtgtattcagagcctcgccccattggcaccagatacctgactcgtaatctgtaa

SEQ ID NO: 3560 - DNA, 2208 bp, synthetic construct
  misc_feature 1..2208: note = source = /note="Description of Artificial Sequence: Synthetic polynucleotide"
  source 1..2208: mol_type = other DNA
atggctgccgatggttatcttccagattggctcgaggacactctctctgaaggaataagacagtggtggaagctcaaacctggcccaccaccgccaaagcccgcagagcggcataaggacgacagcaggggtcttgtgcttcctgggtacaagtacctcggacccttcaacggactcgacaagggggagccggtcaacgaggcagacgccgcggtcctcgagcacgacaaggcctacgaccggcagctcgacagcggagacaacccgtacctcaagtacaaccacgccgacgcggagtttcaggagcgtcttaaagaagatacgtcttttgggggcaacctcggacgagcagtcttccaggcgaaaaagagggttcttgaacctctgggcctggttgaggaacctgttaagacggctccgggaaaaaagaggccggtagagcactctcctgtggagccagactcctcctcgggaaccggaaaggcgggccagcagcctgcaagaaaaagattgaatttcggtcagactggagacgcagactccgtacctgacccccagcctctcggacagccaccagcagccccctctggtctgggaactaatacgatggctacaggcagtggcgcaccaatggcagacaataacgagggcgccgacggagtgggtaattcctcgggaaattggcattgcgattccacatggatgggcgacagagtcatcaccaccagcacccgcacctgggctctgcccacctacaacaaccatctgtacaagcaaatttccagccaatcaggagcatcgaacgacaaccactactttggctacagcaccccctgggggtattttgacttcaacagattccactgccacttttcgccacgtgactggcaaagactcatcaacaacaactggggattccggcccaagagactcagcttcaagctctttaacattcaagtcaaggaggtcacgcagaatgacggtacgacgacgattgccaataaccttaccagcacggttcaggtctttactgactcggagtaccagctcccgtacgtcctcggctcggcgcatcaaggatgcctcccgccgttcccagcagacgtcttcatggtgccacagtatggatacctcaccctgaacaacgggagtcaggcggtaggacgctcttcattttactgcctggagtacttcccttctcagatgcttcgcacgggaaacaactttaccttcagctacacctttgaggacgtgccttttcacagcagctacgctcacagccaaagtctggaccgtctcatgaatcctctcatcgaccaatacctgtattacttgagcaaaacaaacgctccaagcggaaccaccacgatgtccaggcttcagttttctcaggccggagcgagtgacattcgggaccagtctagaaactggcttcctggaccctgttaccgccagcagcgagtatcaaagacagctgcggacaacaacaacagtgattactcgtggactggagctaccaagtaccacctcaatggaagagactctctggtgaacccgggcccagctatggccagccacaaggatgatgaagaaaaatattttcctcagagcggggttctcatcttcgggaaacaaggctcaaataaaactaatgtggacattgaaaaggttatgattacagacgaagaggaaatcaggaccaccaatcccgtggctacggagcagtatggttctgtatctaccaaccttcaaagcggcaacacacaagcagctacctcagatgtcaacacacaaggcgttcttcctggcatggtctggcaggacagagatgtgtacctgcaggggcccatctgggcaaagattcctcacacggacggacactttcacccttctcccctcatgggcggatttggattgaagcaccctcccccacagattctcatcaagaataccccggtacctgcgaatccttcgaccaccttcagtgcggcaaagtttgcttccttcatcacacagtattccacgggacaggtcagcgtggagatagagtgggagctgcagaaggagaacagcaaacgctggaaccccgagatccagtatacttccaactacaacaaatctgttaatgtggactttactgtggacactaatggtgtgtattcagagcctcgccccattggcaccagatacctgactcgtaatctgtaa

SEQ ID NO: 3561 - DNA, 2208 bp, synthetic construct
  misc_feature 1..2208: note = source = /note="Description of Artificial Sequence: Synthetic polynucleotide"
  source 1..2208: mol_type = other DNA
atggctgccgatggttatcttccagattggctcgaggacactctctctgaaggaataagacagtggtggaagctcaaacctggcccaccaccgccaaagcccgcagagcggcataaggacgacagcaggggtcttgtgcttcctgggtacaagtacctcggacccttcaacggactcgacaagggggagccggtcaacgaggcagacgccgcggccctcgagcacgacaaggcctacgaccggcagctcgacagcggagacaacccgtacctcaagtacaaccacgccgacgcggagtttcaggagcgtcttaaagaagatacgtcttttgggggcaacctcggacgagcagtcttccaggcgaaaaagagggttcttgaacctctgggcctggttgaggaacctgttaagacggctccgggaaaaaagaggccggtagagcactctcctgtggagccagactcctcctcgggaaccggaaaggcgggccagcagcctgcaagaaaaagattgaatttcggtcagactggagacgcagactccgtacctgacccccagcctctcggacagccaccagcagccccctctggtctgggaactaatacgatggctacaggcagtggcgcaccaatggcagacaataacgagggcgccgacggagtgggtaattcctcgggaaattggcattgcgattccacatggatgggcgacagagtcatcaccaccagcacccacacctgggctctgcccacctacaacaaccatctgtacaagcaaatttccagccaatcaggagcatcgaacgacaaccactactttggctacagcaccccctgggggtattttgacttcaacagattccactgccacttttcgccacgtgactggcaaagactcatcaacaacaactggggattccggcccaagagactcagcttcaagctctttaacattcaagtcaaggaggtcacgcagaatgacggtacgacgacgattgccaataaccttaccagcacggttcaggtctttactgactcggagtaccagctcccgtacgtcctcggctcggcgcatcaaggatgcctcccgccgttcccagcagacgtcttcatggtgccacagtatggatacctcaccctgaacaacgggagtcaggcggtaggacgctcttcattttactgcctggagtacttcccttctcagatgcttcgcacgggaaacaactttaccttcagctacacctttgaggacgtgccttttcacagcagctacgctcacagccaaagtctggaccgtctcatgaatcctctcatcgaccaatacctgtattacttgagcaaaacaaacgctccaagcggaaccaccacgatgtccaggcttcagttttctcaggccggagcgagtgacattcgggaccagtctagaaactggcttcctggaccctgttaccgccagcagcgagtatcaaagacagctgcggacaacaacaacagtgattactcgtggactggagctaccaagtaccacctcaatggaagagactctctggtgaacccgggcccagctatggccagccacaaggatgatgaagaaaaatattttcctcagagcggggttctcatcttcgggaaacaaggctcaaataaaactaatgtggacattgaaaaggttatgattacagacgaagaggaaatcaggaccaccaatcccgtggctacggagcagtatggttctgtatctaccaaccttcaaagcggcaacacacaagcagctacctcagatgtcaacacacaaggcgttcttcctggcatggtctggcaggacagagatgtgtacctgcaggggcccatctgggcaaagattcctcacacggacggacactttcacccttctcccctcatgggcggatttggattgaagcaccctcccccacagattctcatcaagaataccccggtacctgcgaatccttcgaccaccttcagtgcggcaaagtttgcttccttcatcacacagtattccacgggacaggtcagcgtggagatagagtgggagctgcagaaggagaacagcaaacgctggaaccccgagatccagtatacttccaactacaacaaatctgttaatgtggactttactgtggacactaatggtgtgtattcagagcctcgccccattggcaccagatacctgactcgtaatctgtaa

SEQ ID NO: 3562 - DNA, 2208 bp, synthetic construct
  misc_feature 1..2208: note = source = /note="Description of Artificial Sequence: Synthetic polynucleotide"
  source 1..2208: mol_type = other DNA
atggctgccgatggttatcttccagattggctcgaggacactctctctgaaggaataagacagtggtggaagctcaaacctggcccaccaccgccaaagcccgcagagcggcataaggacgacagcaggggtcttgtgcttcctgggtacaagtacctcggacccttcaacggactcgacaagggggagccggtcaacgaggcagacgccgcggccctcgagcacgacaaggcctacgaccggcagctcgacagcggagacaacccgtacctcaagtacaaccacgccgacgcggagtttcaggagcgtcttaaagaagatacgtcttttgggggcaacctcggacgagcagtcttccaggcgaaaaagagggttcttgaacctctgggcctggttgaggaacctgttaagacggctccgggaaaaaagaggccggtagagcactctcctgtggagccagactcctcctcgggaaccggaaaggcgggccagcagcctgcaagaaaaagattgaatttcggtcagactggagacgcagactccgtacctgacccccagcctctcggacagccaccagcagccccctctggtctgggaactaatacgatggctacaggcagtggcgcaccaatggcagacaataacgagggcgccgacggagtgggtaattcctcgggaaattggcattgcgattccacatggatgggcgacagagtcatcaccaccagcacccgcacctgggctctgcccacctacaacaaccatctgtacaagcaaatttccagccaatcaggagcatcgaacgacaaccactactttggctacagcaccccctgggggtattttgacttcaacagattccactgccacttttcgccacgtgactggcaaagactcatcaacaacaactggggattccggcccaagagactcagcttcaagctctttaacattcaagtcaaggaggtcacgcagaatgacggtacgacgacgattgccaataaccttaccagcacggttcaggtctttactgactcggagtaccagctcccgtacgtcctcggctcggcgcatcaaggatgcctcccgccgttcccagcagacgtcttcatggtgccacagtatggatacctcaccctgaacaacgggagtcaggcggtaggacgctcttcattttactgcctggagtacttcccttctcagatgcttcgcacgggaaacaactttaccttcagctacacctttgaggacgtgccttttcacagcagctacgctcacagccaaagtctggaccgtctcatgaatcctctcatcgaccaatacctgtattacttgagcaaaacaaacgctccaagcggaaccaccacgatgtccaggcttcagttttctcaggccggagcgagtggcattcgggaccagtctagaaactggcttcctggaccctgttaccgccagcagcgagtatcaaagacagctgcggacaacaacaacagtgattactcgtggactggagctaccaagtaccacctcaatggaagagactctctggtgaacccgggcccagctatggccagccacaaggatgatgaagaaaaatattttcctcagagcggggttctcatcttcgggaaacaaggctcaaataaaactaatgtggacattgaaaaggttatgattacagacgaagaggaaatcaggaccaccaatcccgtggctacggagcagtatggttctgtatctaccaaccttcaaagcggcaacacacaagcagctacctcagatgtcaacacacaaggcgttcttcctggcatggtctggcaggacagagatgtgtacctgcaggggcccatctgggcaaagattcctcacacggacggacactttcacccttctcccctcatgggcggatttggattgaagcaccctcccccacagattctcatcaagaataccccggtacctgcgaatccttcgaccaccttcagtgcggcaaagtttgcttccttcatcacacagtattccacgggacaggtcagcgtggagatagagtgggagctgcagaaggagaacagcaaacgctggaaccccgagatccagtatacttccaactacaacaaatctgttaatgtggactttactgtggacactaatggtgtgtattcagagcctcgccccattggcaccagatacctgactcgtaatctgtaa

SEQ ID NO: 3563 - DNA, 2208 bp, synthetic construct
  misc_feature 1..2208: note = source = /note="Description of Artificial Sequence: Synthetic polynucleotide"
  source 1..2208: mol_type = other DNA
atggctgccgatggttatcttccagattggctcgaggacactctctctgaaggaataagacagtggtggaagctcaaacctggcccaccaccgccaaagcccgcagagcggcataaggacgacagcaggggtcttgtgcttcctgggtacaagtacctcggacccttcaacggactcgacaagggggagccggtcaacgaggcagacgccgcggccctcgagcacgacaaggcctacgaccggcagctcgacagcggagacaacccgtacctcaagtacaaccacgccgacgcggagtttcaggagcgtcttaaagaagatacgtcttttgggggcaacctcggacgagtagtcttccaggcgaaaaagagggttcttgaacctctgggcctggttgaggaacctgttaagacggctccgggaaaaaagaggccggtagagcactctcctgtggagccagactcctcctcgggaaccggaaaggcgggccagcagcctgcaagaaaaagattgaatttcggtcagactggagacgcagactccgtacctgacccccagcctctcggacagccaccagcagccccctctggtctgggaactaatacgatggctacaggcagtggcgcaccaatggcagacaataacgagggcgccgacggagtgggtaattcctcgggaaattggcattgcgattccacatggatgggcgacagagtcatcaccaccagcacccgcacctgggctctgcccacctacaacaaccatctgtacaagcaaatttccagccaatcaggagcatcgaacgacaaccactactttggctacagcaccccctgggggtattttgacttcaacagattccactgccacttttcgccacgtgactggcaaagactcatcaacaacaactggggattccggcccaagagactcagcttcaagctctttaacattcaagtcaaggaggtcacgcagaatgacggtacgacgacgattgccaataaccttaccagcacggttcaggtctttactgactcggagtaccagctcccgtacgtcctcggctcggcgcatcaaggatgcctcccgccgttcccagcagacgtcttcatggtgccacagtatggatacctcaccctgaacaacgggagtcaggcggtaggacgctcttcattttactgcctggagtacttcccttctcagatgcttcgcacgggaaacaactttaccttcagctacacctttgaggacgtgccttttcacagcagctacgctcacagccaaagtctggaccgtctcatgaatcctctcatcgaccaatacctgtattacttgagcaaaacaaacgctccaagcggaaccaccacgatgtccaggcttcagttttctcaggccggagcgagtgacattcgggaccagtctagaaactggcttcctggaccctgttaccgccagcagcgagtatcaaagacagctgcggacaacaacaacagtgattactcgtggactggagctaccaagtaccacctcaatggaagagactctctggtgaacccgggcccagctatggccagccacaaggatgatgaagaaaaatattttcctcagagcggggttctcatcttcgggaaacaaggctcaaataaaactaatgtggacattgaaaaggttatgattacagacgaagaggaaatcaggaccaccaatcccgtggctacggagcagtatggttctgtatctaccaaccttcaaagcggcaacacacaagcagctacctcagatgtcaacacacaaggcgttcttcctggcatggtctggcaggacagagatgtgtacctgcaggggcccatctgggcaaagattcctcacacggacggacactttcacccttctcccctcatgggcggatttggattgaagcaccctcccccacagattctcatcaagaataccccggtacctgcgaatccttcgaccaccttcagtgcggcaaagtttgcttccttcatcacacagtattccacgggacaggtcagcgtggagatagagtgggagctgcagaaggagaacagcaaacgctggaaccccgagatccagtatacttccaactacaacaaatctgttaatgtggactttactgtggacactaatggtgtgtattcagagcctcgccccattggcaccagatacctgactcgtaatctgtaa

SEQ ID NO: 3564 - DNA, 2208 bp, synthetic construct
  misc_feature 1..2208: note = source = /note="Description of Artificial Sequence: Synthetic polynucleotide"
  source 1..2208: mol_type = other DNA
atggctgccgatggttatcttccagattggctcgaggacactctctctgaaggaataagacagtggtggaagctcaaacctggcccaccaccgccaaagcccgcagagcggcataaggacgacagcaggggtcttgtgcttcctgggtacaagtacctcggacccttcaacggactcgacaagggggagccggtcaacgaggcagacgccgcggccctcgagcacgacaaggcctacgaccggcagctcgacagcggagacaacccgtacctcaagtacaaccacgccgacgcggagtttcaggagcgtcttaaagaagatacgtcttttgggggcaacctcggacgagcagtcttccaggcgaaaaagagggttcttgaacctctgggcctggttgaggaacctgttaagacggctccgggaaaaaagaggccggtagagcactctcctgtggagccagactcctcctcgggaaccggaaaggcgggccagcagcctgcaagaaaaagattgaatttcggtcagactggagacgcagactccgtacctgacccccagcctctcggacagccaccagcagccccctctggtctgggaactaatacgatggctacaggcagtggcgcaccaatggcagacaataacgagggcgccgacggagtgggtaattcctcgggaaattggcattgcgattccacatggatgggcgacagagtcatcaccaccagcacccgcacctgggctctgcccacctacaacaaccatctgtacaagcaaatttccagccaatcaggagcatcgaacgacaaccactactttggctacagcaccccctgggggtattttgacttcaacagattccactgccacttttcgccacgtgactggcaaagactcatcaacaacaactggggattccggcccaagagactcagcttcaagctctttaacattcaagtcaaggaggtcacgcagaatgacggtacgacgacgattgccaataaccttaccagcacggttcaggtctttactgactcggagtaccagctcccgtacatcctcggctcggcgcatcaaggatgcctcccgccgttcccagcagacgtcttcatggtgccacagtatggatacctcaccctgaacaacgggagtcaggcggtaggacgctcttcattttactgcctggagtacttcccttctcagatgcttcgcacgggaaacaactttaccttcagctacacctttgaggacgtgccttttcacagcagctacgctcacagccaaagtctggaccgtctcatgaatcctctcatcgaccaatacctgtattacttgagcaaaacaaacgctccaagcggaaccaccacgatgtccaggcttcagttttctcaggccggagcgagtgacattcgggaccagtctagaaactggcttcctggaccctgttaccgccagcagcgagtatcaaagacagctgcggacaacaacaacagtgattactcgtggactggagctaccaagtaccacctcaatggaagagactctctggtgaacccgggcccagctatggccagccacaaggatgatgaagaaaaatattttcctcagagcggggttctcatcttcgggaaacaaggctcaaataaaactaatgtggacattgaaaaggttatgattacagacgaagaggaaatcaggaccaccaatcccgtggctacggagcagtatggttctgtatctaccaaccttcaaagcggcaacacacaagcagctacctcagatgtcaacacacaaggcgttcttcctggcatggtctggcaggacagagatgtgtacctgcaggggcccatctgggcaaagattcctcacacggacggacactttcacccttctcccctcatgggcggatttggattgaagcaccctcccccacagattctcatcaagaataccccggtacctgcgaatccttcgaccaccttcagtgcggcaaagtttgcttccttcatcacacagtattccacgggacaggtcagcgtggagatagagtgggagctgcagaaggagaacagcaaacgctggaaccccgagatccagtatacttccaactacaacaaatctgttaatgtggactttactgtggacactaatggtgtgtattcagagcctcgccccattggcaccagatacctgactcgtaatctgtaa

SEQ ID NO: 3565 - DNA, 2208 bp, synthetic construct
  misc_feature 1..2208: note = source = /note="Description of Artificial Sequence: Synthetic polynucleotide"
  source 1..2208: mol_type = other DNA
atggctgccgatggttatcttccagattggctcgaggacactctctctgaaggaataagacagtggtggaagctcaaacctggcccaccaccgccaaagcccgcagagcggcataaggacgacagcaggggtcttgtgcttcctgggtacaagtacctcggacccttcaacggactcgacaagggggagccggtcaacgaggcagacgccgcggccctcgagcacgacaaggcctacgaccggcagctcgacagcggagacaacccgtacctcaagtacaaccacgccgacgcggagtttcaggagcgtcttaaagaagatacgtcttttgggggcaacctcggacgagcagtcttccaggcgaaaaagagggttcttgaacctctgggcctggttgaggaacctgttaagacggctccgggaaaaaagaggccggtagagcactctcctgtggagccagactcctcctcgggaaccggaaaggcgggccagcagcctgcaagaaaaagattgaatttcggtcagactggagacgcagactccgtacctgacccccagcctctcggacagccaccagcagccccctctggtctgggaactaatacgatggctacaggcagtggcgcaccaatggcagacaataacgagggcgtcgacggagtgggtaattcctcgggaaattggcattgcgattccacatggatgggcgacagagtcatcaccaccagcacccgcacctgggctctgcccacctacaacaaccatctgtacaagcaaatttccagccaatcaggagcatcgaacgacaaccactactttggctacagcaccccctgggggtattttgacttcaacagattccactgccacttttcgccacgtgactggcaaagactcatcaacaacaactggggattccggcccaagagactcagcttcaagctctttaacattcaagtcaaggaggtcacgcagaatgacggtacgacgacgattgccaataaccttaccagcacggttcaggtctttactgactcggagtaccagctcccgtacgtcctcggctcggcgcatcaaggatgcctcccgccgttcccagcagacgtcttcatggtgccacagtatggatacctcaccctgaacaacgggagtcaggcggtaggacgctcttcattttactgcctggagtacttcccttctcagatgcttcgcacgggaaacaactttaccttcagctacacctttgaggacgtgccttttcacagcagctacgctcacagccaaagtctggaccgtctcatgaatcctctcatcgaccaatacctgtattacttgagcaaaacaaacgctccaagcggaaccaccacgatgtccaggcttcagttttctcaggccggagcgagtgacattcgggaccagtctagaaactggcttcctggaccctgttaccgccagcagcgagtatcaaagacagctgcggacaacaacaacagtgattactcgtggactggagctaccaagtaccacctcaatggaagagactctctggtgaacccgggcccagctatggccagccacaaggatgatgaagaaaaatattttcctcagagcggggttctcatcttcgggaaacaaggctcaaataaaactaatgtggacattgaaaaggttatgattacagacgaagaggaaatcaggaccaccaatcccgtggctacggagcagtatggttctgtatctaccaaccttcaaagcggcaacacacaagcagctacctcagatgtcaacacacaaggcgttcttcctggcatggtctggcaggacagagatgtgtacctgcaggggcccatctgggcaaagattcctcacacggacggacactttcacccttctcccctcatgggcggatttggattgaagcaccctcccccacagattctcatcaagaataccccggtacctgcgaatccttcgaccaccttcagtgcggcaaagtttgcttccttcatcacacagtattccacgggacaggtcagcgtggagatagagtgggagctgcagaaggagaacagcaaacgctggaaccccgagatccagtatacttccaactacaacaaatctgttaatgtggactttactgtggacactaatggtgtgtattcagagcctcgccccattggcaccagatacctgactcgtaatctgtaa

SEQ ID NO: 3566 - DNA, 2208 bp, synthetic construct
  misc_feature 1..2208: note = source = /note="Description of Artificial Sequence: Synthetic polynucleotide"
  source 1..2208: mol_type = other DNA
atggctgccgatggttatcttccagattggctcgaggacactctctctgaaggaataagacagtggtggaagctcaaacctggcccaccaccgccaaagcccgcagagcggcataaggacgacagcaggggtcttgtgcttcctgggtacaagtacctcggacccttcaacggactcgacaagggggagccggtcaacgaggcagacgccgcggccctcgagcacgacaaggcctacgaccggcagctcgacagcggagacaacccgtacctcaagtacaaccacgccgacgcggagtttcaggagcgtcttaaagaagatacgtcttttgggggcaacctcggacgagcagtcttccaggcgaaaaagagggttcttgaacctctgggcctggttgaggaacctgttaagacggctccgggaaaaaagaggccggtagagcactctcctgtggagccagactcctcctcgggaaccggaaaggcgggccagcagcctgcaagaaaaagattgaatttcggtcagactggagacgcagactccgtacctgacccccagcctctcggacagccaccagcagccccctctggtctgggaactaatacgatggctacaggcagtggcgcaccaatggcagacaataacgagggcgccgacggagtgggtaattcctcgggaaattggcattgcgattccacatggatgggcgacagagtcatcaccaccagcacccgcacctgggctctgcccacctacaacaaccatctgtacaagcaaatttccagccaatcaggagcatcgaacgacaaccactactttggctacagcaccccctgggggtattttgacttcaacagattccactgccacttttcgccacgtgactggcaaagactcatcaacaacaactggggattccggcccaagagactcagcttcaagctctttaacattcaagtcaaggaggtcacgcagaatgacggtacgacgacgattgccaataaccttaccagcacggttcaggtctttactgactcggagtaccagctcccgtacgtcctcggctcggcgcatcaaggatgcctcccgccgttcccagcagacgtcttcatggtgccacagtatggatacctcaccctgaacaacgggagtcaggcggtaggacgctcttcattttactgcctggagtacttcccttctcagatgcttcgcacgggaaacaactttaccttcagctacacctttgaggacgtgccttttcacagcagctacgctcacagccaaagtctggaccgtctcatgaatcctctcatcgaccaatacctgtattacttgagcaaaacaaacgctccaagcggaaccaccacgatgtccaggcttcagttttctcaggccggagcgagtgacattcgggaccagtctagaaactggcttcctggaccctgttaccgccagcagcgagtatcaaagacagctgcggacaacaacaacagtgattactcgtggactggagctaccaagtaccacctcaatggaagaggctctctggtgaacccgggcccagctatggccagccacaaggatgatgaagaaaaatattttcctcagagcggggttctcatcttcgggaaacaaggctcaaataaaactaatgtggacattgaaaaggttatgattacagacgaagaggaaatcaggaccaccaatcccgtggctacggagcagtatggttctgtatctaccaaccttcaaagcggcaacacacaagcagctacctcagatgtcaacacacaaggcgttcttcctggcatggtctggcaggacagagatgtgtacctgcaggggcccatctgggcaaagattcctcacacggacggacactttcacccttctcccctcatgggcggatttggattgaagcaccctcccccacagattctcatcaagaataccccggtacctgcgaatccttcgaccaccttcagtgcggcaaagtttgcttccttcatcacacagtattccacgggacaggtcagcgtggagatagagtgggagctgcagaaggagaacagcaaacgctggaaccccgagatccagtatacttccaactacaacaaatctgttaatgtggactttactgtggacactaatggtgtgtattcagagcctcgccccattggcaccagatacctgactcgtaatctgtaa

SEQ ID NO: 3567 - DNA, 2208 bp, synthetic construct
  misc_feature 1..2208: note = source = /note="Description of Artificial Sequence: Synthetic polynucleotide"
  source 1..2208: mol_type = other DNA
atggctgccgatggttatcttccagattggctcgaggacactctctctgaaggaataagacagtggtggaagctcaaacctggcccaccaccgccaaagcccgcagagcggcataaggacgacagcaggggtcttgtgcttcctgggtacaagtacctcggacccttcaacggactcgacaagggggagccggtcaacgaggcagacgccgcggccctcgagcacgacaaggcctacgaccggcagctcgacagcggagacaacccgtacctcaagtacaaccacgccgacgcggagtttcaggagcgtcttaaagaagatacgtcttttgggggcaacctcggacgagcagtcttccaggcgaaaaagagggttcttgaacctctgggcctggttgaggaacctgttaagacggctccgggaaaaaagaggccggtagagcactctcctgtggagccagactcctcctcgggaaccggaaaggcgggccagcagcctgcaagaaaaagattgaatttcggtcagactggagacgcagactccgtacctgacccccagcctctcggacagccaccagcagccccctctggtctgggaactaatacgatggctacaggcagtggcgcaccaatggcagacaataacgagggcgccgacggagtgggtaattcctcgggaaattggcattgcgattccacatggatgggcgacagagtcatcaccaccagcacccgcacctgggctctgcccacctacaacaaccatctgtacaagcaaatttccagccaatcaggagcatcgaacgacaaccactactttggctacagcaccccctgggggtattttgacttcaacagattccactgccacttttcgccacgtgactggcaaagactcatcaacaacaactggggattccggcccaagagactcagcttcaagctctttaacattcaagtcaaggaggtcacgcagaatgacggtacgacgacgattgccaataaccttaccagcacggttcaggtctttactgactcggagtaccagctcccgtacgtcctcggctcggcgcatcaaggatgcctcccgccgttcccagcagacgtcttcatggtgccacagtatggatacctcaccctgaacaacgggagtcaggcggtaggacgctcttcattttactgcctggagtacttcccttctcagatgcttcgcacgggaaacaactttaccttcagctacacctttgaggacgtgccttttcacagcagctacgctcacagccaaagtctggaccgtctcatgaatcctctcatcgaccaatacctgtattacttgagcaaaacaaacgctccaagcggaaccaccacgatgtccaggcttcagttttctcaggccggagcgagtgacattcgggaccagtctagaaactggcttcctggaccctgttaccgccagcagcgagtatcaaagacagctgcggacaacaacaacagtgattactcgtggactggagctaccaagtaccacctcaatggaagagactctctggtgaacccgggcccagctatggccagccacaaggatgatgaagaaaaatattttcctcagagcggggttctcatcttcgggaaacaaggctcaaataaaactaatgtggacattgaaaaggttatgattacagacgaagaggaaatcaggaccaccaatcccgtggctacggagcagtatggttctgtatctaccaaccttcaaagcggcaacacacaagcagctaccccagatgtcaacacacaaggcgttcttcctggcatggtctggcaggacagagatgtgtacctgcaggggcccatctgggcaaagattcctcacacggacggacactttcacccttctcccctcatgggcggatttggattgaagcaccctcccccacagattctcatcaagaataccccggtacctgcgaatccttcgaccaccttcagtgcggcaaagtttgcttccttcatcacacagtattccacgggacaggtcagcgtggagatagagtgggagctgcagaaggagaacagcaaacgctggaaccccgagatccagtatacttccaactacaacaaatctgttaatgtggactttactgtggacactaatggtgtgtattcagagcctcgccccattggcaccagatacctgactcgtaatctgtaa

SEQ ID NO: 3568 - DNA, 2208 bp, synthetic construct
  misc_feature 1..2208: note = source = /note="Description of Artificial Sequence: Synthetic polynucleotide"
  source 1..2208: mol_type = other DNA
atggctgccgatggttatcttccagattggctcgaggacactctctctgaaggaataagacagtggtggaagctcaaacctggcccaccaccgccaaagcccgcagagcggcataaggacgacagcaggggtcttgtgcttcctgggtacaagtacctcggacccttcaacggactcgacaagggggagccggtcaacgaggcagacgccgcggccctcgagcacgacaaggcctacgaccggcagctcgacagcggagacaacccgtacctcaagtacaaccacgccgacgcggagtttcaggagcgtcttaaagaagatacgtcttttgggggcaacctcggacgagcagtcttccaggcgaaaaagagggttcttgaacctctgggcctggttgaggaacctgttaagacggctccgggaaaaaagaggccggtagagcactctcctgtggagccagactcctcctcgggaaccggaaaggcgggccagcagcctgcaagaaaaagattgaatttcggtcagactggagacgcagactccgtacctgacccccagcctctcggacagccaccagcagccccctctggtctgggaactaatacgatggctacaggcagtggcgcaccaatggcagacaataacgagggcgccgacggagtgggtaattcctcgggaaattggcattgcgattccacatggatgggcgacagagtcatcaccaccagcacccgcacctgggctctgcccacctacaacaaccatctgtacaagcaaatttccagccaatcaggagcatcgaacgacaaccactactttggctacagcaccccctgggggtattttgacttcaacagattccactgccacttttcgccacgtgactggcaaagactcatcaacaacaactggggattccggcccaagagactcagcttcaagctctttaacattcaagtcaaggaggtcacgcagaatgacggtacgacgacgattgccaataaccttaccagcacggttcaggtctttactgactcggagtaccagctcccgtacgtcctcggctcggcgcatcaaggatgcctcccgccgttcccagcagacgtcttcatggtgccacagtatggatacctcaccctgaacaacgggagtcaggcggtaggacgctcttcattttactgcctggagtacttcccttctcagatgcttcgcacgggaaacaactttaccttcagctacacctttgaggacgtgccttttcacagcagctacgctcacagccaaagtctggaccgtctcatgaatcctctcatcgaccaatacctgtattacttgagcaaaacaaacgctccaagcggaaccaccacgatgtccaggcttcagttttctcaggccggagcgagtgacattcgggaccagtctagaaactggcttcctggaccctgttaccgccagcagcgagtatcaaagacagctgcggacaacaacaacagtgattactcgtggactggagctaccaagtaccacctcaatggaagagactctctggtgaacccgggcccagctatggccagccacaaggatgatgaagaaaaatattttcctcagagcggggttctcatcttcgggaaacaaggctcaaataaaactaatgtggacattgaaaaggttatgattacagacgaagaggaaatcaggaccaccaatcccgtggctacggagcagtatggttctgtatctaccaaccttcaaagcggcaacacacaagcagctacctcagatgtcaacacacaaggcgttcttcctggcatggtctggcaggacagagatgtgtacctgcaggggcccatctgggcaaagattcctcacacggacggacactttcacccttctcccctcatgggcggatttggattgaagcaccctcccccacagattctcatcaagaataccccggtacctgcgaatccttcgaccaccttcagtgtggcaaagtttgcttccttcatcacacagtattccacgggacaggtcagcgtggagatagagtgggagctgcagaaggagaacagcaaacgctggaaccccgagatccagtatacttccaactacaacaaatctgttaatgtggactttactgtggacactaatggtgtgtattcagagcctcgccccattggcaccagatacctgactcgtaatctgtaa

SEQ ID NO: 3569 - DNA, 2208 bp, synthetic construct
  misc_feature 1..2208: note = source = /note="Description of Artificial Sequence: Synthetic polynucleotide"
  source 1..2208: mol_type = other DNA
atggctgccgatggttatcttccagattggctcgaggacactctctctgaaggaataagacagtggtggaagctcaaacctggcccaccaccgccaaagcccgcagagcggcataaggacgacagcaggggtcttgtgcttcctgggtacaagtacctcggacccttcaacggactcgacaagggggagccggtcaacgaggcagacgccgcggccctcgagcacgacaaggcctacgaccggcagctcgacagcggagacaacccgtacctcaagtacaaccacgccgacgcggagtttcaggagcgtcttaaagaagatacgtcttttgggggcaacctcggacgagcagtcttccaggcgaaaaagagggttcttgaacctctgggcctggttgaggaacctgttaagacggctccgggaaaaaagaggccggtagagcactctcctgtggagccagactcctcctcgggaaccggaaaggcgggccagcagcctgcaagaaaaagattgaatttcggtcagactggagacgcagactccgtacctgacccccagcctctcggacagccaccagcagccccctctggtctgggaactaatacgatggctacaggcagtggcgcaccaatggcagacaataacgagggcgccgacggagtgggtaattcctcgggaaattggcattgcgattccacatggatgggcgacagagtcatcaccaccagcacccgcacctgggctctgcccacctacaacaaccatctgtacaagcaaatttccagccaatcaggagcatcgaacgacaaccactactttggctacagcaccccctgggggtattttgacttcaacagattccactgccacttttcgccacgtgactggcaaagactcatcaacaacaactggggattccggcccaagagactcagcttcaagctctttaacattcaagtcaaggaggtcacgcagaatgacggtacgacgacgattgccaataaccttaccagcacggttcaggtctttactgactcggagtaccagctcccgtacgtcctcggctcggcgcatcaaggatgcctcccgccgttcccagcagacgtcttcatggtgccacagtatggatacctcaccctgaacaacgggagtcaggcggtaggacgctcttcattttactgcctggagtacttcccttctcagatgcttcgcacgggaaacaactttaccttcagctacacctttgaggacgtgccttttcgcagcagctacgctcacagccaaagtctggaccgtctcatgaatcctctcatcgaccaatacctgtattacttgagcaaaacaaacgctccaagcggaaccaccacgatgtccaggcttcagttttctcaggccggagcgagtgacattcgggaccagtctagaaactggcttcctggaccctgttaccgccagcagcgagtatcaaagacagctgcggacaacaacaacagtgattactcgtggactggagctaccaagtaccacctcaatggaagagactctctggtgaacccgggcccagctatggccagccacaaggatgatgaagaaaaatattttcctcagagcggggttctcatcttcgggaaacaaggctcaaataaaactaatgtggacattgaaaaggttatgattacagacgaagaggaaatcaggaccaccaatcccgtggctacggagcagtatggttctgtatctaccaaccttcaaagcggcaacacacaagcagctacctcagatgtcaacacacaaggcgttcttcctggcatggtctggcaggacagagatgtgtacctgcaggggcccatctgggcaaagattcctcacacggacggacactttcacccttctcccctcatgggcggatttggattgaagcaccctcccccacagattctcatcaagaataccccggtacctgcgaatccttcgaccaccttcagtgcggcaaagtttgcttccttcatcacacagtattccacgggacaggtcagcgtggagatagagtgggagctgcagaaggagaacagcaaacgctggaaccccgagatccagtatacttccaactacaacaaatctgttaatgtggactttactgtggacactaatggtgtgtattcagagcctcgccccattggcaccagatacctgactcgtaatctgtaa

SEQ ID NO: 3570 - DNA, 2208 bp, synthetic construct
  misc_feature 1..2208: note = source = /note="Description of Artificial Sequence: Synthetic polynucleotide"
  source 1..2208: mol_type = other DNA
atggctgccgatggttatcttccagattggctcgaggacactctctctgaaggaataagacagtggtggaagctcaaacctggcccaccaccgccaaagcccgcagagcggcataaggacgacagcaggggtcttgtgcttcctgggtacaagtacctcggacccttcaacggactcgacaagggggagccggtcaacgaggcagacgccgcggccctcgagcacgacaaggcctacgaccggcagctcgacagcggagacaacccgtacctcaagtacaaccacgccgacgcggagtttcaggagcgtcttaaagaagatacgtcttttgggggcaacctcggacgagcagtcttccaggcgaaaaagagggttcttgaacctctgggcctggttgaggaacctgttaagacggctccgggaaaaaagaggccggtagagcactctcctgtggagccagactcctcctcgggaaccggaaaggcggaccagcagcctgcaagaaaaagattgaatttcggtcagactggagacgcagactccgtacctgacccccagcctctcggacagccaccagcagccccctctggtctgggaactaatacgatggctacaggcagtggcgcaccaatggcagacaataacgagggcgccgacggagtgggtaattcctcgggaaattggcattgcgattccacatggatgggcgacagagtcatcaccaccagcacccgcacctgggctctgcccacctacaacaaccatctgtacaagcaaatttccagccaatcaggagcatcgaacgacaaccactactttggctacagcaccccctgggggtattttgacttcaacagattccactgccacttttcgccacgtgactggcaaagactcatcaacaacaactggggattccggcccaagagactcagcttcaagctctttaacattcaagtcaaggaggtcacgcagaatgacggtacgacgacgattgccaataaccttaccagcacggttcaggtctttactgactcggagtaccagctcccgtacgtcctcggctcggcgcatcaaggatgcctcccgccgttcccagcagacgtcttcatggtgccacagtatggatacctcaccctgaacaacgggagtcaggcggtaggacgctcttcattttactgcctggagtacttcccttctcagatgcttcgcacgggaaacaactttaccttcagctacacctttgaggacgtgccttttcacagcagctacgctcacagccaaagtctggaccgtctcatgaatcctctcatcgaccaatacctgtattacttgagcaaaacaaacgctccaagcggaaccaccacgatgtccaggcttcagttttctcaggccggagcgagtgacattcgggaccagtctagaaactggcttcctggaccctgttaccgccagcagcgagtatcaaagacagctgcggacaacaacaacagtgattactcgtggactggagctaccaagtaccacctcaatggaagagactctctggtgaacccgggcccagctatggccagccacaaggatgatgaagaaaaatattttcctcagagcggggttctcatcttcgggaaacaaggctcaaataaaactaatgtggacattgaaaaggttatgattacagacgaagaggaaatcaggaccaccaatcccgtggctacggagcagtatggttctgtatctaccaaccttcaaagcggcaacacacaagcagctacctcagatgtcaacacacaaggcgttcttcctggcatggtctggcaggacagagatgtgtacctgcaggggcccatctgggcaaagattcctcacacggacggacactttcacccttctcccctcatgggcggatttggattgaagcaccctcccccacagattctcatcaagaataccccggtacctgcgaatccttcgaccaccttcagtgcggcaaagtttgcttccttcatcacacagtattccacgggacaggtcagcgtggagatagagtgggagctgcagaaggagaacagcaaacgctggaaccccgagatccagtatacttccaactacaacaaatctgttaatgtggactttactgtggacactaatggtgtgtattcagagcctcgccccattggcaccagatacctgactcgtaatctgtaa

SEQ ID NO: 3571 - DNA, 2208 bp, synthetic construct
  misc_feature 1..2208: note = source = /note="Description of Artificial Sequence: Synthetic polynucleotide"
  source 1..2208: mol_type = other DNA
atggctgccgatggttatcttccagattggctcgaggacactctctctgaaggaataagacagtggtggaagctcaaacctggcccaccaccgccaaagcccgcagagcggcataaggacgacagcaggggtcttgtgcttcctgggtacaagtacctcggacccttcaacggactcgacaagggggagccggtcaacgaggcagacgccgcggccctcgagcacgacaaggcctacgaccggcagctcgacagcggagacaacccgtacctcaagtacaaccacgccgacgcggagtttcaggagcgtcttaaagaagatacgtcttttgggggcaacctcggacgagcagtcttccaggcgaaaaagagggttcttgaacctctgggcctggttgaggaacctgttaagacggctccgggaaaaaagaggccggtagagcactctcctgtggagccagactcctcctcgggaaccggaaaggcgggccagcagcctgcaagaaaaagattgaatttcggtcagactggagacgcagactccgtacctgacccccagcctctcggacagccaccagcagccccctctggtctgggaactaatacgatggctacaggcagtggcgcaccaatggcagacaataacgagggcgccgacggagtgggtaattcctcgggaaattggcattgcgattccacatggatgggcgacagagtcatcaccaccagcacccgcacctgggctctgcccacctacaacaaccatctgtacaagcaaatttccagccaatcaggagcatcgaacgacaaccactactttggctacagcaccccctgggggtattttgacttcaacagattccactgccacttttcgccacgtgactggcaaagactcatcaacaacaactggggattccggcccaagagactcagcttcaagctctttaacattcaagtcaaggaggtcacgcagaatgacggtacgacgacgattgccaataaccttaccaacacggttcaggtctttactgactcggagtaccagctcccgtacgtcctcggctcggcgcatcaaggatgcctcccgccgttcccagcagacgtcttcatggtgccacagtatggatacctcaccctgaacaacgggagtcaggcggtaggacgctcttcattttactgcctggagtacttcccttctcagatgcttcgcacgggaaacaactttaccttcagctacacctttgaggacgtgccttttcacagcagctacgctcacagccaaagtctggaccgtctcatgaatcctctcatcgaccaatacctgtattacttgagcaaaacaaacgctccaagcggaaccaccacgatgtccaggcttcagttttctcaggccggagcgagtgacattcgggaccagtctagaaactggcttcctggaccctgttaccgccagcagcgagtatcaaagacagctgcggacaacaacaacagtgattactcgtggactggagctaccaagtaccacctcaatggaagagactctctggtgaacccgggcccagctatggccagccacaaggatgatgaagaaaaatattttcctcagagcggggttctcatcttcgggaaacaaggctcaaataaaactaatgtggacattgaaaaggttatgattacagacgaagaggaaatcaggaccaccaatcccgtggctacggagcagtatggttctgtatctaccaaccttcaaagcggcaacacacaagcagctacctcagatgtcaacacacaaggcgttcttcctggcatggtctggcaggacagagatgtgtacctgcaggggcccatctgggcaaagattcctcacacggacggacactttcacccttctcccctcatgggcggatttggattgaagcaccctcccccacagattctcatcaagaataccccggtacctgcgaatccttcgaccaccttcagtgcggcaaagtttgcttccttcatcacacagtattccacgggacaggtcagcgtggagatagagtgggagctgcagaaggagaacagcaaacgctggaaccccgagatccagtatacttccaactacaacaaatctgttaatgtggactttactgtggacactaatggtgtgtattcagagcctcgccccattggcaccagatacctgactcgtaatctgtaa

SEQ ID NO: 3572 - DNA, 2208 bp, synthetic construct
  misc_feature 1..2208: note = source = /note="Description of Artificial Sequence: Synthetic polynucleotide"
  source 1..2208: mol_type = other DNA
atggctgccgatggttatcttccagattggctcgaggacactctctctgaaggaataagacagtggtggaagctcaaacctggcccaccaccgccaaagcccgcagagcggcataaggacgacagcaggggtcttgtgcttcctgggtacaagtacctcggacccttcaacggactcgacaagggggagccggtcaacgaggcagacgccgcggccctcgagcacgacaaggcctacgaccggcagctcgacagcggagacaacccgtacctcaagtacaaccacgccgacgcggagtttcaggagcgtcttaaagaagatacgtcttttgggggcaacctcggacgagcagtcttccaggcgaaaaagagggttcttgaacctctgggcctggttgaggaacctgttaagacggctccgggaaaaaagaggccggtagagcactctcctgtggagccagactcctcctcgggaaccggaaaggcgggccagcagcctgcaagaaaaagattgaatttcggtcagactggagacgcagactccgtacctgacccccagcctctcggacagccaccagcagccccctctggtctgggaactaatacgatggctacaggcagtggcgcaccaatggcagacaataacgagggcgccgacggagtgggtaattcctcgggaaattggcattgcgattccacatggatgggcgacagagtcatcaccaccagcacccgcacctgggctctgcccacctacaacaaccatctgtacaagcaaatttccagccaatcaggagcatcgaacgacaaccactactttggctacaacaccccctgggggtattttgacttcaacagattccactgccacttttcgccacgtgactggcaaagactcatcaacaacaactggggattccggcccaagagactcagcttcaagctctttaacattcaagtcaaggaggtcacgcagaatgacggtacgacgacgattgccaataaccttaccagcacggttcaggtctttactgactcggagtaccagctcccgtacgtcctcggctcggcgcatcaaggatgcctcccgccgttcccagcagacgtcttcatggtgccacagtatggatacctcaccctgaacaacgggagtcaggcggtaggacgctcttcattttactgcctggagtacttcccttctcagatgcttcgcacgggaaacaactttaccttcagctacacctttgaggacgtgccttttcacagcagctacgctcacagccaaagtctggaccgtctcatgaatcctctcatcgaccaatacctgtattacttgagcaaaacaaacgctccaagcggaaccaccacgatgtccaggcttcagttttctcaggccggagcgagtgacattcgggaccagtctagaaactggcttcctggaccctgttaccgccagcagcgagtatcaaagacagctgcggacaacaacaacagtgattactcgtggactggagctaccaagtaccacctcaatggaagagactctctggtgaacccgggcccagctatggccagccacaaggatgatgaagaaaaatattttcctcagagcggggttctcatcttcgggaaacaaggctcaaataaaactaatgtggacattgaaaaggttatgattacagacgaagaggaaatcaggaccaccaatcccgtggctacggagcagtatggttctgtatctaccaaccttcaaagcggcaacacacaagcagctacctcagatgtcaacacacaaggcgttcttcctggcatggtctggcaggacagagatgtgtacctgcaggggcccatctgggcaaagattcctcacacggacggacactttcacccttctcccctcatgggcggatttggattgaagcaccctcccccacagattctcatcaagaataccccggtacctgcgaatccttcgaccaccttcagtgcggcaaagtttgcttccttcatcacacagtattccacgggacaggtcagcgtggagatagagtgggagctgcagaaggagaacagcaaacgctggaaccccgagatccagtatacttccaactacaacaaatctgttaatgtggactttactgtggacactaatggtgtgtattcagagcctcgccccattggcaccagatacctgactcgtaatctgtaa

SEQ ID NO: 3573 - DNA, 2208 bp, synthetic construct
  misc_feature 1..2208: note = source = /note="Description of Artificial Sequence: Synthetic polynucleotide"
  source 1..2208: mol_type = other DNA
atggctgccgatggttatcttccagattggctcgaggacactctctctgaaggaataagacagtggtggaagctcaaacctggcccaccaccgccaaagcccgcagagcggcataaggacgacagcaggggtcttgtgcttcctgggtacaagtacctcggacccttcaacggactcgacaagggggagccggtcaacgaggcagacgccgcggccctcgagcacgacaaggcctacgaccggcagctcgacagcggagacaacccgtacctcaagtacaaccacgccgacgcggagtttcaggagcgtcttaaagaagatacgtcttttgggggcaacctcggacgagcagtcttccaggcgaaaaagagggttcttgaacctctgggcctggttgaggaacctgttaagacggctccgggaaaaaagaggccggtagagcactctcctgtggagccagactcctcctcgggaaccggaaaggcgggccagcagcctgcaagaaaaagattgaatttcggtcagactggaggcgcagactccgtacctgacccccagcctctcggacagccaccagcagccccctctggtctgggaactaatacgatggctacaggcagtggcgcaccaatggcagacaataacgagggcgccgacggagtgggtaattcctcgggaaattggcattgcgattccacatggatgggcgacagagtcatcaccaccagcacccgcacctgggctctgcccacctacaacaaccatctgtacaagcaaatttccagccaatcaggagcatcgaacgacaaccactactttggctacagcaccccctgggggtattttgacttcaacagattccactgccacttttcgccacgtgactggcaaagactcatcaacaacaactggggattccggcccaagagactcagcttcaagctctttaacattcaagtcaaggaggtcacgcagaatgacggtacgacgacgattgccaataaccttaccagcacggttcaggtctttactgactcggagtaccagctcccgtacgtcctcggctcggcgcatcaaggatgcctcccgccgttcccagcagacgtcttcatggtgccacagtatggatacctcaccctgaacaacgggagtcaggcggtaggacgctcttcattttactgcctggagtacttcccttctcagatgcttcgcacgggaaacaactttaccttcagctacacctttgaggacgtgccttttcacagcagctacgctcacagccaaagtctggaccgtctcatgaatcctctcatcgaccaatacctgtattacttgagcaaaacaaacgctccaagcggaaccaccacgatgtccaggcttcagttttctcaggccggagcgagtgacattcgggaccagtctagaaactggcttcctggaccctgttaccgccagcagcgagtatcaaagacagctgcggacaacaacaacagtgattactcgtggactggagctaccaagtaccacctcaatggaagagactctctggtgaacccgggcccagctatggccagccacaaggatgatgaagaaaaatattttcctcagagcggggttctcatcttcgggaaacaaggctcaaataaaactaatgtggacattgaaaaggttatgattacagacgaagaggaaatcaggaccaccaatcccgtggctacggagcagtatggttctgtatctaccaaccttcaaagcggcaacacacaagcagctacctcagatgtcaacacacaaggcgttcttcctggcatggtctggcaggacagagatgtgtacctgcaggggcccatctgggcaaagattcctcacacggacggacactttcacccttctcccctcatgggcggatttggattgaagcaccctcccccacagattctcatcaagaataccccggtacctgcgaatccttcgaccaccttcagtgcggcaaagtttgcttccttcatcacacagtattccacgggacaggtcagcgtggagatagagtgggagctgcagaaggagaacagcaaacgctggaaccccgagatccagtatacttccaactacaacaaatctgttaatgtggactttactgtggacactaatggtgtgtattcagagcctcgccccattggcaccagatacctgactcgtaatctgtaa

SEQ ID NO: 3574 - DNA, 2208 bp, synthetic construct
  misc_feature 1..2208: note = source = /note="Description of Artificial Sequence: Synthetic polynucleotide"
  source 1..2208: mol_type = other DNA
atggctgccgatggttatcttccagattggctcgaggacactctctctgaaggaataagacagtggtggaagctcaaacccggcccaccaccaccaaggcccgcagagcggcatcaggacgacagcaggggtcttgtgcttcctgggtacaagtacctcggacccttcaacggactcgacaaaggagagccggtcaacgaggcagacgctgcggccctcgagcacgacaaggcctacgaccggcagctcgacagcggagacaacccgtacctcaagtacaaccacgccgacgcggagtttcaggagcgtcttaaagaagatacgtcttttgggggcaacctcggacgagcagtcttccaggcgaaaaagagggttcttgaacctctgggcctggttgaggaacctgttaagacggctccgggaaaaaagaggccggtagagcactctcctgcggagccagactcctcctcgggaaccggaaaagcgggccagcagcctgcaagaaagagattgaatttcggtcagactggagacgcagactccgtacctgacccccagcctctcggacagccaccagcagcccccacaagtttgggatctactacaatggctacaggcagtggcgcaccaatggcagacaataacgagggtgccgatggagtgggtaattcctcaggaaattggcattgcgattcccaatggctgggcgacagagtcatcaccaccagcacccgaacctgggccctgcccacctacaacaaccacctctacaagcaaatctccagccaatcaggagcatcgaacgacaaccactactttggctacagcaccccttgggggtattttgacttcaacagattccactgtcacttctccccacgtgactggcaaagactcatcaacaacaactggggattccgacccaagagactcaacttcaagctctttaacattcaagtcaaagaggtcacgcagaatgacggtacgacgacgattgccaataaccttaccagcacggttcaggtgtttactgactcggagtaccagctcccgtacgtcctcggctcggcgcatcaaggatgcctcccgccgtttccagcggacgtcttcatggtcccacagtatggatacctcaccctgaacaacgggagtcaggcggtaggacgctcttccctttactgcctggagtactttccttctcagatgctgcgtaccggaaacaactttaccttcagctacacctttgaggacgtgcccttccacagcagctacgctcacagccagagtttggaccggctgatgaatcctctgatcgaccagtatctgtattatctgaacaggacacaatcaaatagtggaactcttcagcagtctaggctactgtttagccaagctggacccaccagcatgtcccttcaagctaaaaactggctgcctggaccttgctacagacagcagcgtctgtcaaagcaggcaaacgacaacaacaacagcaactttccctggactgcggctacaaagtatcatctaaatggtcgggactcgttggttaatccaggaccagctatggccagccacaaagacgatgaagaaaagtttttccccatgcatggaaccctgatatttggtaaacaaggaacaaatgctaacgacgcggatttggaacatgtcatgattacagatgaagaagaaatcaggaccaccaatcccgtggctacagagcagtacggaaacgtgtcaaataatttgcaaaactcaaatactggtccaactacagaaaatgtcaatcaccagggagcgttacctggtatggtgtggcaggatcgagacgtgtacctgcagggacccatttgggccaagattcctcacaccgacggacactttcacccttctccactgatgggaggttttggactcaaacacccgcctcctcaaatcatgatcaaaaacactcctgttccagccaatcctcctacaaacttcagcgcggcaaagtttgcttccttcatcacacagtattccacgggacaggtcagcgtggagatcgagtgggagctgcagaaggagaacagcaaacgctggaaccccgagatccagtacacttccaactacaacaaatctgttaatgtggactttactgtggacgctaatggtgtgtattcagagcctcgccccattggcaccagatacctgactcgtaatctgtaa

SEQ ID NO: 3575 - DNA, 2208 bp, synthetic construct
  misc_feature 1..2208: note = source = /note="Description of Artificial Sequence: Synthetic polynucleotide"
  source 1..2208: mol_type = other DNA
atggctgccgatggttatcttccagattggctcgaggacactctctctgaaggaataagacagtggtggaagctcaaacctggcccaccaccaccaaggcccgcagagcggcatcaggacgacagcaggggtcttgtgcttcctgggtacaagtacctcggacccttcaacggactcgacaaaggagagccggtcaacgaggcagacgctgcggccctcgagcacgacaaggcctacgaccggcagctcgacagcggagacaacccgtacctcaagtacaaccacgccgacgcggagtttcaggagcgtcttaaagaagatacgtcttttgggggcaacctcggacgagcagtcttccaggcgaaaaagagggttcttgaacctctgggcctggttgaggaacctgttaagacggctccgggaaaaaagaggccggtagagcactctcctgcggagccagactcctcctcgggaaccggaaaagcgggccagcagcctgcaagaaagagattgaatttcggtcagactggagacgcagactccgtacctgacccccagcctctcggacagccaccagcagcccccacaagtttgggatctactacaatggctacaggcagtggcgcaccaatggcagacaataacgagggtgccgatggagtgggtaattcctcaggaaattggcattgcgatccccaatggctgggcgacagagtcatcaccaccagcacccgaacctgggccctgcccacctacaacaaccacctctacaagcaaatctccagccaatcaggagcatcgaacgacaaccactactttggctacagcaccccttgggggtattttgacttcaacagattccactgtcacttctccccacgtgactggcaaagactcatcaacaacaactggggattccgacccaagagactcaacttcaagctctttaacattcaagtcaaagaggtcacgcagaatgacggtacgacgacgattgccaataaccttaccagcacggttcaggtgtttactgactcggagtaccagctcccgtacgtcctcggctcggcgcatcaaggatgcctcccgccgtttccagcggacgtcttcatggtcccacagtatggatacctcaccctgaacaacgggagtcaggcggtaggacgctcttccttttactgcctggagtactttccttctcagatgctgcgtaccggaaacaactttaccttcagctacacctttgaggacgtgcccttccacagcagctacgctcacagccagagtttggaccggctgatgaatcctctgatcgaccagtatctgtattatctgaacaggacacaatcaaatagtggaactcttcagcagtctaggctactgtttagccaagctggacccaccagcatgtcccttcaagctaaaaactggctgcctggaccttgctacagacagcagcgtctgtcaaagcaggcaaacgacaacaacaacagcaactttccctggactgcggctacaaagtatcatctaaatggtcgggactcgttggttaatccaggaccagctatggccagccacaaagacgatgaagaaaagtttttccccatgcatggaaccctgatatttggtaaacaaggaacaaatgctaacgacgcggatttggaacatgtcatgattacagatgaagaagaaatcaggaccaccaatcccgtggctacagagcagtacggaaacgtgtcaaataatttgcaaaactcaaatactggtccaactacagaaaatgtcaatcaccagggagcgttacctggtatggtgtggcaggatcgagacgtgtacctgcagggacccatttgggccaagattcctcacaccgacggacactttcacccttctccactgatgggaggttttggactcaaacacccgcctcctcaaatcatgatcaaaaacactcctgttccagccaatcctcctacaaacttcagcgcggcaaagtttgcttccttcatcacacagtattccacgggacaggtcagcgtggagatcgagtgggagctgcagaaggagaacagcaaacgctggaaccccgagatccagtacacttccaactacaacaaatctgttaatgtggactttactgtggacgctaatggtgtgtattcagagcctcgccccattggcaccagatacctgactcgtaatctgtaa

SEQ ID NO: 3576 - DNA, 2208 bp, synthetic construct
  misc_feature 1..2208: note = source = /note="Description of Artificial Sequence: Synthetic polynucleotide"
  source 1..2208: mol_type = other DNA
atggctgccgatggttatcttccagattggctcgaggacactctctctgaaggaataagacagtggtggaagctcaaacctggcccaccaccaccaaggcccgcagagcggcatcaggacgacagcaggggtcttgtgcttcctgggtacaagtacctcggacccttcaacggactcgacaaaggagagccggtcaacgaggcagacgctgcggccctcgagcacgacaaggcctacgaccggcagctcgacagcggagacaacccgtacctcaagtacaaccacgccgacgcggagtttcaggagcgtcttaaagaagatacgtcttttgggggcaacctcggacgagcagtctcccaggcgaaaaagagggttcttgaacctctgggcctggttgaggaacctgttaagacggctccgggaaaaaagaggccggtagagcactctcctgcggagccagactcctcctcgggaaccggaaaagcgggccagcagcctgcaagaaagagattgaatttcggtcagactggagacgcagactccgtacctgacccccagcctctcggacagccaccagcagcccccacaagtttgggatctactacaatggctacaggcagtggcgcaccaatggcagacaataacgagggtgccgatggagtgggtaattcctcaggaaattggcattgcgattcccaatggctgggcgacagagtcatcaccaccagcacccgaacctgggccctgcccacctacaacaaccacctctacaagcaaatctccagccaatcaggagcatcgaacgacaaccactactttggctacagcaccccttgggggtattttgacttcaacagattccactgtcacttctccccacgtgactggcaaagactcatcaacaacaactggggattccgacccaagagactcaacttcaagctctttaacattcaagtcaaagaggtcacgcagaatgacggtacgacgacgattgccaataaccttaccagcacggttcaggtgtttactgactcggagtaccagctcccgtacgtcctcggctcggcgcatcaaggatgcctcccgccgtttccagcggacgtcttcatggtcccacagtatggatacctcaccctgaacaacgggagtcaggcggtaggacgctcttccttttactgcctggagtactttccttctcagatgctgcgtaccggaaacaactttaccttcagctacacctttgaggacgtgcccttccacagcagctacgctcacagccagagtttggaccggctgatgaatcctctgatcgaccagtatctgtattatctgaacaggacacaatcaaatagtggaactcttcagcagtctaggctactgtttagccaagctggacccaccagcatgtcccttcaagctaaaaactggctgcctggaccttgctacagacagcagcgtctgtcaaagcaggcaaacgacaacaacaacagcaactttccctggactgcggctacaaagtatcatctaaatggtcgggactcgttggttaatccaggaccagctatggccagccacaaagacgatgaagaaaagtttttccccatgcatggaaccctgatatttggtaaacaaggaacaaatgctaacgacgcggatttggaacatgtcatgattacagatgaagaagaaatcaggaccaccaatcccgtggctacagagcagtacggaaacgtgtcaaataatttgcaaaactcaaatactggtccaactacagaaaatgtcaatcaccagggagcgttacctggtatggtgtggcaggatcgagacgtgtacctgcagggacccatttgggccaagattcctcacaccgacggacactttcacccttctccactgatgggaggttttggactcaaacacccgcctcctcaaatcatgatcaaaaacactcctgttccagccaatcctcctacaaacttcagcgcggcaaagtttgcttccttcatcacacagtattccacgggacaggtcagcgtggagatcgagtgggagctgcagaaggagaacagcaaacgctggaaccccgagatccagtacacttccaactacaacaaatctgttaatgtggactttactgtggacgctaatggtgtgtattcagagcctcgccccattggcaccagatacctgactcgtaatctgtaa

SEQ ID NO: 3577 - DNA, 2208 bp, synthetic construct
  misc_feature 1..2208: note = source = /note="Description of Artificial Sequence: Synthetic polynucleotide"
  source 1..2208: mol_type = other DNA
atggctgccgatggttatcttccagattggctcgaggacactctctctgaaggaataagacagtggtggaagctcaaacctggcccaccaccaccaaggcccgcagagcggcatcaggacgacagcaggggtcttgtgcttcctgggtacaagtacctcggacccttcaacggactcgacaaaggagagccggtcaacgaggcagacgctgcggccctcgagcacgacaaggcctacgaccggcagctcgacagcggagacaacccgtacctcaagtacaaccacgccgacgcggagtttcaggagcgtcttaaagaagatacgtcttttgggggcaacctcggacgagcagtcttccaggcgaaaaagagggttcttgaacctctgggcctggttgaggaacctgttaagacggctccgggaaaaaagaggccggtagagcactctcctgcggagccagactcctcctcgggaaccggaaaagcgggccagcagcctgcaagaaagagattgaatttcggtcagactggagacgcagactccgtacctgacccccagcctctcggacagccaccagcagcccccacaagtttgggatctactacaatggctacaggcagtggcgcaccaatggcagacaataacgagggtgccgatggagtgggtaattcctcaggaaattggcattgcgattcccaatggctgggcgacagagtcatcaccaccagcacccgaacctgggccctgcccacctacaacaaccacctctacaagcaaatctccagccaatcaggagcatcgaacgacaaccactactttggctacagcaccccttgggggtattttgacttcaacagattccactgtcacttctccccacgtgactggcaaagactcatcaacaacaactggggattccgacccaagagactcaacttcaagctctttaacattcaagtcaaagaggtcacgcagaatgacggtacgacgacgattgccaataaccttaccagcacggttcaggtgtttactgactcggagtaccagctcccgtacgtcctcggctcggcgcatcaaggatgcctcccgccgtttccagcggacgtcttcatggtcccacagtatggatacctcaccctgaacaacgggagtcaggcggtaggacgctcttccttttactgcctggagtactttccttctcagatgctgcgtaccggaaacaactttaccttcagctacacctttgaggacgtgcccttccacagcagctacgctcacagccagagtttggaccggctgatgagtcctctgatcgaccagtatctgtattatctgaacaggacacaatcaaatagtggaactcttcagcagtctaggctactgtttagccaagctggacccaccagcatgtcccttcaagctaaaaactggctgcctggaccttgctacagacagcagcgtctgtcaaagcaggcaaacgacaacaacaacagcaactttccctggactgcggctacaaagtatcatctaaatggtcgggactcgttggttaatccaggaccagctatggccagccacaaagacgatgaagaaaagtttttccccatgcatggaaccctgatatttggtaaacaaggaacaaatgctaacgacgcggatttggaacatgtcatgattacagatgaagaagaaatcaggaccaccaatcccgtggctacagagcagtacggaaacgtgtcaaataatttgcaaaactcaaatactggtccaactacagaaaatgtcaatcaccagggagcgttacctggtatggtgtggcaggatcgagacgtgtacctgcagggacccatttgggccaagattcctcacaccgacggacactttcacccttctccactgatgggaggttttggactcaaacacccgcctcctcaaatcatgatcaaaaacactcctgttccagccaatcctcctacaaacttcagcgcggcaaagtttgcttccttcatcacacagtattccacgggacaggtcagcgtggagatcgagtgggagctgcagaaggagaacagcaaacgctggaaccccgagatccagtacacttccaactacaacaaatctgttaatgtggactttactgtggacgctaatggtgtgtattcagagcctcgccccattggcaccagatacctgactcgtaatctgtaa

SEQ ID NO: 3578 - DNA, 2208 bp, synthetic construct
  misc_feature 1..2208: note = source = /note="Description of Artificial Sequence: Synthetic polynucleotide"
  source 1..2208: mol_type = other DNA
atggctgccgatggttatcttccagattggctcgaggacactctctctgaaggaataagacagtggtggaagctcaaacctggcccaccaccaccaaggcccgcagagcggcatcaggacgacagcaggggtcttgtgcttcctgggtacaagtacctcggacccttcaacggactcgacaaaggagagccggtcaacgaggcagacgctgcggccctcgagcacgacaaggcctacgaccggcagctcgacagcggagacaacccgtacctcaagtacaaccacgccgacgcggagtttcaggagcgtcttaaagaagatacgtcttttgggggcaacctcggacgagcagtcttccaggcgaaaaagagggttcttgaacctctgggcctggttgaggaacctgttaagacggctccgggaaaaaagaggccggtagagcactctcctgcggagccagactcctcctcgggaaccggaaaagcgggccagcagcctgcaagaaagagattgaatttcggtcagactggagacgcagactccgtacctgacccccagcctctcggacagccaccagcagcccccacaagtttgggatctactacaatggctacaggcagtggcgcaccaatggcaggcaataacgagggtgccgatggagtgggtaattcctcaggaaattggcattgcgattcccaatggctgggcgacagagtcatcaccaccagcacccgaacctgggccctgcccacctacaacaaccacctctacaagcaaatctccagccaatcaggagcatcgaacgacaaccactactttggctacagcaccccttgggggtattttgacttcaacagattccactgtcacttctccccacgtgactggcaaagactcatcaacaacaactggggattccgacccaagagactcaacttcaagctctttaacattcaagtcaaagaggtcacgcagaatgacggtacgacgacgattgccaataaccttaccagcacggttcaggtgtttactgactcggagtaccagctcccgtacgtcctcggctcggcgcatcaaggatgcctcccgccgtttccagcggacgtcttcatggtcccacagtatggatacctcaccctgaacaacgggagtcaggcggtaggacgctcttccttttactgcctggagtactttccttctcagatgctgcgtaccggaaacaactttaccttcagctacacctttgaggacgtgcccttccacagcagctacgctcacagccagagtttggaccggctgatgaatcctctgatcgaccagtatctgtattatctgaacaggacacaatcaaatagtggaactcttcagcagtctaggctactgtttagccaagctggacccaccagcatgtcccttcaagctaaaaactggctgcctggaccttgctacagacagcagcgtctgtcaaagcaggcaaacgacaacaacaacagcaactttccctggactgcggctacaaagtatcatctaaatggtcgggactcgttggttaatccaggaccagctatggccagccacaaagacgatgaagaaaagtttttccccatgcatggaaccctgatatttggtaaacaaggaacaaatgctaacgacgcggatttggaacatgtcatgattacagatgaagaagaaatcaggaccaccaatcccgtggctacagagcagtacggaaacgtgtcaaataatttgcaaaactcaaatactggtccaactacagaaaatgtcaatcaccagggagcgttacctggtatggtgtggcaggatcgagacgtgtacctgcagggacccatttgggccaagattcctcacaccgacggacactttcacccttctccactgatgggaggttttggactcaaacacccgcctcctcaaatcatgatcaaaaacactcctgttccagccaatcctcctacaaacttcagcgcggcaaagtttgcttccttcatcacacagtattccacgggacaggtcagcgtggagatcgagtgggagctgcagaaggagaacagcaaacgctggaaccccgagatccagtacacttccaactacaacaaatctgttaatgtggactttactgtggacgctaatggtgtgtattcagagcctcgccccattggcaccagatacctgactcgtaatctgtaa

SEQ ID NO: 3579 - DNA, 2208 bp, synthetic construct
  misc_feature 1..2208: note = source = /note="Description of Artificial Sequence: Synthetic polynucleotide"
  source 1..2208: mol_type = other DNA
atggctgccgatggttatcttccagattggctcgaggacactctctctgaaggaataagacagtggtggaagctcaaacctggcccaccaccaccaaggcccgcagagcggcatcaggacgacagcaggggtcttgtgcttcctgggtacaagtacctcggacccttcaacggactcgacaaaggagagccggtcaacgaggcagacgctgcggccctcgagcacgacaaggcctacgaccggcagctcgacagcggagacaacccgtacctcaagtacaaccacgccgacgcggagtttcaggagcgtcttaaagaagatacgtcttttgggggcaacctcggacgagcagtcttccaggcgaaaaagagggttcttgaacctctgggcctggttgaggaacctgttaagacggctccgggaaaaaagaggccggtagagcactctcctgcggagccagactcctcctcgggaaccggaaaagcgggccagcagcctgcaagaaagagattgaatttcggtcagactggagacgcagactccgtacctgacccccagcctctcggacagccaccagcagcccccacaagtttgggatctactacaatggctacaggcagtggcgcaccaatggcagacagtaacgagggtgccgatggagtgggtaattcctcaggaaattggcattgcgattcccaatggctgggcgacagagtcatcaccaccagcacccgaacctgggccctgcccacctacaacaaccacctctacaagcaaatctccagccaatcaggagcatcgaacgacaaccactactttggctacagcaccccttgggggtattttgacttcaacagattccactgtcacttctccccacgtgactggcaaagactcatcaacaacaactggggattccgacccaagagactcaacttcaagctctttaacattcaagtcaaagaggtcacgcagaatgacggtacgacgacgattgccaataaccttaccagcacggttcaggtgtttactgactcggagtaccagctcccgtacgtcctcggctcggcgcatcaaggatgcctcccgccgtttccagcggacgtcttcatggtcccacagtatggatacctcaccctgaacaacgggagtcaggcggtaggacgctcttccttttactgcctggagtactttccttctcagatgctgcgtaccggaaacaactttaccttcagctacacctttgaggacgtgcccttccacagcagctacgctcacagccagagtttggaccggctgatgaatcctctgatcgaccagtatctgtattatctgaacaggacacaatcaaatagtggaactcttcagcagtctaggctactgtttagccaagctggacccaccagcatgtcccttcaagctaaaaactggctgcctggaccttgctacagacagcagcgtctgtcaaagcaggcaaacgacaacaacaacagcaactttccctggactgcggctacaaagtatcatctaaatggtcgggactcgttggttaatccaggaccagctatggccagccacaaagacgatgaagaaaagtttttccccatgcatggaaccctgatatttggtaaacaaggaacaaatgctaacgacgcggatttggaacatgtcatgattacagatgaagaagaaatcaggaccaccaatcccgtggctacagagcagtacggaaacgtgtcaaataatttgcaaaactcaaatactggtccaactacagaaaatgtcaatcaccagggagcgttacctggtatggtgtggcaggatcgagacgtgtacctgcagggacccatttgggccaagattcctcacaccgacggacactttcacccttctccactgatgggaggttttggactcaaacacccgcctcctcaaatcatgatcaaaaacactcctgttccagccaatcctcctacaaacttcagcgcggcaaagtttgcttccttcatcacacagtattccacgggacaggtcagcgtggagatcgagtgggagctgcagaaggagaacagcaaacgctggaaccccgagatccagtacacttccaactacaacaaatctgttaatgtggactttactgtggacgctaatggtgtgtattcagagcctcgccccattggcaccagatacctgactcgtaatctgtaa

SEQ ID NO: 3580 - DNA, 2208 bp, synthetic construct
  misc_feature 1..2208: note = source = /note="Description of Artificial Sequence: Synthetic polynucleotide"
  source 1..2208: mol_type = other DNA
atggctgccgatggttatcttccagattggctcgaggacactctctctgaaggaataagacagtggtggaagctcaaacctggcccaccaccaccaaggcccgcagagcggcatcaggacgacagcaggggtcttgtgcttcctgggtacaagtacctcggacccttcaacggactcgacaaaggagagccggtcaacgaggcagacgctgcggccctcgagcacgacaaggcctacgaccggcagctcgacagcggagacaacccgtacctcaagtacaaccacgccgacgcggagtttcaggagcgtcttaaagaagatacgtcttttgggggcaacctcggacgagcagtcttccaggcgaaaaagagggttcttgaacctctgggcctggttgaggaacctgttaagacggctccgggaaaaaagaggccggtagagcactctcctgcggagccagactcctcctcgggaaccggaaaagcgggccagcagcctgcaagaaagagattgaatttcggtcagactggagacgcagactccgtacctgacccccagcctctcggacagccaccagcagcccccacaagtttgggatctactacaatggctacaggcagtggcgcaccaatggcagacaataacgagggtgccgatggagtgggtaattcctcaggaaattggcattgcgattcccaatggctgggcgacagagtcatcaccaccagcacccgaacctgggccctgcccacctacaacaaccaccactacaagcaaatctccagccaatcaggagcatcgaacgacaaccactactttggctacagcaccccttgggggtattttgacttcaacagattccactgtcacttctccccacgtgactggcaaagactcatcaacaacaactggggattccgacccaagagactcaacttcaagctctttaacattcaagtcaaagaggtcacgcagaatgacggtacgacgacgattgccaataaccttaccagcacggttcaggtgtttactgactcggagtaccagctcccgtacgtcctcggctcggcgcatcaaggatgcctcccgccgtttccagcggacgtcttcatggtcccacagtatggatacctcaccctgaacaacgggagtcaggcggtaggacgctcttccttttactgcctggagtactttccttctcagatgctgcgtaccggaaacaactttaccttcagctacacctttgaggacgtgcccttccacagcagctacgctcacagccagagtttggaccggctgatgaatcctctgatcgaccagtatctgtattatctgaacaggacacaatcaaatagtggaactcttcagcagtctaggctactgtttagccaagctggacccaccagcatgtcccttcaagctaaaaactggctgcctggaccttgctacagacagcagcgtctgtcaaagcaggcaaacgacaacaacaacagcaactttccctggactgcggctacaaagtatcatctaaatggtcgggactcgttggttaatccaggaccagctatggccagccacaaagacgatgaagaaaagtttttccccatgcatggaaccctgatatttggtaaacaaggaacaaatgctaacgacgcggatttggaacatgtcatgattacagatgaagaagaaatcaggaccaccaatcccgtggctacagagcagtacggaaacgtgtcaaataatttgcaaaactcaaatactggtccaactacagaaaatgtcaatcaccagggagcgttacctggtatggtgtggcaggatcgagacgtgtacctgcagggacccatttgggccaagattcctcacaccgacggacactttcacccttctccactgatgggaggttttggactcaaacacccgcctcctcaaatcatgatcaaaaacactcctgttccagccaatcctcctacaaacttcagcgcggcaaagtttgcttccttcatcacacagtattccacgggacaggtcagcgtggagatcgagtgggagctgcagaaggagaacagcaaacgctggaaccccgagatccagtacacttccaactacaacaaatctgttaatgtggactttactgtggacgctaatggtgtgtattcagagcctcgccccattggcaccagatacctgactcgtaatctgtaa

SEQ ID NO: 3581 - DNA, 2208 bp, synthetic construct
  misc_feature 1..2208: note = source = /note="Description of Artificial Sequence: Synthetic polynucleotide"
  source 1..2208: mol_type = other DNA
atggctgccgatggttatcttccagattggctcgaggacactctctctgaaggaataagacagtggtggaagctcaaacctggcccaccaccaccaaggcccgcagagcggcatcaggacgacagcaggggtcttgtgcttcctgggtacaagtacctcggacccttcaacggactcgacaaaggagagccggtcaacgaggcagacgctgcggccctcgagcacgacaaggcctacgaccggcagctcgacagcggagacaacccgtacctcaagtacaaccacgccgacgcggagtttcaggagcgtcttaaagaagatacgtcttttgggggcaacctcggacgagcagtcttccaggcgaaaaagagggttcttgaacctctgggcctggttgaggaacctgtgaagacggctccgggaaaaaagaggccggtagagcactctcctgcggagccagactcctcctcgggaaccggaaaagcgggccagcagcctgcaagaaagagattgaatttcggtcagactggagacgcagactccgtacctgacccccagcctctcggacagccaccagcagcccccacaagtttgggatctactacaatggctacaggcagtggcgcaccaatggcagacaataacgagggtgccgatggagtgggtaattcctcaggaaattggcattgcgattcccaatggctgggcgacagagtcatcaccaccagcacccgaacctgggccctgcccacctacaacaaccacctctacaagcaaatctccagccaatcaggagcatcgaacgacaaccactactttggctacagcaccccttgggggtattttgacttcaacagattccactgtcacttctccccacgtgactggcaaagactcatcaacaacaactggggattccgacccaagagactcaacttcaagctctttaacattcaagtcaaagaggtcacgcagaatgacggtacgacgacgattgccaataaccttaccagcacggttcgggtgtttactgactcggagtaccagctcccgtacgtcctcggctcggcgcatcaaggatgcctcccgccgtttccagcggacgtcttcatggtcccacagtatggatacctcaccctgaacaacgggagtcaggcggtaggacgctcttccttttactgcctggagtactttccttctcagatgctgcgtaccggaaacaactttaccttcagctacacctttgaggacgtgcccttccacagcagctacgctcacagccagagtttggaccggctgatgaatcctctgatcgaccagtatctgtattatctgaacaggacacaatcaaatagtggaactcttcagcagtctaggctactgtttagccaagctggacccaccagcatgtcccttcaagctaaaaactggctgcctggaccttgctacagacagcagcgtctgtcaaagcaggcaaacgacaacaacaacagcaactttccctggactgcggctacaaagtatcatctaaatggtcgggactcgttggttaatccaggaccagctatggccagccacaaagacgatgaagaaaagtttttccccatgcatggaaccctgatatttggtaaacaaggaacaaatgctaacgacgcggatttggaacatgtcatgattacagatgaagaagaaatcaggaccaccaatcccgtggctacagagcagtacggaaacgtgtcaaataatttgcaaaactcaaatactggtccaactacagaaaatgtcaatcaccagggagcgttacctggtatggtgtggcaggatcgagacgtgtacctgcagggacccatttgggccaagattcctcacaccgacggacactttcacccttctccactgatgggaggttttggactcaaacacccgcctcctcaaatcatgatcaaaaacactcctgttccagccaatcctcctacaaacttcagcgcggcaaagtttgcttccttcatcacacagtattccacgggacaggtcagcgtggagatcgagagggagctgcagaaggagaacagcaaacgctggaaccccgagatccagtacacttccaactacaacaagtctgttaatgtggactttactgtggacgctaatggtgtgtattcagagcctcgccccattggcaccagatacctgactcgtaatctgtaa

SEQ ID NO: 3582 - DNA, 2208 bp, synthetic construct
  misc_feature 1..2208: note = source = /note="Description of Artificial Sequence: Synthetic polynucleotide"
  source 1..2208: mol_type = other DNA
atggctgccgatggttatcttccagattggctcgaggacactctctctgaaggaataagacagtggtggaagctcaaacctggcccaccaccaccaaggcccgcagagcggcatcaggacgacagcaggggtcttgtgcttcctgggtacaagtacctcggacccttcaacggactcgacaaaggagagccggtcaacgaggcagacgctgcggccctcgagcacgacaaggcctacgaccggcagctcgacagcggagacaacccgtacctcaagtacaaccacgccgacgcggagtttcaggagcgtcttaaagaagatacgtcttttgggggcaacctcggacgagcagtcttccaggcgaaaaagagggttcttgaacctctgggcctggttgaggaacctgttaagacggctccgggaaaaaagaggccggtagagcactctcctgcggagccagactcctcctcgggaaccggaaaagcgggccagcagcctgcaagaaagagattgaatttcggtcagactggagacgcagactccgtacctgacccccagcctctcggacagccaccagcagcccccacaagtttgggatctactacaatggctacaggcagtggcgcaccaatggcagacaataacgagggtgccgatggagtgggtaattcctcaggaaattggcattgcgattcccaatggctgggcgacagagtcatcaccaccagcacccgaacctgggccctgcccacctacaacaaccacctctacaagcaaatctccagccaatcaggagcatcgaacgacaaccactactttggctacagcaccccttgggggtattttgacttcaacagattccactgtcacttctccccacgtgactggcaaagactcatcaacaacaactggggattccgacccaagagactcaacttcaagctctttaacattcaagtcaaagaggtcacgcagaatgacggtacgacgacgattgccaataaccttaccagcacggttcaggtgtttactgactcggagtaccagctcccgtacgtcctcggctcggcgcatcaaggatgcctcccgccgtttccagcggacgtcttcatggtcccacagtatggatacctcaccctgaacaacgggagtcaggcggtaggacgctcttccttttactgcctggagtactttccttctcagatgctgcgtaccggaaacaactttaccttcagctacacctttgaggacgtgccctcccacagcagctacgctcacagccagagtttggaccggctgatgaatcctctgatcgaccagtatctgtattatctgaacaggacacaatcaaatagtggaactcttcagcagtctaggctactgtttagccaagctggacccaccagcatgtcccttcaagctaaaaactggctgcctggaccttgctacagacagcagcgtctgtcaaagcaggcaaacgacaacaacaacagcaactttccctggactgcggctacaaagtatcatctaaatggtcgggactcgttggttaatccaggaccagctatggccagccacaaagacgatgaagaaaagttcttccccatgcatggaaccctgatatttggtaaacaaggaacaaatgctaacgacgcggatttggaacatgtcatgattacagatgaagaagaaatcaggaccaccaatcccgtggctacagagcagtacggaaacgtgtcaaataatttgcaaaactcaaatactggtccaactacagaaaatgtcaatcaccagggagcgttacctggtatggtgtggcaggatcgagacgtgtacctgcagggacccatttgggccaagattcctcacaccgacggacactttcacccttctccactgatgggaggttttggactcaaacacccgcctcctcaaatcatgatcaaaaacactcctgttccagccaatcctcctacaaacttcagcgcggcaaagtttgcttccttcatcacacagtattccacgggacaggtcagcgtggagatcgagtgggagctgcagaaggagaacagcaaacgctggaaccccgagatccagtacacttccaactacaacaaatctgttaatgtggactttactgtggacgctaatggtgtgtattcagagcctcgccccattggcaccagatacctgactcgtaatctgtaa

SEQ ID NO: 3583 - DNA, 2208 bp, synthetic construct
  misc_feature 1..2208: note = source = /note="Description of Artificial Sequence: Synthetic polynucleotide"
  source 1..2208: mol_type = other DNA
atggctgccgatggttatcttccagattggctcgaggacactctctctgaaggaataagacagtggtggaagctcaaacctggcccaccaccaccaaggcccgcagagcggcatcaggacgacagcaggggtcttgtgcttcctgggtacaagtacctcggacccttcaacggactcgacaaaggagagccggtcaacgaggcagacgctgcggccctcgagcacgacaaggcctacgaccggcagctcgacagcggagacaacccgtacctcaagtacaaccacgccgacgcggagtttcaggagcgtcttaaagaagatacgtcttttgggggcaacctcggacgagcagtcttccaggcgaaaaagagggttcttgaacctctgggcctggttgaggaacctgttaagacggctccgggaaaaaagaggccggtagagcactctcctgcggagccagactcctcctcgggaaccggaaaagcgggccagcggcctgcaagaaagagattgaatttcggtcagactggagacgcagactccgtacctgacccccagcctctcggacagccaccagcagcccccacaagtttgggatctactacaatggctacaggcagtggcgcaccaatggcagacaataacgagggtgccgatggagtgggtaattcctcaggaaattggcattgcgattcccaatggctgggcgacagagtcatcaccaccagcacccgaacctgggccctgcccacctacaacaaccacctctacaagcaaatctccagccaatcaggagcatcgaacgacaaccactactttggctacagcaccccttgggggtattttgacttcaacagattccactgtcacttctccccacgtgactggcaaagactcatcaacaacaactggggattccgacccaagagactcaacttcaagctctttaacattcaagtcaaagaggtcacgcagaatgacggtacgacgacgattgccaataaccttaccagcacggttcaggtgtttactgactcggagtaccagctcccgtacgtcctcggctcggcgcatcaaggatgcctcccgccgtttccagcggacgtcttcatggtcccacagtatggatacctcaccctgaacaacgggagtcaggcggtaggacgctcttccttttactgcctggagtactttccttctcagatgctgcgtaccggaaacaactttaccttcagctacacctttgaggacgtgcccttccacagcagctacgctcacagccagagtttggaccggctgatgaatcctctgatcgaccagtatctgtattatctgaacaggacacaatcaaatagtggaactcttcagcagtctaggctactgtttagccaagctggacccaccagcatgtcccttcaagctaaaaactggctgcctggaccttgctacagacagcagcgtctgtcaaagcaggcaaacgacaacaacaacagcaactttccctggactgcggctacaaagtatcatctaaatggtcgggactcgttggttaatccaggaccagctatggccagccacaaagacgatgaagaaaagtttttccccatgcatggaaccctgatatttggtaaacaaggaacaaatgctaacgacgcggatttggaacatgtcatgattacagatgaagaagaaatcaggaccaccaatcccgtggctacagagcagtacggaaacgtgtcaaataatttgcaaaactcaaatactggtccaactacagaaaatgtcaatcaccagggagcgttacctggtatggtgtggcaggatcgagacgtgtacctgcagggacccatttgggccaagattcctcacaccgacggacactttcacccttctccactgatgggaggttttggactcaaacacccgcctcctcaaatcatgatcaaaaacactcctgttccagccaatcctcctacaaacttcagcgcggcaaagtttgcttccttcatcacacagtattccacgggacaggtcagcgtggagatcgagtgggagctgcagaaggagaacagcaaacgctggaaccccgagatccagtacacttccaactacaacaaatctgttaatgtggactttactgtggacgctaatggtgtgtattcagagcctcgccccattggcaccagatacctgactcgtaatctgtaa

SEQ ID NO: 3584 - DNA, 2208 bp, synthetic construct
  misc_feature 1..2208: note = source = /note="Description of Artificial Sequence: Synthetic polynucleotide"
  source 1..2208: mol_type = other DNA
atggctgccgatggttatcttccagattggctcgaggacactctctctgaaggaataagacagtggtggaagctcaaacctggcccaccaccgccaaagcccgcagagcggcataaggacgacagcaggggtcttgtgcttcctgggtacaagtacctcggacccttcaacggactcgacaaaggagagccggtcaacgaggcagacgccgcggccctcgagcacgacaaggcctacgaccggcagctcgacagcggagacaacccgtacctcaagtacaaccacgccgacgcggagtttcaggagcgccttaaagaagatacgtcttttgggggcaacctcgcaagagcagtattccaggcgaaaaagagggttcttgaacctctgggcctggttgaggagcctgttaagacggctccgggaaaaaagaggccggtagagcactctcctgcggagccagattcctcctccggaactggaaagtcgggccaacagcctgcaagaaagagattgaattttggtcagactggagacgcagactccgtacctgacccccagcctctcggacagccaccagcagccccctctggtctgggaactaatacgatggcttcaggcagtggcgcaccaatggcagacaataacgagggcgccgacggagtgggtaattcctcgggaaattggcattgcgattccacatggatgggcgacagagtcatcaccaccagcacccgcacctgggctctgcccacctacaacaaccatctgtacaagcaaatttccagccagtctggagcagcgaacgacaaccactactttggctacagcaccccttgggggtattttgacttcaacagattccactgccacttctccccacgtgactggcaaagactcatcaacaacaattggggattccggcccaaaagactcaacttcaagctctttaacattcaagtcaaggaggtcacgcagaatgacggtacgacgacgattgccaataaccttaccagcacggttcaggtgtttactgactcggagtaccagctcccgtacgtcctcggctcggcgcatcaaggatgcctcccgccgttcccagcagacgtcttcatggtgccacagtatggatacctcaccctgaacaacgggagtcaggcggtaggacgctcttcattttactgcctggagtactttccttctcagatgctgcgtaccggaaacaactttaccttcagctacacctttgaggacgtgcccttccacagcagctacgctcacagccagagtttggaccggctgatgaatcctctgatcgaccagtatctgtattatctgaacaggacacaatcaaatagtggaactcttcagcagtctaggctactgtttagccaagctggacccaccagcatgtcccttcaagctaaaaactggctgcctggaccttgctacagacagcagcgtctgtcaaagcaggcaaacgacaacaacaacagcaactttccctggactgcggctacaaagtatcatctaaatggtcgggactcgttggttaatccaggaccagctatggccagccacaaagacgatgaagaaaagtttttccccatgcatggaaccctgatatttggtaaacaaggaacaaatgctaacgacgcggatttggaacatgtcatgattacagatgaagaagaaatcaggaccaccaatcccgtggctacagagcagtacggaaacgtgtcaaataatttgcaaaactcaaatactggtccaactacagaaaatgtcaatcaccagggagcgttacctggtatggtgtggcaggatcgagacgtgtacctgcagggacccatttgggccaagattcctcacaccgacggacactttcacccttctccactgatgggaggttttggactcaaacacccgcctcctcaaatcatgatcaaaaacactcctgttccagccaatcctcctacaaacttcagcgcggcaaagtttgcttccttcatcacacagtattccacgggacaggtcagcgtggagatcgagtgggagctgcagaaggagaacagcaaacgctggaaccccgagatccagtacacttccaactacaacaaatctgttaatgtggactttactgtggacgctaatggtgtgtattcagagcctcgccccattggcaccagatacctgactcgtaatctgtaa

SEQ ID NO: 3585 - DNA, 2208 bp, synthetic construct
  misc_feature 1..2208: note = source = /note="Description of Artificial Sequence: Synthetic polynucleotide"
  source 1..2208: mol_type = other DNA
atggctgccgatggttatcttccagattggctcgaggacactctctctgaaggaataagacagtggtggaagctcaaacctggcccaccaccaccaaggcccgcagagcggcatcaggacgacagcaggggtcttgtgcttcctgggtacaagtacctcggacccttcaacggactcgacaaaggagagccggtcaacgaggcagacgctgcggccctcgagcacgacaaggcctacgaccggcagctcgacagcggagacaacccgtacctcaagtacaaccacgccgacgcggagtttcaggagcgtcttaaagaagatacgtcttttgggggcaacctcggacgagcagtcttccaggcgaaaaagagggttcttgaacctctgggcctggttgaggaacctgttaagacggctccgggaaaaaagaggccggtagagcactctcctgcggagccagactcctcctcgggaaccggaaaagcgggccagcagcctgcaagaaagagattgaatttcggtcagactggagacgcagactccgtacctgacccccggcctctcggacagccaccagcagcccccacaagtttgggatctactacaatggctacaggcagtggcgcaccaatggcagacaataacgagggtgccgatggagtgggtaattcctcaggaaattggcattgcgattcccaatggctgggcgacagagtcatcaccaccagcacccgaacctgggccctgcccacctacaacaaccacctctacaagcaaatctccagccaatcaggagcatcgaacgacaaccactactttggctacagcaccccttgggggtattttgacttcaacagattccactgtcacttctccccacgtgactggcaaagactcatcaacaacaactggggattccgacccaagagactcaacttcaagctctttaacattcaagtcaaagaggtcacgcagaatgacggtacgacgacgattgccaataaccttaccagcacggttcaggtgtttactgactcggagtaccagctcccgtacgtcctcggctcggcgcatcaaggatgcctcccgccgtttccagcggacgtcttcatggtcccacagtatggatacctcaccctgaacaacgggagtcaggcggtaggacgctcttccttttactgcctggagtactttccttctcagatgctgcgtaccggaaacaactttaccttcagctacacctttgaggacgtgcccttccacagcagctacgctcacagccagagtttggaccggctgatgaatcctctgatcgaccagtatctgtattatctgaacaggacacaatcaaatagtggaactcttcagcagtctaggctactgtttagccaagctggacccaccagcatgtcccttcaagctaaaaactggctgcctggaccttgctacagacagcagcgtctgtcaaagcaggcaaacgacaacaacaacagcaactttccctggactgcggctacaaagtatcatctaaatggtcgggactcgttggttaatccaggaccagctatggccagccacaaagacgatgaagaaaagtttttccccatgcatggaaccctgatatttggtaaacaaggaacaaatgctaacgacgcggatttggaacatgtcatgattacagatgaagaagaaatcaggaccaccaatcccgtggctacagagcagtacggaaacgtgtcaaataatttgcaaaactcaaatactggtccaactacagaaaatgtcaatcaccagggagcgttacctggtatggtgtggcaggatcgagacgtgtacctgcagggacccatttgggccaagattcctcacaccgacggacactttcacccttctccactgatgggaggttttggactcaaacacccgcctcctcaaatcatgatcaaaaacactcctgttccagccaatcctcctacaaacttcagcgcggcaaagtttgcttccttcatcacacagtattccacgggacaggtcagcgtggagatcgagtgggagctgcagaaggagaacagcaaacgctggaaccccgagatccagtacacttccaactacaacaaatctgttaatgtggactttactgtggacgctaatggtgtgtattcagagcctcgccccattggcaccagatacctgactcgtaatctgtaa

SEQ ID NO: 3586 - DNA, 2208 bp, synthetic construct
  misc_feature 1..2208: note = source = /note="Description of Artificial Sequence: Synthetic polynucleotide"
  source 1..2208: mol_type = other DNA
atggctgccgatggttatcttccagattggctcgaggacactctctctgaaggaataagacagtggtggaagctcaaacctggcccaccaccgccaaagcccgcagagcggcataaggacgacagcaggggtcttgtgcttcctgggtacaagtacctcggacccttcaacggactcgacaaaggagagccggtcaacgaggcagacgccgcggccctcgagcacgacaaggcctacgaccggcagctcgacagcggagacaacccgtacctcaagtacaaccacgccgacgcggagtttcaggagcgccttaaagaagatacgtcttttgggggcaacctcgcaagagcagtattccaggcgaaaaagagggttcttgaacctctgggcctggttgaggagcctgttaagacggctccgggaaaaaagaggccggtagagcactctcctgcggagccagattcctcctccggaactggaaagtcgggccaacagcctgcaagaaagagattgaatttcggtcagactggagacgcagactccgtacctgacccccagcctctcggacagccaccagcagcccccacaagtttgggatctactacaatggctacaggcagtggcgcaccaatggcagacaataacgagggtgccgatggagtgggtaattcctcaggaaattggcattgcgattcccaatggctgggcgacagagtcatcaccaccagcacccgaacctgggccctgcccacctacaacaaccacctctacaagcaaatctccagccaatcaggagcatcgaacgacaaccactactttggctacagcaccccttgggggtattttgacttcaacagattccactgtcacttctccccacgtgactggcaaagactcatcaacaacaactggggattccgacccaagagactcaacttcaagctctttaacattcaagtcaaagaggtcacgcagaatgacggtacgacgacgattgccaataaccttaccagcacggttcaggtgtttactgactcggagtaccagctcccgtacgtcctcggctcggcgcatcaaggatgcctcccgccgtttccagcggacgtcttcatggtcccacagtatggatacctcaccctgaacaacgggagtcaggcggtaggacgctcttccttttactgcctggagtactttccttctcagatgctgcgtaccggaaacaactttaccttcagctacacctttgaggacgtgcccttccacagcagctacgctcacagccagagtttggaccggctgatgaatcctctgatcgaccagtatctgtattatctgaacaggacacaatcaaatagtggaactcttcagcagtctaggctactgtttagccaagctggacccaccagcatgtcccttcaagctaaaaactggctgcctggaccttgctacagacagcagcgtctgtcaaagcaggcaaacgacaacaacaacagcaactttccctggactgcggctacaaagtatcatctaaatggtcgggactcgttggttaatccaggaccagctatggccagccacaaagacgatgaagaaaagtttttccccatgcatggaaccctgatatttggtaaacaaggaacaaatgctaacgacgcggatttggaacatgtcatgattacagatgaagaagaaatcaggaccaccaatcccgtggctacagagcagtacggaaacgtgtcaaataatttgcaaaactcaaatactggtccaactacagaaaatgtcaatcaccagggagcgttacctggtatggtgtggcaggatcgagacgtgtacctgcagggacccatttgggccaagattcctcacaccgacggacactttcacccttctccactgatgggaggttttggactcaaacacccgcctcctcaaatcatgatcaaaaacactcctgttccagccaatcctcctacaaacttcagcgcggcaaagtttgcttccttcatcacacagtattccacgggacaggtcagcgtggagatcgagtgggagctgcagaaggagaacagcaaacgctggaaccccgagatccagtacacttccaactacaacaaatctgttaatgtggactttactgtggacgctaatggtgtgtattcagagcctcgccccattggcaccagatacctgactcgtaatctgtaa

SEQ ID NO: 3587 - DNA, 2208 bp, synthetic construct
  misc_feature 1..2208: note = source = /note="Description of Artificial Sequence: Synthetic polynucleotide"
  source 1..2208: mol_type = other DNA
atggctgccgatggttatcttccagattggctcgaggacactctctctgaaggaataagacagtggtggaagctcaaacctggcccaccaccaccaaggcccgcagagcggcatcaggacgacagcaggggtcttgtgcttcctgggtacaagtacctcggacccttcaacggactcgacaaaggagagccggtcaacgaggcagacgctgcggccctcgagcacgacaaggcctacgaccggcagctcgacagcggagacaacccgtacctcaagtacaaccacgccgacgcggagtttcaggagcgtcttaaagaagatacgtcttttgggggcaacctcggacgagcagtcttccaggcgaaaaagagggttcttgaacctctgggcctggttgaggaacctgttaagacggctccgggaaaaaagaggccggtagagcactctcctgcggagccagactcctcctcgggaaccggaaaagcgggccagcagcctgcaagaaagagattgaatttcggtcagactggagacgcagactccgtacctgacccccagcctctcggacagccaccagcagcccccacaagtttgggatctactacaatggctacaggcagtggcgcaccaatggcagacaataacgagggtgccgatggagtgggtaattcctcaggaaattggcattgcgattcccaatggctgggcgacagagtcatcaccaccagcacccgaacctgggccctgcccacctacaacaaccacctctacaagcaaatctccagccaatcaggagcatcgaacgacaaccactactttggctacagcaccccttgggggtattttgacttcaacagattccactgtcacttctccccacgtgactggcaaagactcatcaacaacaactggggattccgacccaagagactcaacttcaagctctttaacattcaagtcaaagaggtcacgcagaatgacggtacgacgacgattgccaataaccttaccagcacggttcgggtgtttactgactcggagtaccagctcccgtacgtcctcggctcggcgcatcaaggatgcctcccgccgtttccagcggacgtcttcatggtcccacagtatggatacctcaccctgaacaacgggagtcaggcggtaggacgctcttccttttactgcctggagtactttccttctcagatgctgcgtaccggaaacaactttaccttcagctacacctttgaggacgtgcccttccacagcagctacgctcacagccagagtttggaccggctgatgaatcctctgatcgaccagtatctgtattatctgaacaggacacaatcaaatagtggaactcttcagcagtctaggctactgtttagccaagctggacccaccagcatgtcccttcaagctaaaaactggctgcctggaccttgctacagacagcagcgtctgtcaaagcaggcaaacgacaacaacaacagcaactttccctggactgcggctacaaagtatcatctaaatggtcgggactcgttggttaatccaggaccagctatggccagccacaaagacgatgaagaaaagtttttccccatgcatggaaccctgatatttggtaaacaaggaacaaatgctaacgacgcggatttggaacatgtcatgattacagatgaagaagaaatcaggaccaccaatcccgtggctacagagcagtacggaaacgtgtcaaataatttgcaaaactcaaatactggtccaactacagaaaatgtcaatcaccagggagcgttacctggtatggtgtggcaggatcgagacgtgtacctgcagggacccatttgggccaagattcctcacaccgacggacactttcacccttctccactgatgggaggttttggactcaaacacccgcctcctcaaatcatgatcaaaaacactcctgttccagccaatcctcctacaaacttcagcgcggcaaagtttgcttccttcatcacacagtattccacgggacaggtcagcgtggagatcgagagggagctgcagaaggagaacagcaaacgctggaaccccgagatccagtacacttccaactacaacaagtctgttaatgtggactttactgtgggcgctaatggtgtgtattcagagcctcgccccattggcaccagatacctgactcgtaatctgtaa

SEQ ID NO: 3588 - DNA, 2208 bp, synthetic construct
  misc_feature 1..2208: note = source = /note="Description of Artificial Sequence: Synthetic polynucleotide"
  source 1..2208: mol_type = other DNA
atggctgccgatggttatcttccagattggctcgaggacactctctctgaaggaataagacagtggtggaagctcaaacctggcccaccaccgccaaagcccgcagagcggcataaggacgacagcaggggtcttgtgcttcctgggtacaagtacctcggacccttcaacggactcgacaaaggagagccggtcaacgaggcagacgccgcggccctcgagcacgacaaggcctacgaccggcagctcgacagcggagacaacccgtacctcaagtacaaccacgccgacgcggagtttcaggagcgccttaaagaagatacgtcttttgggggcaacctcgcaagagcagtattccaggcgaaaaagagggttcttgaacctctgggcctggttgaggagcctgttaagacggctccgggaaaaaagaggccggtagagcactctcctgcggagccagattcctcctccggaactggaaagtcgggccaacagcctgcaagaaagagattgaattttggtcagactggagacgcagactccgtacctgacccccagcctctcggacagccaccagcagccccctctggtctgggaactaatacgatggcttcaggcagtggcgcaccaatggcagacaataacgagggcgccgacggagtgggtaattcctcaggaaattggcattgcgattcccaatggctgggcgacagagtcatcaccaccagcacccgaacctgggccctgcccacctacaacaaccacctctacaagcaaatctccagccaatcaggagcatcgaacgacaaccactactttggctacagcaccccttgggggtattttgacttcaacagattccactgtcacttctccccacgtgactggcaaagactcatcaacaacaactggggattccgacccaagagactcaacttcaagctctttaacattcaagtcaaagaggtcacgcagaatgacggtacgacgacgattgccaataaccttaccagcacggttcaggtgtttactgactcggagtaccagctcccgtacgtcctcggctcggcgcatcaaggatgcctcccgccgtttccagcggacgtcttcatggtcccacagtatggatacctcaccctgaacaacgggagtcaggcggtaggacgctcttccttttactgcctggagtactttccttctcagatgctgcgtaccggaaacaactttaccttcagctacacctttgaggacgtgcccttccacagcagctacgctcacagccagagtttggaccggctgatgaatcctctgatcgaccagtatctgtattatctgaacaggacacaatcaaatagtggaactcttcagcagtctaggctactgtttagccaagctggacccaccagcatgtcccttcaagctaaaaactggctgcctggaccttgctacagacagcagcgtctgtcaaagcaggcaaacgacaacaacaacagcaactttccctggactgcggctacaaagtatcatctaaatggtcgggactcgttggttaatccaggaccagctatggccagccacaaagacgatgaagaaaagtttttccccatgcatggaaccctgatatttggtaaacaaggaacaaatgctaacgacgcggatttggaacatgtcatgattacagatgaagaagaaatcaggaccaccaatcccgtggctacagagcagtacggaaacgtgtcaaataatttgcaaaactcaaatactggtccaactacagaaaatgtcaatcaccagggagcgttacctggtatggtgtggcaggatcgagacgtgtacctgcagggacccatttgggccaagattcctcacaccgacggacactttcacccttctccactgatgggaggttttggactcaaacacccgcctcctcaaatcatgatcaaaaacactcctgttccagccaatcctcctacaaacttcagcgcggcaaagtttgcttccttcatcacacagtattccacgggacaggtcagcgtggagatcgagtgggagctgcagaaggagaacagcaaacgctggaaccccgagatccagtacacttccaactacaacaaatctgttaatgtggactttactgtggacgctaatggtgtgtattcagagcctcgccccattggcaccagatacctgactcgtaatctgtaa

SEQ ID NO: 3589 - DNA, 2208 bp, synthetic construct
  misc_feature 1..2208: note = source = /note="Description of Artificial Sequence: Synthetic polynucleotide"
  source 1..2208: mol_type = other DNA
atggctgccgatggttatcttccagattggctcgaggacactctctctgaaggaataagacagtggtggaagctcaaacctggcccaccaccaccaaggcccgcagagcggcatcaggacgacagcaggggtcttgtgcttcctgggtacaagtacctcggacccttcaacggactcgacaaaggagagccggtcaacgaggcagacgctgcggccctcgagcacgacaaggcctacgaccggcagctcgacagcggagacaacccgtacctcaagtacaaccacgccgacgcggagtttcaggagcgtcttaaagaagatacgtcttttgggggcaacctcggacgagcagtcttccaggcgaaaaagagggttcttgaacctctgggcctggttgaggaacctgttaagacggctccgggaaaaaagaggccggtagagcactctcctgcggagccagactcctcctcgggaaccggaaaagcgggccagcagcctgcaagaaagagattgaatttcggtcagactggagacgcagactccgtacctgacccccagcctctcggacagccaccagcagcccccacaagtttgggatctactacaatggctacaggcagtggcgcaccaatggcagacaataacgagggtgccgatggagtgggtaattcctcaggaaattggcattgcgattcccaatggctgggcgacagagtcatcaccaccagcacccgaacctgggccctgcccacctacaacaaccacctctacaagcaaatctccagccaatcaggagcatcgaacgacaaccactactttggctacagcaccccttgggggtattttgacttcaacagattccactgtcacttctccccacgtgactggcaaagactcatcaacaacaactggggattccgacccaagagactcaacttcaagctctttaacattcaagtcaaagaggtcacgcagaatgacggtacgacgacgattgccaataaccttaccagcacggttcaggtgtttactgactcggagtaccagctcccgtacgtcctcggctcggcgcatcaaggatgcctcccgccgtttccagcggacgtcttcatggtcccacagtatggatacctcaccctgaacaacgggagtcaggcggtaggacgctcttccttttactgcctggagtactttccttctcagatgctgcgtaccggaaacaactttaccttcagctacacctttgaggacgtgcccttccacagcagctacgctcacagccagagtttggaccggctgatgaatcctctgatcgaccagtatctgtattatctgaacaggacacaatcaaatagtggaactcttcagcagtctaggctactgtttagccaagctggacccaccagcatgtcccttcaagctaaaaactggctgcctggaccttgctacagacagcagcgtctgtcaaagcaggcaaacgacaacaacaacagcaactttccctggactgcggctacaaagtatcatctaaatggtcgggactcgttggttaatccaggaccagctatggccagccacaaagacgatgaagaaaagtttttccccatgcatggaaccctgatatttggtaaacaaggaacaaatgctaacgacgcggatttggaacatgtcatgattacagatgaagaagaaatcaggaccaccaatcccgtggctacagagcagtacggaaacgtgtcaaataatttgcaaaactcaaatactggtccaactacagaaaatgtcaatcaccagggagcgttacctggtatggtgtggcaggatcgagacgtgtacctgcagggacccatttgggccaagattcctcacaccgacggacactttcacccttctcctcttatgggaggatttggactgaagcaccctcccccgcagattctcatcaagaataccccggtacctgcgaatccttctaccaccttcagcgcggcaaagtttgcttccttcatcacacagtactccacggggcaggtcagcgtggagatcgagtgggagctgcagaaagagaacagcaaacgctggaaccccgagatccagtatacctccaactacaacaagtctgttaatgtggactttactgtggacactaatggcgtgtattcagagcctcgccccattggcacaagatacctgactcgtaatctgtaa

SEQ ID NO: 3590 - DNA, 2208 bp, synthetic construct
  misc_feature 1..2208: note = source = /note="Description of Artificial Sequence: Synthetic polynucleotide"
  source 1..2208: mol_type = other DNA
atggctgccgatggttatcttccagattggctcgaggacactctctctgaaggaataagacagtggtggaagctcaaacctggcccaccaccaccaaggcccgcagagcggcatcaggacgacagcaggggtcttgtgcttcctgggtacaagtacctcggacccttcaacggactcgacaaaggagagccggtcaacgaggcagacgctgcggccctcgagcacgacaaggcctacgaccggcagctcgacagcggagacaacccgtacctcaagtacaaccacgccgacgcggagtttcaggagcgtcttaaagaagatacgtcttttgggggcaacctcggacgagcagtcttccaggcgaaaaagagggttcttgaacctctgggcctggttgaggaacctgttaagacggctccgggaaaaaagaggccggtagagcactctcctgcggagccagactcctcctcgggaaccggaaaagcgggccagcagcctgcaagaaagagattgaatttcggtcagactggagacgcagactccgtacctgacccccagcctctcggacagccaccagcagcccccacaagtttgggatctactacaatggctacaggcagtggcgcaccaatggcagacaataacgagggtgccgatggagtgggtaattcctcaggaaattggcattgcgattcccaatggctgggcgacagagtcatcaccaccagcacccgaacctgggccctgcccacctacaacaaccacctctacaagcaaatctccagccaatcaggagcatcgaacgacaaccactactttggctacagcaccccttgggggtattttgacttcaacagattccactgtcacttctccccacgtgactggcaaagactcatcaacaacaactggggattccgacccaagagactcaacttcaagctctttaacattcaagtcaaagaggtcacgcagaatgacggtacgacgacgattgccaataaccttaccagcacggttcaggtgtttactgactcggagtaccagctcccgtacgtcctcggctcggcgcatcaaggatgcctcccgccgtttccagcggacgtcttcatggtcccacagtatggatacctcaccctgaacaacgggagtcaggcggtaggacgctcttccttttactgcctggagtactttccttctcagatgctgcgtaccgggaacaactttaccttcagctacacctttgaggacgtgcccttccacagcagctacgctcacagccagagtttggaccggctgatgaatcctctgatcgaccagtatctgtattatctgaacaggacacaatcaaatagtggaactcttcagcagtctaggctactgtttagccaagctggacccaccagcatgtcccttcaagctaaaaactggctgcctggaccttgctacagacagcagcgtctgtcaaagcaggcaaacgacaacaacaacagcaactttccctggactgcggctacaaagtatcatctaaatggtcgggactcgtcggttaatccaggaccagctatggccagccacaaagacgatgaagaaaagtttttctccatgcatggaaccctgatatttggtaaacaaggaacaaatgctaacgacgcggatttggaacatgtcatgattacagatgaagaagaaatcaggaccaccaatcccgtggctacagagcagtacggaaacgtgtcaaataatttgcaaaactcaaatactggtccaactacagaaaatgtcaatcaccagggagcgttacctggtatggtgtggcaggatcgagacgtgtacctgcagggacccatttgggccaagattcctcacaccgacggacactttcacccttctccactgatgggaggttttggactcaaacacccgcctccccaaatcatgatcaaaaacactcctgttccagccaatcctcctacaaacttcagcgcggcaaagtttgcttccttcatcacacagtattccacgggacaggtcagcgtggagatcgagtgggagctgcagaaggagaacagcaaacgctggaaccccgagatccagtacacttccaactacaacaaatctgttaatgtggactttactgtggacgctaatggtgtgtattcagagcctcgccccattggcaccagatacctgactcgtaatctgtaa

SEQ ID NO: 3591 - DNA, 2208 bp, synthetic construct
  misc_feature 1..2208: note = source = /note="Description of Artificial Sequence: Synthetic polynucleotide"
  source 1..2208: mol_type = other DNA
atggctgccgatggttatcttccagattggctcgaggacactctctctgaaggaataagacagtggtggaagctcaaacctggcccaccaccaccaaggcccgcagagcggcatcaggacgacagcaggggtcttgtgcttcctgggtacaagtacctcggacccttcaacggactcgacaaaggagagccggtcaacgaggcagacgctgcggccctcgagcacgacaaggcctacgaccggcagctcgacagcggagacaacccgtacctcaagtacaaccacgccgacgcggagtttcaggagcgtcttaaagaagatacgtcttttgggggcaacctcggacgagcagtcttccaggcgaaaaagagggttcttgaacctctgggcctggttgaggaacctgttaagacggctccgggaaaaaagaggccggtagagcactctcctgcggagccagactcctcctcgggaaccggaaaagcgggccagcagcctgcaagaaagagattgaatttcggtcagactggagacgcagactccgtacctgacccccagcctctcggacagccaccagcagcccccacaagtttgggatctactacaatggctacaggcagtggcgcaccaatggcagacaataacgagggtgccgatggagtgggtaattcctcaggaaattggcattgcgattcccaatggctgggcgacagagtcatcaccaccagcacccgaacctgggccctgcccacctacaacaaccacctctacaagcaaatctccagccaatcaggagcatcgaacgacaaccactactttggctacagcaccccttgggggtattttgacttcaacagattccactgtcacttctccccacgtgactggcaaagactcatcaacaacaactggggattccgacccaagagactcaacttcaagctctttaacattcaagtcaaagaggtcacgcagaatgacggtacgacgacgattgccaataaccttaccagcacggttcaggtgtttactgactcggagtaccagctcccgtacgtcctcggctcggcgcatcaaggatgcctcccgccgtttccagcgggcgtcttcatggtcccacagtatggatacctcaccctgaacaacgggagtcaggcggtaggacgctcttccttttactgcctggagtactttccttctcagatgctgcgtaccggaaacaactttaccttcagctacacctttgaggacgtgcccttccacagcagctacgctcacagccagagtttggaccggctgatgaatcctctgatcgaccagtatctgtattatctgaacaggacacaatcaaatagtggaactcttcagcagtctaggctactgtttagccaagctggacccaccagcatgtcccttcaagctaaaaactggctgcctggaccttgctgcagacagcagcgtctgtcaaagcaggcaaacgacaacaacaacagcaactttccctggactgcggctacaaagtatcatctaaatggtcgggactcgttggttaatccaggaccagctatggccagccacaaagacgatgaagaaaagtttttccccatgcatggaaccctgatatttggtaaacaaggaacaaatgctaacgacgcggatttggaacatgtcatgattacagatgaagaagaaatcaggaccaccaatcccgtggctacagagcagtacggaaacgtgtcaaataatttgcaaaactcaaatactggtccaactacagaaaatgtcaatcaccagggagcgttacctggtatggtgtggcaggatcgagacgtgtacctgcagggacccatttgggccaagattcctcacaccgacggacactttcacccttctccactgatgggaggttttggactcaaacacccgcctcctcaaatcatgatcaaaaacactcctgttccagccaatcctcctacaaacttcagcgcggcaaagtttgcttccttcatcacacagtattccacgggacaggtcagcgtggagatcgagtgggagctgcagaaggagaacagcaaacgctggaaccccgagatccagtacacttccaactacaacaaatctgttaatgtggactttactgtggacgctaatggtgtgtattcagagcctcgccccattggcaccagatacctgactcgtaatctgtaa

SEQ ID NO: 3592 - DNA, 2208 bp, synthetic construct
  misc_feature 1..2208: note = source = /note="Description of Artificial Sequence: Synthetic polynucleotide"
  source 1..2208: mol_type = other DNA
atggctgccgatggttatcttccagattggctcgaggacactctctctgaaggaataagacagtggtggaagctcaaacctggcccaccaccaccaaggcccgcagagcggcatcaggacgacagcaggggtcttgtgcttcctgggtacaagtacctcggacccttcaacggactcgacaaaggagagccggtcaacgaggcagacgctgcggccctcgagcacgacaaggcctacgaccggcagctcgacagcggagacaacccgtacctcaagtacaaccacgccgacgcggagtttcaggagcgtcttaaagaagatacgtcttttgggggcaacctcggacgagcagtcttccaggcgaaaaagagggttcttgaacctctgggcctggttgaggaacctgttaagacggctccgggaaaaaagaggccggtagagcactctcctgcggagccagactcctcctcgggaaccggaaaagcgggccagcagcctgcaagaaagagattgaatttcggccagactggagacgcagactccgtacctgacccccagcctcccggacagccaccagcagcccccacaagtttgggatctactacaatggctacaggcagtggcgcaccaatggcagacaataacgagggtgccgatggagtgggtaattcctcaggaaattggcattgcgattcccaatggctgggcgacagagtcatcaccaccagcacccgaacctgggccctgcccacctacaacaaccacctctacaagcaaatctccagccaatcaggagcatcgaacgacaaccactactttggctacagcaccccttgggggtattttgacttcaacagattccactgtcacttctccccacgtgactggcaaagactcatcaacaacaactggggattccgacccaagagactcaacttcaagctctttaacattcaagtcaaagaggtcacgcagaatgacggtacgacgacgattgccaataaccttaccagcacggttcaggtgtttactgactcggagtaccagctcccgtacgtcctcggctcggcgcatcaaggatgcctcccgccgtttccagcggacgtcttcatggtcccacagtatggatacctcaccctgaacaacgggagtcaggcggtaggacgctcttccttttactgcctggagtactttccttctcagatgctgcgtaccggaaacaactttaccttcagctacacctttgaggacgtgcccttccacagcagctacgctcacagccagagtttggaccggctgatgaatcctctgatcgaccagtatctgtattatctgaacaggacacaatcaaatagtggaactcttcagcagtctaggctactgtttagccaagctggacccaccagcatgtcccttcaagctaaaaactggctgcctggaccttgctacagacagcagcgtctgtcaaagcaggcaaacgacaacaacaacagcaactttccctggactgcggctacaaagtatcatctaaatggtcgggactcgttggttaatccaggaccagctatggccagccacaaagacgatgaagaaaagtttttccccatgcatggaaccctgatatttggtaaacaaggaacaaatgctaacgacgcggatttggaacatgtcatgattacagatgaagaagaaatcaggaccaccaatcccgtggctacagagcagtacggaaacgtgtcaaataatttgcaaaactcaaatactggtccaactacagaaaatgtcaatcaccagggagcgttacctggtatggtgtggcaggatcgagacgtgtacctgcagggacccatttgggccaagattcctcacaccgacggacactttcacccttctccactgatgggaggttttggactcaaacacccgcctcctcaaatcatgatcaaaaacactcctgttccagccaatcctcctacaaacttcagcgcggcaaagtttgcttccttcatcacacagtattccacgggacaggtcagcgtggagatcgagtgggagctgcagaaggagaacagcaaacgctggaaccccgagatccagtacacttccaactacaacaaatctgttaatgtggactttactgtggacgctaatggtgtgtattcagagcctcgccccattggcaccagatacctgactcgtaatctgtaa

SEQ ID NO: 3593 - DNA, 2208 bp, synthetic construct
  misc_feature 1..2208: note = source = /note="Description of Artificial Sequence: Synthetic polynucleotide"
  source 1..2208: mol_type = other DNA
atggctgccgatggttatcttccagattggctcgaggacactctctctgaaggaataagacagtggtggaagctcaaacctggcccaccaccaccaaggcccgcagagcggcatcaggacgacagcaggggtcttgtgcttcctgggtacaagtacctcggacccttcaacggactcgacaaaggagagccggtcaacgaggcagacgctgcggccctcgagcacgacaaggcctacgaccggcagctcgacagcggagacaacccgtacctcaagtacaaccacgccgacgcggagtttcaggagcgtcttaaagaagatacgtcttttgggggcaacctcggacgagcagtcttccaggcgaaaaagagggttcttgaacctctgggcctggttgaggaacctgttaagacggctccgggaaaaaagaggccggtagagcactctcctgcggagccagactcctcctcgggaaccggaaaagcgggccagcagcctgcaagaaagagattgaatttcggtcagactggagacgcagactccgtacctgacccccagcctctcggacagccaccagcagcccccacaagtttgggatctactacaatggctacaggcagtggcgcaccaatggcagacaataacgagggtgccgatggagtgggtaattcctcaggaaattggcattgcgattcccaatggctgggcgacagagtcatcaccaccagcacccgaacctgggccctgcccacctacaacaaccaccactacaagcaaatctccagccaatcaggagcatcgaacgacaaccactactttggctacagcaccccttgggggtattttgacttcaacagattccactgtcacttctccccacgtgactggcaaagactcatcaacaacaactggggattccgacccaagagactcaacttcaagctctttaacattcaagtcaaagaggtcacgcagaatgacggtacgacgacgattgccaataaccttaccagcacggttcaggtgtttactgactcggagtaccagctcccgtacgtcctcggctcggcgcatcaaggatgcctcccgccgtttccagcggacgtcttcatggtcccacagtatggatacctcaccctgaacaacgggagtcaggcggtaggacgctcttccttttactgcctggagtactttccttctcagatgctgcgtaccggaaacaactttaccttcagctacacctttgaggacgtgcccttccacagcagctacgctcacagccagagtttggaccggctgatgaatcctctgatcgaccagtatctgtattatctgaacaggacacaatcaaatagtggaactcttcagcagtctaggctactgtttagccaagctggacccaccagcatgtcccttcaagctaaaaactggctgcctggaccttgctacagacagcagcgtctgtcaaagcaggcaaacgacaacaacaacagcaactttccctggactgcggctacaaagtatcatctaaatggtcgggactcgttggttaatccaggaccagctatggccagccacaaagacgatgaagaaaagtttttccccatgcatggaaccctgatatttggtaaacaaggaacaaatgctaacgacgcggatttggaacatgtcatgattacagatgaagaagaaatcaggaccaccaatcccgtggctacagagcagtacggaaacgtgtcaaataatttgcaaaactcaaatactggtccaactacagaagatgtcaatcaccagggagcgttacctggtatggtgtggcaggatcgagacgtgtacctgcagggacccatttgggccaagattcctcacaccgacggacactttcacccttctccactgatgggaggttttggactcaaacacccgcctcctcaaatcatgatcaaaaacactcctgttccagccaatcctcctacaaacttcagcgcggcaaagtttgcttccttcatcacacagtattccacgggacaggtcagcgtggagatcgagtgggagctgcagaaggagaacagcaaacgctggaaccccgagatccagtacacttccaactacaacaaatctgttaatgtggactttactgtggacgctaatggtgtgtattcagagcctcgccccattggcaccagatacctgactcgtaatctgtaa

SEQ ID NO: 3594 - DNA, 2208 bp, synthetic construct
  misc_feature 1..2208: note = source = /note="Description of Artificial Sequence: Synthetic polynucleotide"
  source 1..2208: mol_type = other DNA
atggctgccgatggttatcttccagattggctcgaggacactctctctgaaggaataagacagtggtggaagctcaaacctggcccaccaccaccaaggcccgcagagcggcatcaggacgacagcaggggtcttgtgcttcctgggtacaagtacctcggacccttcaacggactcgacaaaggagagccggtcaacgaggcagacgctgcggccctcgagcacgacaaggcctacgaccggcagctcgacagcggagacaacccgtacctcaagtacaaccacgccgacgcggagtttcaggagcgtcttaaagaagatacgtcttttgggggcaacctcggacgagcagtcttccaggcgaaaaagagggttcttgaacctctgggcctggttgaggaacctgttaagacggctccgggaaaaaagaggccggtagagcactctcctgcggagccagactcctcctcgggaaccggaaaagcgggccagcagcctgcaagaaagagattgaatttcggtcagactggagacgcagactccgtacctgacccccggcctctcggacagccaccagcagcccccacaagtttgggatctactacaatggctacaggcagtggcgcaccaatggcagacaataacgagggtgccgatggagtgggtaattcctcaggaaattggcattgcgattcccaatggctgggcgacagagtcatcaccaccagcacccgaacctgggccctgcccacctacaacaaccacctctacaagcaaatctccagccaatcaggagcatcgaacgacaaccactactttggctacagcaccccttgggggtattttgacttcaacagattccactgtcacttctccccacgtgactggcaaagactcatcaacaacaactggggattccgacccaagagactcaacttcaagctctttaacattcaagtcaaagaggtcacgcagaatgacggtacgacgacgattgccaataaccttaccagcacggttcaggtgtttactgactcggagtaccagctcccgtacgtcctcggctcggcgcatcaaggatgcctcccgccgtttccagcggacgtcttcatggtcccacagtatggatacctcaccctgaacaacgggagtcaggcggtaggacgctcttccttttactgcctggagtactttccttctcagatgctgcgtaccggaaacaactttaccttcagctacacctttgaggacgtgcccttccacagcagctacgctcacagccagagtttggaccggctgatgaatcctctgatcgaccagtatctgtattatctgaacaggacacaatcaaatagtggaactcttcagcagtctaggctactgtttagccaagctggacccaccagcatgtcccttcaagctaaaaactggctgcctggaccttgctacagacagcagcgtctgtcaaagcaggcaaacgacaacaacaacagcaactttccctggactgcggctacaaagtatcatctaaatggtcgggactcgttggttaatccaggaccagctatggccagccacaaagacgatgaagaaaagtttttccccatgcatggaaccctgatatttggtaaacaaggaacaaatgctaacgacgcggatttggaacatgtcatgattacagatgaagaagaaatcaggaccaccgatcccgtggctacagagcagtacggaaacgtgtcaaataatttgcaaaactcaaatactggtccaactacagaaaatgtcaatcaccagggagcgttacctggtatggtgtggcaggatcgagacgtgtacctgcagggacccatttgggccaagattcctcacaccgacggacactttcacccttctccactgatgggaggttttggactcaaacacccgcctcctcaaatcatgatcaaaaacactcctgttccagccaatcctcctacaaacttcagcgcggcaaagtttgcttccttcatcacacagtattccacgggacaggtcagcgtggagatcgagtgggagctgcagaaggagaacagcaaacgctggaaccccgagatccagtacacttccaactacaacaaatctgttaatgtggactttactgtggacgctaatggtgtgtattcagagcctcgccccattggcaccagatacctgactcgtaatctgtaa

SEQ ID NO: 3595 - DNA, 2208 bp, synthetic construct
  misc_feature 1..2208: note = source = /note="Description of Artificial Sequence: Synthetic polynucleotide"
  source 1..2208: mol_type = other DNA
atggctgccgatggttatcttccagattggctcgaggacactctctctgaaggaataagacagtggtggaagctcaaacctggcccaccaccaccaaggcccgcagagcggcatcaggacgacagcaggggtcttgtgcttcctgggtacaagtacctcggacccttcaacggactcgacaaaggagagccggtcaacgaggcagacgctgcggccctcgagcacgacaaggcctacgaccggcagctcgacagcggagacaacccgtacctcaagtacaaccacgccgacgcggagtttcaggagcgtcttaaagaagatacgtcttttgggggcaacctcggacgagcagtcttccaggcgaaaaagagggttcttgaacctctgggcctggttgaggaacctgttaagacggctccgggaaaaaagaggccggtagagcactctcctgcggagccagactcctcctcgggaaccggaaaagcgggccagcagcctgcaagaaagagattgaatttcggtcagactggagacgcagactccgtacctgacccccagcctctcggacagccaccagcagcccccacaagtttgggatctactacaatggctacaggcagtggcgcaccaatggcagacaataacgagggtgccgatggagtgggtaattcctcaggaaattggcattgcgattcccaatggctgggcgacagagtcatcaccaccagcacccgaacctgggccctgcccacctacaacaaccacctctacaagcaaatctccagccaatcaggagcatcgaacgacaaccactactttggctacagcaccccttgggggtattttgacttcaacagattccactgtcacttctccccacgtgactggcaaagactcatcaacaacaactggggattccgacccaagagactcaacttcaagctctttaacattcaagtcaaagaggtcacgcagaatgacggtacgacgacgattgccaataaccttaccagcacggttcaggtgtttactgactcggagtaccagctcccgtacgtcctcggctcggcgcatcaaggatgcctcccgccgtttccagcggacgtcttcatggtcccacagtatggatacctcaccctgaacaacgggagtcaggcggtaggacgctcttccttttactgcctggagtactttccttctcagatgctgcgtaccggaaacaactttaccttcagctacacctttgaggacgtgcccttccacagcagctacgctcacagccagagtttggaccggctgatgaatcctctgatcgaccagtatctgtattatctgaacaggacacaatcaaatagtggaactcttcagcagtctaggctactgtttagccaagctggacccaccagcatgtcccttcaagctaaaaactggctgcctggaccttgctacagacagcagcgtctgtcaaagcaggcaaacgacaacaacaacagcaactttccctggactgcggctacaaagtatcatctaaatggtcgggactcgttggttaatccaggaccagctatggccagccacaaagacgatgaagaaaagtttttccccatgcatggaaccctgatatttggtaaacaaggaacaaatgctaacgacgcggatttggaacatgtcatgattacagatgaagaagaaatcaggaccaccaatcccgtggctacagagcagtacggaaacgtgtcaaataatttgcaaaactcaaatactggtccaactacaggaaatgtcaatcaccagggagcgttacctggtatggtgtggcaggatcgagacgtgtacctgcagggacccatttgggccaagattcctcacaccgacggacactttcacccttctccactgatgggaggttttggactcaaacacccgcctcctcaaatcatgatcaaaaacactcctgttccagccaatcctcctacaaacttcagcgcggcaaagtttgcttccttcatcacacagtattccacgggacaggtcagcgtggagatcgagtgggagctgcagaaggagaacagcaaacgctggaaccccgagatccagtacacttccaactacaacaaatctgttaatgtggactttactgtggacgctaatggtgtgtattcagagcctcgccccattggcaccagatacctgactcgtaatctgtaa

SEQ ID NO: 3596 - DNA, 2208 bp, synthetic construct
  misc_feature 1..2208: note = source = /note="Description of Artificial Sequence: Synthetic polynucleotide"
  source 1..2208: mol_type = other DNA
atggctgccgatggttatcttccagattggctcgaggacactctctctgaaggaataagacagtggtggaagctcaaacctggcccaccaccaccaaggcccgcagagcggcatcaggacgacagcaggggtcttgtgcttcctgggtacaagtacctcggacccttcaacggactcgacaaaggagagccggtcaacgaggcagacgctgcggccctcgagcacgacaaggcctacgaccggcagctcgacagcggagacaacccgtacctcaagtacaaccacgccgacgcggagtttcaggagcgtcttaaagaagatacgtcttttgggggcaacctcggacgagcagtcttccaggcgaaaaagagggttcttgaacctctgggcctggttgaggaacctgttaagacggctccgggaaaaaagaggccggtagagcactctcctgcggagccagactcctcctcgggaaccggaaaagcgggccagcagcctgcaagaaagagattgaatttcggtcagactggagacgcagactccgtacctgacccccagcctctcggacagccaccagcagcccccacaagtttgggatctactacaatggctacaggcagtggcgcaccaatggcagacaataacgagggtgccgatggagtgggtaattcctcaggagattggcattgcgattcccaatggctgggcgacagagtcatcaccaccagcacccgaacctgggccctgcccacctacaacaaccacctctacaagcaaatctccagccaatcaggagcatcgaacgacaaccactactttggctacagcaccccttgggggtattttgacttcaacagattccactgtcacttctccccacgtgactggcaaagactcatcaacaacaactggggattccgacccaagagactcaacttcaagctctttaacattcaagtcaaagaggtcacgcagaatgacggtacgacgacgattgccaataaccttaccagcacggttcaggtgtttactgactcggagtaccagctcccgtacgtcctcggctcggcgcatcaaggatgcctcccgccgtttccagcggacgtcttcatggtcccacagtatggatacctcaccctgaacaacgggagtcaggcggtaggacgctcttccttttactgcctggagtactttccttctcagatgctgcgtaccggaaacaactttaccttcagctacacctttgaggacgtgcccttccacagcagctacgctcacagccagagtttggaccggctgatgaatcctctgatcgaccagtatctgtattatctgaacaggacacaatcaaatagtggaactcttcagcagtctaggctactgtttagccaagctggacccaccagcatgtcccttcaagctaaaaactggctgcctggaccttgctacagacagcagcgtctgtcaaagcaggcaaacgacaacaacaacagcaactttccctggactgcggctacaaagtatcatctaaatggtcgggactcgttggttaatccaggaccagctatggccagccacaaagacgatgaagaaaagtttttccccatgcatggaaccctgatatttggtaaacaaggaacaaatgctaacgacgcggatttggaacatgtcatgattacagatgaagaagaaatcaggaccaccaatcccgtggctacagagcagtacggaaacgtgtcaaatagtttgcaaaactcaaatactggtccaactacagaaaatgtcaatcaccagggagcgttacctggtatggtgtggcaggatcgagacgtgtacctgcagggacccatttgggccaagattcctcacaccgacggacactttcacccttctccactgatgggaggttttggactcaaacacccgcctcctcaaatcatgatcaaaaacactcctgttccagccaatcctcctacaaacttcagcgcggcaaagtttgcttccttcatcacacagtattccacgggacaggtcagcgtggagatcgagtgggagctgcagaaggagaacagcaaacgctggaaccccgagatccagtacacttccaactacaacaaatctgttaatgtggactttactgtggacgctaatggtgtgtattcagagcctcgccccattggcaccagatacctgactcgtaatctgtaa

SEQ ID NO: 3597 - DNA, 2208 bp, synthetic construct
  misc_feature 1..2208: note = source = /note="Description of Artificial Sequence: Synthetic polynucleotide"
  source 1..2208: mol_type = other DNA
atggctgccgatggttatcttccagattggctcgaggacattctctctgaaggaataagacagtggtggaagctcaaacctggcccaccaccaccaaagcccgcagagcggcataaggacgacagcaggggtcttgtgcttcctgggtacaagtacctcggacccttcaacggactcgacaaaggagagccggtcaacgaggcagacgccgcggccctcgagcacgacaaggcctacgaccggcagctcgacagcggagacaacccgtacctcaagtacaaccacgccgacgcggagtttcaggagcgtcttaaagaagatacgtcttttgggggcaacctcggacgagcagtcttccaggcaaaaaagagggttcttgaacctctgggcctggttgaggaacctgttaagacgactccgggaaaaaagaggccggtagagcaatctcctgcggagccagactcctcctcgggaaccggaaaggcgggcaaccagcctgcaagaaagagattgaattttggtcagactggagacgcagactccgtacctgacccccagcctctcggacagccaccagcagccccctctggtctgggatctactacaatggctacaggcagtggcgcaccaatggcagacaataacgagggtgccgatggagtgggtaattcctcaggaaattggcattgcgattcccaatggttgggcgacagagtcatcaccaccagcacccgaacctgggccctgcccacctacaacaatcacctctacaagcaaatctccagccaatcaggagccagcaacgacaaccactactttggctacagcaccccctgggggtattttgacttcaacagattccactgccacttttcaccacgtgactggcaaagactcatcaacaacaactggggattccgacccaaaagactcaacttcaagctctttaacattcaagtcaaagaggtcacgcagaatgacggtacgacgacgattgccaataaccttaccagcacggttcaggtgtttactgactcggagtaccagctcccgtacgtcctcggctcggcgcatcaaggatgcctcccgccgtttccagcggacgtcttcatggtcccacagtatggatacctcaccctgaacaacgggagtcaggcggtaggacgctcttccttttactgcctggagtactttccttctcagatgcttcgtaccggaaacaactttaccttcagttacacctttgaagacgttcctttccacagcagctacgctcacagtcaaagtctggaccggctgatgaatcctctgatagaccagtacctgtattatctaaacaaaacacaatcaaatagtggaactcttcagcagtctcggctactgtttagtcaagctggacccaccagcatgtctcttcaagctaaaaactggctgcctggaccttgctacagacaacagcgtctgtcaaagcaggcaaacgacaacaacaacagcaactttccctggactgcggctacaaagtatcatctaaatggccgggactcgttggttaatccaggaccagctatggccagccacaaagacgatgaagaaaagtttttccccatgcatggaaccctgatatttggtaaacaaggaacaaatgctaacgacgcggatttggacaatgtcatgattacagatgaagaagaaatccgcaccaccaatcccgtggctacggagcagtacgggactgtgtcaaataatttgcaaaactcaaatactggtccaactactggaactgtcaatcaccaaggagcgttacctggtatggtgtggcaggatcgagacgtgtaccttcagggacccatttgggccaagattcctcacaccgatggacactttcatccttctccactgatgggaggttttggactcaaacacccgcctcctcagatcatgatcaaaaacactcccgttccagccaatcctcctacaaacttcagttctgccaagtttgcttctttcatcacacagtattccacggggcaggtcagcgtggagatagagtgggagctgcagaaggagaacagcaaacgctggaaccccgagatccagtatacttccaactacaacaagtctgttaatgtggactttactgtggacactaatggtgtgtattcagagcctcgccccattggcaccagatacctgactcgtaatctgtaa

SEQ ID NO: 3598 - DNA, 2208 bp, synthetic construct
  misc_feature 1..2208: note = source = /note="Description of Artificial Sequence: Synthetic polynucleotide"
  source 1..2208: mol_type = other DNA
atggctgccgatggttatcttccagattggctcgaggacattctctctgaaggaataagacagtggtggaagctcaaacctggcccaccaccaccaaagcccgcagagcggcataaggacgacagcaggggtcttgtgcttcctgggtacaagtacctcggacccttcaacggactcgacaaaggagagccggtcaacgaggcagacgccgcggccctcgagcacgacaaggcctacgaccggcagctcgacagcggagacaacccgtacctcaagtacaaccacgccgacgcggagtttcaggagcgtcttaaagaagatacgtcttttgggggcaacctcggacgagcagtcttccaggcaaaaaagagggttcttgaacctctgggcctggttgaggaacctgttaagacggctccgggaaaaaagaggccggtagagcaatctcctgcggagccagactcctcctcgggaaccggaaaggcgggcaaccagcctgcaagaaagagattgaattttggtcagactggagacgcagactccgtacctgacccccagcctctcggacagccaccagcagccccctctggtctgggatctactacaatggctacaggcagtggcgcaccaatggcagacaataacgagggtgccgatggagtgggtaattcctcaggaaattggcattgcgattcccaatggttgggcgacagagtcatcaccaccagcacccgaacctgggccctgcccacctacaacaatcacctctacaagcaaatctccagccaatcaggagccagcaacgacaaccactactttggctacagcaccccctgggggtattttgacttcaacagattccactgccacttttcaccacgtgactggcaaagactcatcaacaacaactggggattccgacccaaaagactcaacttcaagctctttaacattcaagtcaaagaggtcacgcagaatgacggtacgacgacgattgccaataaccttaccagcacggttcaggtgtttactgactcggagtaccagctcccgtacgtcctcggctcggcgcatcaaggatgcctcccgccgtttccagcggacgtcttcatggtcccacagtatggatacctcaccctgaacaacgggagtcaggcggtaggacgctcttccttttactgcctggagtactttccttctcagatgcttcgtaccggaaacaactttaccttcagttacacctttgaagacgttcctttccacagcagctacgctcacagtcaaagtctggaccggctgatgaatcctctgatagaccagtacctgtattatctaaacaaaacacaatcaaatagtggaactcttcagcagtctcggctactgtttagtcaagctggacccaccagcatgtctcttcaagctaaaaactggctgcctggaccttgctacagacaacagcgtctgtcaaagcaggcaaacgacaacaacaacagcaactttccctggactgcggctacaaagtatcatctaaatggccgggactcgttggttaatccaggaccagctatggccagccacaaagacgatgaagaaaagtttttccccatgcatggaaccctgatatttggtaaacaaggaacaaatgctaacgacgcggatttggacaatgtcatgattacagatgaagaagaaatccgcaccaccaatcccgtggctacggagcagtacgggactgtgtcaaataatttgcaaaactcaaatactggtccaactactggaactgtcaatcaccaaggagcgttacctggtatggtgtggcaggatcgagacgtgtaccttcagggacccatttgggccaagattcctcacaccgatggacactttcatccttctccactgatgggaggttttggactcaaacacccgcctcctcagatcatgatcaaaaacactcccgttccagccaatcctcctacaaacttcagttctgccaagtttgcttctttcatcacacagtattccacggggcaggtcagcgtggagatagagtgggagctgcagaaggagaacagcaaacgctggaaccccgagatccagtatacttccaactacaacaagtctgttaatgtggactttactgtggacactaatggtgtgtattcagagcctcgccccattggcaccagatacctgactcgtaatctgtaa

SEQ ID NO: 3599 - DNA, 2208 bp, synthetic construct
  misc_feature 1..2208: note = source = /note="Description of Artificial Sequence: Synthetic polynucleotide"
  source 1..2208: mol_type = other DNA
atggctgccgatggttatcttccagattggctcgaggacattctctctgaaggaataagacagtggtggaagctcaaacctggcccaccaccaccaaagcccgcagagcggcataaggacgacagcaggggtcttgtgcttcctgggtacaagtacctcggacccttcaacggactcgacaaaggagagccggtcaacgaggcagacgccgcggccctcgagcacgacaaggcctacgaccggcagctcgacagcggagacaacccgtacctcaagtacaaccacgccgacgcggagtttcaggagcgtcttaaagaagatacgtcttttgggggcaacctcggacgagcagtcttccaggcaaaaaagagggttcttgaacctctgggcctggttgaggaacctgttaagacggctccgggaaaaaagaggccggtagagcaatctcctgcggagccagactcctcctcgggaaccggaaaggcgggcaaccagcctgcaagaaagagattgaattttggtcagactggagacgcagactccgtacctgacccccagcctctcggacagccaccagcagccccctctggtctgggatctactacaatggctacaggcagtggcgcaccaatggcagacaataacgagggtgccgatggagtgggtaattcctcaggaaattggcattgcgattcccaatggttgggcgacagagtcatcaccaccagcacccgaacctgggccctgcccacctacaacaatcacctctacaagcaaatctccagccaatcaggagccagcaacgacaaccactactttggctacagcaccccctgggggtattttgacttcaacagattccactgccacttttcaccacgtgactggcaaagactcatcaacaacaactggggattccgacccaaaagactcaacttcaagctctttaacattcaagtcaaagaggtcacgcagaatgacggtacgacgacgattgccaataaccttaccagcacggttcaggtgtttactgactcggagtaccagctcccgtacgtcctcggctcggcgcatcaaggatgcctcccgccgtttccagcggacgtcttcatggtcccacagtatggatacctcaccctgaacaacgggagtcaggcggtaggacgctcttccttttactgcctggagtactttccttctcagatgcttcgtaccggaaacaactttaccttcagttacacctttgaagacgttcctttccacagcggctacgctcacagtcaaagtctggaccggctgatgaatcctctgatagaccagtacctgtattatctaaacaaaacacaatcaaatagtggaactcttcagcagtctcggctactgtttagtcaagctggacccaccagcatgtctcttcaagctaaaaactggctgcctggaccttgctacagacaacagcgtctgtcaaagcaggcaaacgacaacaacaacagcaactttccctggactgcggctacaaagtatcatctaaatggccgggactcgttggttaatccaggaccagctatggccagccacaaagacgatgaagaaaagtttttccccatgcatggaaccctgatatttggtaaacaaggaacaaatgctaacgacgcggatttggacaatgtcatgattacagatgaagaagaaatccgcaccaccaatcccgtggctacggagcagtacgggactgtgtcaaataatttgcaaaactcaaatactggtccaactactggaactgtcaatcaccaaggagcgttacctggtatggtgtggcaggatcgagacgtgtaccttcagggacccatttgggccaagattcctcacaccgatggacactttcatccttctccactgatgggaggttttggactcaaacacccgcctcctcagatcatgatcaaaaacactcccgttccagccaatcctcctacaaacttcagttctgccaagtttgcttctttcatcacacagtattccacggggcaggtcagcgtggagatagagtgggagctgcagaaggagaacagcaaacgctggaaccccgagatccagtatacttccaactacaacaagtctgttaatgtggactttactgtggacactaatggtgtgtattcagagcctcgccccattggcaccagatacctgactcgtaatctgtaa

SEQ ID NO: 3600 - DNA, 2205 bp, synthetic construct
  misc_feature 1..2205: note = source = /note="Description of Artificial Sequence: Synthetic polynucleotide"
  source 1..2205: mol_type = other DNA
atggctgccgatggttatcttccagattggctcgaggacattctctctgaaggaataagacagtggtggaagctcaaacctggcccaccaccaaagcccgcagagcggcataaggacgacagcaggggtcttgtgcttcctgggtacaagtacctcggacccttcaacggactcgacaaaggagagccggtcaacgaggcagacgccgcggccctcgagcacgacaaggcctacgaccggcagctcgacagcggagacaacccgtacctcaagtacaaccacgccgacgcggagtttcaggagcgtcttaaagaagatacgtcttttgggggcaacctcggacgagcagtcttccaggcaaaaaagagggttcttgaacctctgggcctggttgaggaacctgttaagacggctccgggaaaaaagaggccggtagagcaatctcctgcggagccagactcctcctcgggaaccggaaaggcgggcaaccagcctgcaagaaagagattgaattttggtcagactggagacgcagactccgtacctgacccccagcctctcggacagccaccagcagccccctctggtctgggatctactacaatggctacaggcagtggcgcaccaatggcagacaataacgagggtgccgatggagtgggtaattcctcaggaaattggcattgcgattcccaatggttgggcgacagagtcatcaccaccagcacccgaacctgggccctgcccacctacaacaatcacctctacaagcaaatctccagccaatcaggagccagcaacgacaaccactactttggctacagcaccccctgggggtattttgacttcaacagattccactgccacttttcaccacgtgactggcaaagactcatcaacaacaactggggattccgacccaaaagactcaacttcaagctctttaacattcaagtcaaagaggtcacgcagaatgacggtacgacgacgattgccaataaccttaccagcacggttcaggtgtttactgactcggagtaccagctcccgtacgtcctcggctcggcgcatcaaggatgcctcccgccgtttccagcggacgtcttcatggtcccacagtatggatacctcaccctgaacaacgggagtcaggcggtaggacgctcttccttttactgcctggagtactttccttctcagatgcttcgtaccggaaacaactttaccttcagttacacctttgaagacgttcctttccacagcagctacgctcacagtcaaagtctggaccggctgatgaatcctctgatagaccagtacctgtattatctaaacaaaacacaatcaaatagtggaactcttcagcagtctcggctactgtttagtcaagctggacccaccagcatgtctcttcaagctaaaaactggctgcctggaccttgctacagacaacagcgtctgtcaaagcaggcaaacgacaacaacaacagcaactttccctggactgcggctacaaagtatcatctaaatggccgggactcgttggttaatccaggaccagctatggccagccacaaagacgatgaagaaaagtttttccccatgcatggaaccctgatatttggtaaacaaggaacaaatgctaacgacgcggatttggacaatgtcatgattacagatgaagaagaaatccgcaccaccaatcccgtggctacggagcagtacgggactgtgtcaaataatttgcaaaactcaaatactggtccaactactggaactgtcaatcaccaaggagcgttacctggtatggtgtggcaggatcgagacgtgtaccttcagggacccatttgggccaagattcctcacaccgatggacactttcatccttctccactgatgggaggttttggactcaaacacccgcctcctcagatcatgatcaaaaacactcccgttccagccaatcctcctacaaacttcagttctgccaagtttgcttctttcatcacacagtattccacggggcaggtcagcgtggagatagagtgggagctgcagaaggagaacagcaaacgctggaaccccgagatccagtatacttccaactacaacaagtctgttaatgtggactttactgtggacactaatggtgtgtattcagagcctcgccccattggcaccagatacctgactcgtaatctgtaa

SEQ ID NO: 3601 - DNA, 2208 bp, synthetic construct
  misc_feature 1..2208: note = source = /note="Description of Artificial Sequence: Synthetic polynucleotide"
  source 1..2208: mol_type = other DNA
atggctgccgatggttatcttccagattggctcgaggacactctctctgaaggaataagacagtggtggaagctcaaacctggcccaccaccaccaaggcccgcagagcggcatcaggacgacagcaggggtcttgtgcttcctgggtacaagtacctcggacccttcaacggactcgacaaaggagagccggtcaacgaggcagacgctgcggccctcgagcacgacaaggcctacgaccggcagctcgacagcggagacaacccgtacctcaagtacaaccacgccgacgcggagtttcaggagcgtcttaaagaagatacgtcttttgggggcaacctcggacgagcagtcttccaggcgaaaaagagggttcttgaacctctgggcctggttgaggaacctgttaagacggctccgggaaaaaagaggccggtagagcactctcctgcggagccagactcctcctcgggaaccggaaaagcgggccagcagcctgcaagaaagagattgaatttcggtcagactggagacgcagactccgtacctgacccccagcctctcggacagccaccagcagcccccacaagtttgggatctactacaatggctacaggcagtggcgcaccaatggcagacaataacgagggtgccgatggagtgggtaattcctcaggaaattggcattgcgattcccaatggctgggcgacagagtcatcaccaccagcacccgaacctgggccctgcccacctacaacaaccacctctacaagcaaatctccagccaatcaggagcatcgaacgacaaccactactttggctacagcaccccttgggggtattttgacttcaacagattccactgtcacttctccccacgtgactggcaaagactcatcaacaacaactggggattccgacccaagagactcaacttcaagctctttaacattcaagtcaaagaggtcacgcagaatgacggtacgacgacgattgccaataaccttaccagcacggttcaggtgtttactgactcggagtaccagctcccgtacgtcctcggctcggcgcatcaaggatgcctcccgccgtttccagcggacgtcttcatggtcccacagtatggatacctcaccctgaacaacgggagtcaggcggtaggacactcttcctcttactgcctggagtactttccttctcagatgctgcgtaccggaaacaactttaccttcagctacacctttgaggacgtgcctttccacagcagctacgctcacagccagagtttggaccggctgatgaatcctctgatcgaccagtatctgtattatctgaacaggacacaatcaaatagtggaactcttcagcagtctaggctactgtttagccaagctggacccaccagcatgtctcttcaagctaaaaactggctgcctggaccttgctacagacagcagcgtctgtcaaagcaggcaaacgacaacaacaacagcaactttccctggactgcggctacaaagtatcatctaaatggtcgggactcgttggttaatccaggaccagctatggccagccacaaagacgatgaagaaaagtttttccccatgcatggaaccctgatatttggtaaacaaggaacaaatgctaacgacgcggatttggaacatgtcatgattacagatgaagaagaaatcaggaccaccaatcccgtggctacagagcagtacggaaacgtgtcaaataatttgcaaaactcaaatactggtccaactacagaaaatgtcaatcaccagggagcgttacctggtatggtgtggcaggatcgagacgtgtacctgcagggacccatttgggccaagattcctcacaccgacggacactttcacccttctccactgatgggaggttttggactcaaacacccgcctcctcaaatcatgatcaaaaacactcctgttccagccaatcctcctacaaacttcagcgcggcaaagtttgcttccttcatcacacagtattccacgggacaggtcagcgtggagatcgagtgggagctgcagaaggagaacagcaaacgctggaaccccgagatccagtacacttccaactacaacaaatctgttaatgtggactttactgtagacactaatggtgtgtattcagagcctcgccccattggcaccagatacctgactcgtaatctgtaa

SEQ ID NO: 3602 - DNA, 2208 bp, synthetic construct
  misc_feature 1..2208: note = source = /note="Description of Artificial Sequence: Synthetic polynucleotide"
  source 1..2208: mol_type = other DNA
atggctgccgatggttatcttccagattggctcgaggacactctctctgaaggaataagacagtggtggaagctcaaacctggcccaccaccaccaaagcccgcagagcggcatcaggacgacagcaggggtcttgtgcttcccgggcacaagtacctcggacccttcaacggactcgacaaaggagagccggtcaacgaggcagacgctgcggccctcgagcacgacaaggcctacgaccggcagctcgacagcggagacaacccgtacctcaagtacaaccacgccgacgcggagtttcaggagcgtcttaaagaagatacgtcttttgggggcaacctcggacgagcagtcttccaggcgaaaaagagggttcttgaacctctgggcctggttgaggaacctgttaagacggctccgggaaaaaagaggccggtagagcactctcctgcggagccagactcctcctcgggaaccggaaaagcgggccagcagcctgcaagaaagagattgaatttcggtcagactggagacgcagactccgtacctgacccccagcctctcggacagccaccagcagcccccacaagtttgggatctactacaatggctacaggcagtggcgcaccaatggcagacaataacgagggtgccgatggagtgggtaattcctcaggaaattggcattgcgattcccaatggctgggcgacagagtcatcaccaccagcacccgaacctgggccctgcccacctacaacaaccacctctataagcaaatctccagccaatcaggagcatcgaacgacaaccactactttggctacagcaccccttgggggtattttgacttcaacagattccactgtcacttctccccacgtgactggcaaagactcatcaacaacaactggggattccgacccaagagactcaacttcaagctctttaacattcaagtcaaagaggtcacgcagaatgacggtacgacgacgattgccaataaccttaccagcacggttcaggtgtttactgactcggagtaccagctcccgtacgtcctcggctcggcgcatcaaggatgcctcccgccgtttccagcggacgtcttcatggtcccacagtatggatacctcaccctgaacaacgggagtcaggcggtaggacgctcttccttttactgcctggagtactttccttctcagatgctgcgtaccggaaacaactttaccttcagctacacctttgaggacgtgcccttccacagcagctacgctcacagccagagtttggaccggctgatgaatcctctgatcgaccagtatctgtattatctgaacaggacacaatcaaatagtggaactcttcagcagtctaggctactgtttagccaagctggacccaccagcatgtcccttcaagctaaaaactggctgcctggaccttgctacagacagcagcgtctgtcaaagcaggcaaacgacaacaacaacagcaactttccctggactgcggctacaaagtatcatctaaatggtcgggactcgttggttaatccaggaccagctatggccagccacaaagacgatgaagaaaagtttttccccatgcatggaaccctgatatttggtaaacaaggaacaaatgctaacgacgcggatttggaacatgtcatgattacagatgaagaagaaatcaggaccaccaatcccgtggctacagagcagtacggaaacgtgtcaaataatttgcaaaactcaaatactggtccaactacagaaaatgtcaatcaccagggagcgttacctggtatggtgtggcaggatcgagacgtgtacctgcagggacccatttgggccaagattcctcacaccgacggacactttcacccttctccactgatgggaggttttggactcaaacacccgcctcctcaaatcatgatcaaaaacactcctgttccagccaatcctcctacaaacttcagcgcggcaaagtttgcttccttcatcacacagtattccacgggacaggtcagcgtggagatcgagtgggagctgcagaaggagaacagcaaacgctggaaccccgagatccagtacacttccaactacaacaaatctgttaatgtggactttactgtggacgctaatggtgtgtattcagagcctcgccccattggcaccagatacctgactcgtaatctgtaa

SEQ ID NO: 3603 - DNA, 2208 bp, synthetic construct
  misc_feature 1..2208: note = source = /note="Description of Artificial Sequence: Synthetic polynucleotide"
  source 1..2208: mol_type = other DNA
atggctgccgatggttatcttccagattggctcgaggacactctctctgaaggaataagacagtggtggaagctcaaacctggcccaccaccgccaaagcccgcagagcggcataaggacgacagcaggggtcttgtgcttcctgggtacaagtacctcggacccttcaacggactcgacaagggagagccggtcaacgaggcagacgccgcggccctcgagcacgacaaggcctacgaccggcagctcgacagcggagacaacccgtacctcaagtacaaccacgccgacgcggagtttcaggagcgccttaaagaagatacgtcttttgggggcaacctcggacgagcagtcttccaggcgaaaaagagggttcttgaacctctgggcctggttgaggaacctgttaagacggctccgggaaaaaagaggccggtagagcactctcctgcggagccagactcctcctcgggaaccggaaaagcgggccagcagcctgcaagaaagagattgaatttcggtcagactggagacgcagactccgtacctgacccccagcctctcggacagccaccagcagcccccacaagtttgggatctactacaatggctacaggcagtggcgcaccaatggcagacaataacgagggtgccgatggagtgggtaattcctcaggaaattggcattgcgattcccaatggctgggcgacagagtcatcaccaccagcacccgaacctgggccctgcccacctacaacaaccacctctacaagcaaatctccagccaatcaggagcatcgaacgacaaccactactttggctacagcaccccttgggggtattttgacttcaacagattccactgtcacttctccccacgtgactggcaaagactcatcaacaacaactggggattccgacccaagagactcaacttcaagctctttaacattcaagtcaaagaggtcacgcagaatgacggtacgacgacgattgccaataaccttaccagcacggttcaggtgtttactgactcggagtaccagctcccgtacgtcctcggctcggcgcatcaaggatgcctcccgccgtttccagcggacgtcttcatggtcccacagtatggatacctcaccctgaacaacgggagtcaggcggtaggacgctcttccttttactgcctggagtactttccttctcagatgctgcgtaccggaaacaactttaccttcagctacacctttgaggacgtgcccttccacagcagctacgctcacagccagagtttggaccggctgatgaatcctctgatcgaccagtatctgtattatctgaacaggacacaatcaaatagtggaactcttcagcagtctaggctactgtttagccaagctggacccaccagcatgtcccttcaagctaaaaactggctgcctggaccttgctacagacagcagcgtctgtcaaagcaggcaaacgacaacaacaacagcaactttccctggactgcggctacaaagtatcatctaaatggtcgggactcgttggttaatccaggaccagctatggccagccacaaagacgatgaagaaaagtttttccccatgcatggaaccctgatatttggtaaacaaggaacaaatgctaacgacgcggatttggaacatgtcatgattacagatgaagaagaaatcaggaccaccaatcccgtggctacagagcagtacggaaacgtgtcaaataatttgcaaaactcaaatactggtccaactacagaaaatgtcaatcaccagggagcgttacctggtatggtgtggcaggatcgagacgtgtacctgcagggacccatttgggccaagattcctcacaccgacggacactttcacccttctccactgatgggaggttttggactcaaacacccgcctcctcaaatcatgatcaaaaacactcctgttccagccaatcctcctacaaacttcagcgcggcaaagtttgcttccttcatcacacagtattccacgggacaggtcagcgtggagatcgagtgggagctgcagaaggagaacagcaaacgctggaaccccgagatccagtacacttccaactacaacaaatctgttaatgtggactttactgtggacgctaatggtgtgtattcagagcctcgccccattggcaccagatacctgactcgtaatctgtaa

SEQ ID NO: 3604 - DNA, 2208 bp, synthetic construct
  misc_feature 1..2208: note = source = /note="Description of Artificial Sequence: Synthetic polynucleotide"
  source 1..2208: mol_type = other DNA
atggctgccgatggttatcttccagattggctcgaggacactctctctgaaggaataagacagtggtggaagctcaaacctggcccaccaccaccaaggcccgcagagcggcatcaggacgacagcaggggtcttgtgcttcctgggtacaagtacctcggacccttcaacggactcgacaaaggagagccggtcaacgaggcagacgctgcggccctcgagcacgacaaggcctacgaccggcagctcgacagcggagacaacccgtacctcaagtacaaccacgccgacgcggagtttcaggagcgtcttaaagaagatacgtcttttgggggcaacctcggacgagcagtcttccaggcgaaaaagagggttcttgaacctctgggcctggttgaggaacctgttaagacggctccgggaaaaaagaggccggtagagcactctcctgcggagccagactcctcctcgggaaccggaaaagcgggccagcagcctgcaagaaagagattgaatttcggtcagactggagacgcagactccgtacctgacccccagcctctcggacagccaccagcagcccccacaagtttgggatctactacaatggctacaggcagtggcgcaccaatggcagacaataacgagggtgccgatggagtgggtaattcctcaggaaattggcattgcgattcccaatggctgggcgacagagtcatcaccaccagcacccgaacctgggccctgcccacctacaacaaccacctctacaagcaaatctccagccaatcaggagcatcgaacgacaaccactactttggctacagcaccccttgggggtattttgacttcaacagattccactgtcacttctccccacgtgactggcaaagactcatcaacaacaactggggattccgacccaagagactcaacttcaagctctttaacattcaagtcaaagaggtcacgcagaatgacggtacgacgacgattgccaataaccttaccagcacggttcaggtgtttactgactcggagtaccagctcccgtacgtcctcggctcggcgcatcaaggatgcctcccgccgtttccagcggacgtcttcatggtcccacagtatggatacctcaccctgaacaacgggagtcaggcggtaggacgctcttcctcttactgcctggagtactttccttctcagatgctgcgtaccggaaacaactttaccttcagctacacctttgaggacgtgcccttccacagcagctacgctcacagccagagtttggaccggctgatgaatcctctgatcgaccagtatctgtattatctgaacaggacacaatcaaatagtggaactcttcagcagtctaggctactgtttagccaagctggacccaccagcatgtcccttcaagctaaaaactggctgcctggaccttgctacagacagcagcgtctgtcaaagcaggcaaacgacaacaacaacagcaactttccctggactgcggctacaaagtatcatctaaatggtcgggactcgttggttaatccaggaccagctatggccagccacaaagacgatgaagaaaagtttttccccatgcatggaaccctgatatttggtaaacaaggaacaaatgctaacgacgcggatttggaacatgtcatgattacagatgaagaagaaatcaggaccaccaatcccgtggctacagagcagtacggaaacgtgtcaaataatttgcaaaactcaaatactggtccaactacagaaaatgtcaatcaccagggagcgttacctggtatggtgtggcaggatcgagacgtgtacctgcagggacccatttgggccaagattcctcacaccgacggacactttcacccttctccactgatgggaggttttggactcaaacacccgcctcctcaaatcatgatcaaaaacactcctgttccagccaatcctcctacaaacttcagcgcggcaaagtttgcttccttcatcacacagtattccacgggacaggtcagcgtggagatcgagtgggagctgcagaaggagaacagcaaacgctggaaccccgagatccagtacacttccaactacaacaaatctgttaatgtggactttactgtggacgctaatggtgtgtattcagagcctcgccccattggcaccagatacctgactcgtaatctgtaa

SEQ ID NO: 3605 - DNA, 2208 bp, synthetic construct
  misc_feature 1..2208: note = source = /note="Description of Artificial Sequence: Synthetic polynucleotide"
  source 1..2208: mol_type = other DNA
atggctgccgatggttatcttccagattggctcgaggacactctctctgaaggaataagacagtggtggaagctcaaacctggcccaccaccaccaaggcccgcagagcggcatcaggacgacagcaggggtcttgtgcttcctgggtacaagtacctcggacccttcaacggactcgacaaaggagagccggtcaacgaggcagacgctgcggccctcgagcacgacaaggcctacgaccggcagctcgacagcggagacaacccgtacctcaagtacaaccacgccgacgcggagtttcaggagcgtcttaaagaagatacgtcttttgggggcaacctcggacgagcagtcttccaggcgaaaaagagggttcttgaacctctgggcctggttgaggaacctgttaagacggctccgggaaaaaagaggccggtagagcactctcctgcggagccagactcctcctcgggaaccggaaaagcgggccagcagcctgcaagaaagagattgaatttcggtcagactggagacgcagactccgtacctgacccccagcctctcggacagccaccagcagcccccacaagtttgggatctactacaatggctacaggcagtggcgcaccaatggcagacaataacgagggtgccgatggagtgggtaattcctcaggaaattggcattgcgattcccaatggctgggcgacagagtcatcaccaccagcacccgaacctgggccctgcccacctacaacaaccacctctacaagcaaatctccagccaatcaggagcatcgaacgacaaccactactttggctacagcaccccttgggggtattttgacttcaacagattccactgtcacttctccccacgtgactggcaaagactcatcaacaacaactggggattccgacccaagagactcaacttcaagctctttaacattcaagtcaaagaggtcacgcagaatgacggtacgacgacgattgccaataaccttaccagcacggttcaggtgtttactgactcggagtaccagctcccgtacgtcctcggctcggcgcatcaaggatgcctcccgccgtttccagcggacgtcttcatggtcccacagtatggatacctcaccctgaacaacgggagtcaggcggtaggacgctcttccttttactgcctggagtactttccttctcagatgctgcgtaccggaaacaactttaccttcagctacacctttgaggacgtgcccttccacagcagctacgctcacagccagagtttggaccggctgatgaatcctctgatcgaccagtatctgtattatccgaacaggacacaatcaaatagtggaactcttcagcagtctaggctactgtttagccaagctggacccaccagcatgtcccttcaagctaaaaactggctgcctggaccttgctacagacagcagcgtctgtcaaagcaggcaaacgacaacaacaacagcaactttccctggactgcggctacaaagtatcatctaaatggtcgggactcgttggttaatccaggaccagctatggccagccacaaagacgatgaagaaaagtttttccccatgcatggaaccctgatatttggtaaacaaggaacaaatgctaacgacgcggatttggaacatgtcatgattacagatgaagaagaaatcaggaccaccaatcccgtggctacagagcagtacggaaacgtgtcaaataatttgcaaaactcaaatactggtccaactacagaaaatgtcaatcaccagggagcgttacctggtatggtgtggcaggatcgagacgtgtacctgcagggacccatttgggccaagattcctcacaccgacggacactttcacccttctccactgatgggaggttttggactcaaacacccgcctcctcaaatcatgatcaaaaacactcctgttccagccaatcctcctacaaacttcagcgcggcaaagtttgcttccttcatcacacagtattccacgggacaggtcagcgtggagatcgagtgggagctgcagaaggagaacagcaaacgctggaaccccgagatccagtacacttccaactacaacaaatctgttaatgtggactttactgtggacgctaatggtgtgtattcagagcctcgccccattggcaccagatacctgactcgtaatctgtaa

SEQ ID NO: 3606 - DNA, 2208 bp, synthetic construct
  misc_feature 1..2208: note = source = /note="Description of Artificial Sequence: Synthetic polynucleotide"
  source 1..2208: mol_type = other DNA
atggctgccgatggttatcttccagattggctcgaggacactctctctgaaggaataagacagtggtggaagctcaaacctggcccaccaccaccaaggcccgcagagcggcatcaggacgacagcaggggtcttgtgcttcctgggtacaagtacctcggacccttcaacggactcgacaaaggagagccggtcaacgaggcagacgctgcggccctcgagcacgacaaggcctacgaccggcagctcgacagcggagacaacccgtacctcaagtacaaccacgccgacgcggagtttcaggagcgtcttaaagaagatacgtcttttgggggcaacctcggacgagcagtcttccaggcgaaaaagagggttcttgaacctctgggcctggttgaggaacctgttaagacggctccgggaaaaaagaggccggtagagcactctcctgcggagccagactcctcctcgggaaccggaaaagcgggccagcagcctgcaagaaagagattgaatttcggtcagactggagacgcagactccgtacctgacccccagcctctcggacagccaccagcagcccccacaagtttgggatctactacaatggctacaggcagtggcgcaccaatggcagacaataacgagggtgccgatggagtgggtaattcctcaggaaattggcattgcgattcccaatggctgggcgacagagtcatcaccaccagcacccgaacctgggccctgcccacctacaacaaccacctctacaagcaaatctccagccaatcaggagcatcgaacgacaaccactactttggctacagcaccccttgggggtattttgacttcaacagattccactgtcacttctccccacgtgactggcaaagactcatcaacaacaactggggattccgacccaagagactcaacttcaagctctttaacattcaagtcaaagaggtcacgcagaatgacggtacgacgacgattgccaataaccttaccagcacggttcaggtgtttactgactcggagtaccagctcccgtacgtcctcggctcggcgcatcaaggatgcctcccgccgtttccagcggacgtcttcatggtcccacagtatggatacctcaccctgaacaacgggagtcaggcggtaggacgctcttccttttactgcctggagtactttccttctcagatgcttcgtaccggaaacaactttaccttcagttacacctttgaagacgttcctttccacagcagctacgctcacagtcaaagtctggaccggctgatgaatcctcttatcgaccagtacctgtattatctaaacaaaacacaatcaaatagtggaactcttcagcagtctcggctactgtttagtcaagctggacctaccagcatgtctcttcaagctaaaaactggctgcctggaccttgctacagacaacagcgtctgtcaaagcaggcaaacgacaacaacaacagcaactttccctggactgcggctacaaagtatcatctaaatggccgggactcgttggttaatccaggaccagctatggccagccacaaagacgatgaagaaaagtttttccccatgcatggaaccctgatatttggcaaacaagggacaaatgctaacgacgcggatttggacaatgtcatgattacagatgaagaagaaatccgtaccaccaatcccgtggctacggagcagtacgggactgtgtcaaataatttgcaaaactcaaatactggtccaactactggaactgtcaatcaccaaggagcgttacctggtatggtgtggcaggatcgagacgtgtaccttcagggacccatttgggccaagattcctcacaccgatggacactttcacccttctccgctgatgggaggttttggactcaaacacccgcctcctcagatcatgatcaaaaacactcccgttccagccaatcctcccacaaacttcagttctgccaagtttgcttctttcatcacacagtattccacgggacaggttagcgtggagatcgagtgggagctgcagaaggagaacagcaaacgctggaaccccgagatccagtacacttccaactacaacaagtctgttaatgtggactttactgtggacactaatggtgtgtattcagagcctcgccccattggcaccagatacctgactcgtaatctgtaa

SEQ ID NO: 3607 - DNA, 2208 bp, synthetic construct
  misc_feature 1..2208: note = source = /note="Description of Artificial Sequence: Synthetic polynucleotide"
  source 1..2208: mol_type = other DNA
atggctgccgatggttatcttccagattggctcgaggacactctctctgaaggaataagacagtggtggaagctcaaacctggcccaccaccaccaaagcccgcagagcggcatcaggacgacagcaggggtcttgtgcttcccgggcacaagtacctcggacccttcaacggactcgacaaaggagagccggtcaacgaggcagacgctgcggccctcgagcacgacaaggcctacgaccggcagctcgacagcggagacaacccgtacctcaagtacaaccacgccgacgcggagtttcaggagcgtcttaaagaagatacgtcttttgggggcaacctcggacgagcagtcttccaggcgaaaaagagggttcttgaacctctgggcctggttgaggaacctgttaagacggctccgggaaaaaagaggccggtagagcactctcctgcggagccagactcctcctcgggaaccggaaaagcgggccagcagcctgcaagaaagagattgaatttcggtcagactggagacgcagactccgtacctgacccccagcctctcggacagccaccagcagcccccacaagtttgggatctactacaatggctacaggcagtggcgcaccaatggcagacaataacgagggtgccgatggagtgggtaattcctcaggaaattggcattgcgattcccaatggctgggcgacagagtcatcaccaccagcacccgaacctgggccctgcccacctacaacaaccacctctataagcaaatctccagccaatcaggagcatcgaacgacaaccactactttggctacagcaccccttgggggtattttgacttcaacagattccactgtcacttctccccacgtgactggcaaagactcatcaacaacaactggggattccgacccaagagactcaacttcaagctctttaacattcaagtcaaagaggtcacgcagaatgacggtacgacgacgattgccaataaccttaccagcacggttcaggtgtttactgactcggagtaccagctcccgtacgtcctcggctcggcgcatcaaggatgcctcccgccgtttccagcggacgtcttcatggtcccacagtatggatacctcaccctgaacaacgggagtcaggcggtaggacactcttcctcttactgcctggagtactttccttctcagatgctgcgtaccggaaacaactttaccttcagctacacctttgaggacgtgcctttccacagcagctacgctcacagccagagtttggaccggctgatgaatcctctgatcgaccagtatctgtattatctgaacaggacacaatcaaatagtggaactcttcagcagtctaggctactgtttagccaagctggacccaccagcatgtctcttcaagctaaaaactggctgcctggaccttgctacagacagcagcgtctgtcaaagcaggcaaacgacaacaacaacagcaactttccctggactgcggctacaaagtatcatctaaatggtcgggactcgttggttaatccaggaccagctatggccagccacaaagacgatgaagaaaagtttttccccatgcatggaaccctgatatttggtaaacaaggaacaaatgctaacgacgcggatttggaacatgtcatgattacagatgaagaagaaatcaggaccaccaatcccgtggctacagagcagtacggaaacgtgtcaaataatttgcaaaactcaaatactggtccaactacagaaaatgtcaatcaccagggagcgttacctggtatggtgtggcaggatcgagacgtgtacctgcagggacccatttgggccaagattcctcacaccgacggacactttcacccttctccactgatgggaggttttggactcaaacacccgcctcctcaaatcatgatcaaaaacactcctgttccagccaatcctcctacaaacttcagcgcggcaaagtttgcttccttcatcacacagtattccacgggacaggtcagcgtggagatcgagtgggagctgcagaaggagaacagcaaacgctggaaccccgagatccagtacacttccaactacaacaaatctgttaatgtggactttactgtagacactaatggtgtgtattcagagcctcgccccattggcaccagatacctgactcgtaatctgtaa

SEQ ID NO: 3608 - DNA, 2208 bp, synthetic construct
  misc_feature 1..2208: note = source = /note="Description of Artificial Sequence: Synthetic polynucleotide"
  source 1..2208: mol_type = other DNA
atggctgccgatggttatcttccagattggctcgaggacactctctctgaaggaataagacagtggtggaagctcaaacctggcccaccaccaccaaggcccgcagagcggcatcaggacgacagcaggggtcttgtgcttcctgggtacaagtacctcggacccttcaacggactcgacaaaggagagccggtcaacgaggtagacgctgcggccctcgagcacgacaaggcctacgaccggcagctcgacagcggagacaacccgtacctcaagtacaaccacgccgacgcggagtttcaggagcgtcttaaagaagatacgtcttttgggggcaacctcggacgagcagtcttccaggcgaaaaagagggttcttgaacctctgggcctggttgaggaacctgttaagacggctccgggaaaaaagaggccggtagagcactctcctgcggagccagactcctcctcgggaaccggaaaagcgggccagcagcctgcaagaaagagattgaatttcggtcagactggagacgcagactccgtacctgacccccagcctctcggacagccaccagcagcccccacaagtttgggatctactacaatggctacaggcagtggcgcaccaatggcagacaataacgagggtgccgatggagtgggtaattcctcaggaaattggcattgcgattcccaatggctgggcgacagagtcatcaccaccagcacccgaacctgggccctgcccacctacaacaaccacctctacaagcaaatctccagccaatcaggagcatcgaacgacaaccactactttggctacagcaccccttgggggtattttgacttcaacagattccactgtcacttctccccacgtgactggcaaagactcatcaacaacaactggggattccgacccaagagactcaacttcaagctctttaacattcaagtcaaagaggtcacgcagagtgacggtacgacgacgattgccaataaccttaccagcacggttcaggtgtttactgactcggagtaccagctcccgtacgtcctcggctcggcgcatcaaggatgcctcccgccgtttccagcggacgtcttcatggtcccacagtatggatacctcaccctgaacaacgggagtcaggcggtaggacgctcttccttttactgcctggagtactttccttctcagatgctgcgtaccggaaacaactttaccttcagctacacctttgaggacgtgcccttccacagcagctacgctcacagccagagtttggaccggctgatgaatcctctgatcgaccagtatctgtattatctgaacaggacacaatcaaatagtggaactcttcagcagtctaggctactgtttagccaagctggacccaccagcatgtcccttcaagctaaaaactggctgcctggaccttgctacagacagcagcgtctgtcaaagcaggcaaacgacaacaacaacagcaactttccctggactgcggctacaaagtatcatctaaatggtcgggactcgttggttaatccaggaccagctatggccagccacaaagacgatgaagaaaagtttttccccatgcatggaaccctgatatttggtaaacaaggaacaaatgctaacgacgcggatttggaacatgtcatgattacagatgaagaagaaatcaggaccaccaatcccgtggctacagagcagtacggaaacgtgtcaaataatttgcaaaactcaaatactggtccaactacagaaaatgtcaatcaccagggagcgttacctggtatggtgtggcaggatcgagacgtgtacctgcagggacccatttgggccaagattcctcacaccgacggacactttcacccttctccactgatgggaggttttggactcaaacacccgcctcctcaaatcatgatcaaaaacactcctgttccagccaatcctcctacaaacttcagcgcggcaaagtttgcttccttcatcacacagtattccacgggacaggtcagcgtggagatcgagtgggagctgcagaaggagaacagcaaacgctggaaccccgagatccagtacacttccaactacaacaaatctgttaatgtggactttactgtggacgctaatggtgtgtattcagagcctcgccccattggcaccagatacctgactcgtaatctgtaa

SEQ ID NO: 3609 - DNA, 2208 bp, synthetic construct
  misc_feature 1..2208: note = source = /note="Description of Artificial Sequence: Synthetic polynucleotide"
  source 1..2208: mol_type = other DNA
atggctgccgatggttatcttccagattggctcgaggacactctctctgaaggaataagacagtggtggaagctcaaacctggcccaccaccaccaaggcccgcagagcggcatcaggacgacagcaggggtcttgtgcttcctgggtacaagtacctcggacccttcaacggactcgacaaaggagagccggtcaacgaggcagacgctgcggccctcgagcacgacaaggcctacgaccggcagctcgacagcggagacaacccgtacctcaagtacaaccacgccgacgcggagtttcaggagcgtcttaaagaagatacgtcttttgggggcaacctcggacgagcagtcttccaggcgaaaaagagggttcttgaacctctgggcctggttgaggaacctgttaagacggctccgggaaaaaagaggccggtagagcactctcctgcggagccagactcctcctcgggaaccggaaaagcgggccagcagcctgcaagaaagagattgaatttcggtcagactggagacgcagactccgtacctgacccccagcctctcggacagccaccagcagcccccacaagtttgggatctactacaatggctacaggcagtggcgcaccaatggcagacaataacgagggtgccgatggagtgggtaattcctcaggaaattggcattgcgattcccaatggctgggcgacagagtcatcaccaccagcacccgaacctgggccctgcccacctacaacaaccacctctacaagcaaatctccagccaatcaggagcatcgaacgacaaccactactttggctacagcaccccttgggggtattttgacttcaacagattccactgtcacttctccccacgtgactggcaaagactcatcaacaacaactggggattccgacccaagagactcaacttcaagctctttaacattcaagtcaaagaggtcacgcagaatgacggtacgacgacgattgccaataaccttaccagcacggttcaggtgtttactgactcggagtaccagctcccgtacgtcctcggctcggcgcatcaaggatgcctcccgccgtttccagcggacgtcttcatggtcccacagtatggatacctcaccctgaacaacgggagtcaggcggtaggacgctcttccttttactgcctggagtactttccttctcagatgctgcgtaccggaaacaactttaccttcagctacacctttgaggacgtgcccttccacagcagctacgctcacagccagagtttggaccggctgatgaatcctctgatcgaccagtatctgtattatctgaacaggacacaatcaaatagtggaactcttcagcagtctaggctactgtttagccaagctggacccaccagcatgtcccttcaagctaaaaactggctgcctggaccttgctacagacagcagcgtctgtcaaagcaggcaaacgacaacaacaacagcaactttccctggactgcggctacaaagtatcatctaaatggtcgggactcgttggttaatccaggaccagctatggccagccacaaagacgatgaagaaaagtttttccccatgcatggaaccctgatatttggtaaacaaggaacaaatgctaacgacgcggatttggaacatgtcatgattacagatgaagaagaaatcaggaccaccaatcccgtggctacagagcagtacggaaacgtgtcaaataatttgcaaaactcaaatactggtccaactacagaaaatgtcaatcaccagggagcgttacctggtatggtgtggcaggatcgagacgtgtacctgcagggacccatttgggccaagattcctcacaccgacggacactttcacccttctccactgatgggaggttttggactcaaacacccgcctcctcaaatcatgatcaaaaacactcctgttccagccaatcctcctacaaacttcagcgcggcaaagtttgcttccttcatcacacagtattccacgggacaggtcagcgtggagatcgagtgggagctgcagaaggagaacagcaaacgctggaaccccgagatccagtatacctccaactacaacaagtctgttaatgtggactttactgtggacactaatggcgtgtattcagagcctcgccccattggcacaagatacctgactcgtaatctgtaa

SEQ ID NO: 3610 - DNA, 2208 bp, synthetic construct
  misc_feature 1..2208: note = source = /note="Description of Artificial Sequence: Synthetic polynucleotide"
  source 1..2208: mol_type = other DNA
atggctgccgatggttatcttccagattggctcgaggacactctctctgaaggaataagacagtggtggaagctcaaacctggcccaccaccaccaaagcccgcagagcggcatcaggacgacagcaggggtcttgtgcttcccgggcacaagtacctcggacccttcaacggactcgacaaaggagagccggtcaacgaggcagacgctgcggccctcgagcacgacaaggcctacgaccggcagctcgacagcggagacaacccgtacctcaagtacaaccacgccgacgcggagtttcaggagcgtcttaaagaagatacgtcttttgggggcaacctcggacgagcagtcttccaggcgaaaaagagggttcttgaacctctgggcctggttgaggaacctgttaagacggctccgggaaaaaagaggccggtagagcactctcctgcggagccagactcctcctcgggaaccggaaaagcgggccagcagcctgcaagaaagagattgaatttcggtcagactggagacgcagactccgtacctgacccccagcctctcggacagccaccagcagcccccacaagtttgggatctactacaatggctacaggcagtggcgcaccaatggcagacaataacgagggtgccgatggagtgggtaattcctcaggaaattggcattgcgattcccaatggctgggcgacagagtcatcaccaccagcacccgaacctgggccctgcccacctacaacaaccacctctataagcaaatctccagccaatcaggagcatcgaacgacaaccactactttggctacagcaccccttgggggtattttgacttcaacagattccactgtcacttctccccacgtgactggcaaagactcatcaacaacaactggggattccgacccaagagactcaacttcaagctctttaacattcaagtcaaagaggtcacgcagaatgacggtacgacgacgattgccaataaccttaccagcacggttcaggtgtttactgactcggagtaccagctcccgtacgtcctcggctcggcgcatcaaggatgcctcccgccgtttccagcggacgtcttcatggtcccacagtatggatacctcaccctgaacaacgggagtcaggcggtaggacactcttcctcttactgcctggagtactttccttctcagatgctgcgtaccggaaacaactttaccttcagctacacctttgaggacgtgcctttccacagcagctacgctcacagccagagtttggaccggctgatgaatcctctgatcgaccagtatctgtattatctgaacaggacacaatcaaatagtggaactcttcagcagtctaggctactgtttagccaagctggacccaccagcatgtctcttcaagctaaaaactggctgcctggaccttgctacagacagcagcgtctgtcaaagcaggcaaacgacaacaacaacagcaactttccctggactgcggctacaaagtatcatctaaatggtcgggactcgttggttaatccaggaccagctatggccagccacaaagacgatgaagaaaagtttttccccatgcatggaaccctgatatttggtaaacaaggaacaaatgctaacgacgcggatttggaacatgtcatgattacagatgaagaagaaatcaggaccaccaatcccgtggctacagagcagtacggaaacgtgtcaaataatttgcaaaactcaaatactggtccaactacagaaaatgtcaatcaccagggagcgttacctggtatggtgtggcaggatcgagacgtgtacctgcagggacccatttgggccaagattcctcacaccgacggacactttcacccttctccactgatgggaggttttggactcaaacacccgcctcctcaaatcatgatcaaaaacactcctgttccagccaatcctcctacaaacttcagcgcggcaaagtttgcttccttcatcacacagtattccacgggacaggtcagcgtggagatcgagtgggagctgcagaaggagaacagcaaacgctggaaccccgagatccagtacacttccaactacaacaaatctgttaatgtggactttactgtggacgctaatggtgtgtattcagagcctcgccccattggcaccagatacctgactcgtaatctgtaa

SEQ ID NO: 3611 - DNA, 2208 bp, synthetic construct
  misc_feature 1..2208: note = source = /note="Description of Artificial Sequence: Synthetic polynucleotide"
  source 1..2208: mol_type = other DNA
atggctgccgatggttatcttccagattggctcgaggacactctctctgaaggaataagacagtggtggaagctcaaacctggcccaccaccaccaaggcccgcagagcggcatcaggacgacagcaggggtcttgtgcttcctgggtacaagtacctcggacccttcaacggactcgacaaaggagagccggtcaacgaggcagacgctgcggccctcgagcacgacaaggcctacgaccggcagctcgacagcggagacaacccgtacctcaagtacaaccacgccgacgcggagtttcaggagcgtcttaaagaagatacgtcttttgggggcaacctcggacgagcagtcttccaggcgaaaaagagggttcttgaacctctgggcctggttgaggaacctgttaagacggctccgggaaaaaagaggccggtagagcactctcctgcggagccagactcctcctcgggaaccggaaaagcgggccagcagcctgcaagaaagagattgaatttcggtcagactggagacgcagactccgtacctgacccccagcctctcggacagccaccagcagcccccacaagtttgggatctactacaatggctacaggcagtggcgcaccaatggcagacaataacgagggtgccgatggagtgggtaattcctcaggaaattggcattgcgattcccaatggctgggcgacagagtcatcaccaccagcacccgaacctgggccctgcccacctacaacaaccacctctacaagcaaatctccagccaatcaggagcatcgaacgacaaccactactttggctacagcaccccttgggggtattttgacttcaacagattccactgtcacttctccccacgtgactggcaaagactcatcaacaacaactggggattccgacccaagagactcaacttcaagctctttaacattcaagtcaaagaggtcacgcagaatgacggtacgacgacgattgccaataaccttaccagcacggttcaggtgtttactgactcggagtaccagctcccgtacgtcctcggctcggcgcatcaaggatgcctcccgccgtttccagcggacgtcttcatggtcccacagtatggatacctcaccctgaacaacgggagtcaggcggtaggacgctcttccttttactgcctggagtactttccttctcagatgctgcgtaccggaaacaactttaccttcagctacacctttgaggacgtgcccttccacagcagctacgctcacagccagagtttggaccggctgatgaatcctctgatcgaccagtatctgtattatctgaacaggacacaatcaaatagtggaactcttcagcagtctaggctactgtttagccaagctggacccaccagcatgtcccttcaagctaaaaactggctgcctggaccttgctacagacagcagcgtctgtcaaagcaggcaaacgacaacaacaacagcaactttccctggactgcggctacaaagtatcatctaaatggtcgggactcgttggttaatccaggaccagctatggccagccacaaagacgatgaagaaaagtttttccccatgcatggaaccctgatatttggtaaacaaggaacaaatgctaacgacgcggatttggaacatgtcatgattacagatgaagaagaaatcaggaccaccaatcccgtggctacagagcagtacggaaacgtgtcaaataatttgcaaaactcaaatactggtccaactacagaaaatgtcaatcaccagggagcgttacctggtatggtgtggcaggatcgagacgtgtacctgcagggacccatttgggccaagattcctcacaccgacggacactttcacccttctccactgatgggaggttttggactcaaacacccgcctcctcaaatcatgatcaaaaacactcctgttccagccaatcctcctacaaacttcagcgcggcaaagtttgcttccttcatcacacagtattccacgggacaggccagcgtggagatcgagtgggagctgcagaaggagaacagcaaacgctggaaccccgagatccagtacacttccaactacaacaaatctgttaatgtggactttactgtggacgctaatggtgtgtattcagagcctcgccccattggcaccagatacctgactcgtaatctgtaa

SEQ ID NO: 3612 - DNA, 2208 bp, synthetic construct
  misc_feature 1..2208: note = source = /note="Description of Artificial Sequence: Synthetic polynucleotide"
  source 1..2208: mol_type = other DNA
atggctgccgatggttatcttccagattggctcgaggacactctctctgaaggaataagacagtggtggaagctcaaacctggcccaccaccgccaaagcccgcagggcggcataaggacgacagcaggggtcttgtgcttcctgggtacaagtacctcggacccttcaacggactcgacaagggagagccggtcaacgaggcagacgccgcggccctcgagcacgacaaggcctacgaccggcagctcgacagcggagacaacccgtacctcaagtacaaccacgccggcgcggagtttcaggagcgccttaaagaagatacgtcttttgggggcaacctcggacgagcagtattccaggcgaaaaagagggttcttgaacctctgggcctggttgaggagcctgttaagacggccccgggaaaaaagaggccggtagagcactctcctgtggagccagactcctcctcgggaaccggaaaagcgggccagcagcctgcgaggaagagattgaattttggtcagactggagacgcagactccgtacctgacccccagcctctcggacagccaccagcagcccccacaagtttgggatctactacaatggctacaggcagtggcgcaccaatggcagacaataacgagggtgccgatggagtgggtaattcctcagggaattggcattgcgattcccaatggttgggcgacagagtcatcaccaccagcacccgaacctgggccctgcccacctacaacaaccacctctacaagcaaatctccagccaatcaggagcagcgaacgacaaccactactttggctacagcaccccttgggggtattttgacttcaacagattccactgccacttttcaccacgtgactggcaaagactcatcaacaacaactggggattccgacccaagagactcaacttcaagctctttaacattcaagtcaaagaggtcacgcagaatgacggtacgacgacgattgccaataaccttaccagcacggttcaggtgtttactgactcggagtaccagctcccgtacgtcctcggctcggcgcatcaaggatgcctcccgccgtttccagcggacgtcttcatggtcccacagtatggatacctcaccctgaacaacgggagtcaggcggtaggacgctcttccttttactgcctggagtactttccttctcagatgctgcgtaccggaaacaactttaccttcagctacacctttgaggacgtgcccttccacagcagctacgctcacagccagagtttggaccggctgatgaatcctctgatcgaccagtatctgtattatctgaacaggacacaatcaaatagtggaactcttcagcagtctaggctactgtttagccaagctggacccaccagcatgtcccttcaagctaaaaactggctgcctggaccttgctacagacagcagcgtctgtcaaagcaggcaaacgacaacaacaacagcaactttccctggactgcggctacaaagtatcatctaaatggtcgggactcgttggttaatccaggaccagctatggccagccacaaagacgatgaagaaaagtttttccccatgcatggaaccctgatatttggtaaacaaggaacaaatgctaacgacgcggatttggaacatgtcatgattacagatgaagaagaaatcaggaccaccaatcccgtggctacagagcagtacggaaacgtgtcaaataatttgcaaaactcaaatactggtccaactacagaaaatgtcaatcaccagggagcgttacctggtatggtgtggcaggatcgagacgtgtacctgcagggacccatttgggccaagattcctcacaccgacggacactttcacccttctccactgatgggaggttttggactcaaacacccgcctcctcaaatcatgatcaaaaacactcctgttccagccaatcctcctacaaacttcagcgcggcaaagtttgcttccttcatcacacagtattccacgggacaggtcagcgtggagatcgagtgggagctgcagaaggagaacagcaaacgctggaaccccgagatccagtacacttccaactacaacaaatctgttaatgtggactttactgtggacgctaatggtgtgtattcagagcctcgccccattggcaccagatacctgactcgtaatctgtaa

SEQ ID NO: 3613 - DNA, 2208 bp, synthetic construct
  misc_feature 1..2208: note = source = /note="Description of Artificial Sequence: Synthetic polynucleotide"
  source 1..2208: mol_type = other DNA
atggctgccgatggttatcttccagattggctcgaggacactctctctgaaggaataagacagtggtggaagctcaaacctggcccaccaccaccaaggcccgcagagcggcatcaggacgacagcaggggtcttgtgcttcctgggtacaagtacctcggacccttcaacggactcgacaaaggagagccggtcaacgaggcagacgctgcggccctcgagcacgacaaggcctacgaccggcagctcgacagcggagacaacccgtacctcaagtacaaccacgccgacgcggagtttcaggagcgtcttaaagaagatacgtcttttgggggcaacctcggacgagcagtcttccaggcgaaaaagagggttcttgaacctctgggcctggttgaggaacctgttaagacggctccgggaaaaaagaggccggtagagcactctcctgcggagccagactcctcctcgggaaccggaaaagcgggccagcagcctgcaagaaagagattgaatttcggtcagactggagacgcagactccgtacctgacccccagcctctcggacagccaccagcagcccccacaagtttgggatctactacaatggctacaggcagtggcgcaccaatggcagacaataacgagggtgccgatggagtgggtaattcctcaggaaattggcattgcgattcccaatggctgggcgacagagtcatcaccaccagcacccgaacctgggccctgcccacctacaacaaccacctctacaagcaaatctccagccaatcaggagcatcgaacgacaaccactactttggctacagcaccccttgggggtattttgacttcaacagattccactgtcacttctccccacgtgactggcaaagactcatcaacaacaactggggattccgacccaagagactcaacttcaagctctttaacattcaagtcaaagaggtcacgcagaatgacggtacgacgacgattgccaataaccttaccagcacggttcaggtgtttactgactcggagtaccagctcccgtacgtcctcggctcggcgcatcaaggatgcctcccgccgtttccagcggacgtcttcatggtcccacagtatggatacctcaccctgaacaacgggagtcaggcggtaggacgctcttccttttactgcctggagtactttccttctcagatgctgcgtaccggaaacaactttaccttcagctacacctttgaggacgtgcccttccacagcagctacgctcacagccagagtttggaccggctgatgaatcctctgatcgaccagtatctgtattatctgaacaggacacaatcaaatagtggaactcttcagcagtctaggctactgtttagccaagctggacccaccagcatgtcccttcaagctaaaaactggctgcctggaccttgctacagacagcagcgtctgtcaaagcaggcaaacgacaacaacaacagcaactttccctggactgcggctacaaagtatcatctaaatggtcgggactcgttggttaatccaggaccagctatggccagccacaaagacgatgaagaaaagtttttccccatgcatggaaccctgatatttggtaaacaaggaacaaatgctaacgacgcggatttggaacatgtcatgattacagatgaagaagaaatcaggaccaccaatcccgtggctacagagcagtacggaaacgtgtcaaataatttgcaaaactcaaatactggtccaactacagaaaatgtcaatcaccagggagcgttacctggtatggtgtggcaggatcgagacgtgtacctgcagggacccatttgggccaagattcctcacaccgacggacactttcacccttctccactgatgggaggttttggactcaaacacccgcctcctcaaatcatgatcaaaaacactcctgttccagcctatcctcctacaaacttcagcgcggcaaagtttgcttccttcatcacacagtattccacgagacaggtcagcgtggagatcgagtgggagctgcagaaggagaacagcaaacgctggaaccccgagatccagtacacttccaactacaacaaatctgttaatgtggactttactgtggacgctaatggtgtgtattcagagcctcgccccattggcaccagatacctgactcgtaatctgtaa

SEQ ID NO: 3614 - DNA, 2208 bp, synthetic construct
  misc_feature 1..2208: note = source = /note="Description of Artificial Sequence: Synthetic polynucleotide"
  source 1..2208: mol_type = other DNA
atggctgccgatggttatcttccagattggctcgaggacactctctctgaaggaataagacagtggtggaagctcaaacctggcccaccaccaccaaggcccgcagagcggcatcaggacgacagcaggggtcttgtgcttcctgggtacaagtacctcggacccttcaacggactcgacaaaggagagccggtcaacgaggcagacgctgcggccctcgagcacgacaaggcctacgaccggcagctcgacagcggagacaacccgtacctcaagtacaaccacgccgacgcggagtttcaggagcgtcttaaagaagatacgtcttttgggggcaacctcggacgagcagtcttccaggcgaaaaagagggttcttgaacctctgggcctggttgaggaacctgttaagacggctccgggaaaaaagaggccggtagagcactctcctgcggagccagactcctcctcgggaaccggaaaagcgggccagcagcctgcaagaaagagattgaatttcggtcagactggagacgcagactccgtacctgacccccagcctctcggacagccaccagcagcccccacaagtttgggatctactacaatggctacaggcagtggcgcaccaatggcagacaataacgagggtgccgatggagtgggtaattcctcaggaaattggcattgcgattcccaatggctgggcgacagagtcatcaccaccagcacccgaacctgggccctgcccacctacaacaaccacctctacaagcaaatctccagccaatcaggagcatcgaacgacaaccactactttggctacagcaccccttgggggtattttgacttcaacagattccactgtcacttctccccacgtgactggcaaagactcatcaacaacaactggggattccgacccaagagactcaacttcaagctctttaacattcaagtcaaagaggtcacgcagaatgacggtacgacgacgattgccaataaccttaccagcacggttcaggtgtttactgactcggagtaccagctcccgtacgtcctcggctcggcgcatcaaggatgcctcccgccgtttccagcggacgtcttcatggtcccacagtatggatacctcaccctgaacaacgggagtcaggcggtaggacgctcttccttttactgcctggagtactttccttctcagatgctgcgtaccggaaacaactttaccttcagctacacctttgaggacgtgcccttccacagcagctacgctcacagccagagtttggaccggctgatgaatcctctgatcgaccagtatctgtattatctgaacaggacacaatcaaatagtggaactcttcagcagtctaggctactgtttagccaagctggacccaccagcatgtcccttcaagctaaaaactggctgcctggaccttgctacagacagcagcgtctgtcaaagcaggcaaacgacaacaacaacagcaactttccctggactgcggctacaaagtatcatctaaatggccgggactcgttggttaatccaggaccagctatggccagccacaaagacgatgaagaaaagtttttccccatgcatggaaccctgatatttggcaaacaagggacaaatgctaacgacgcggatttggacaatgtcatgattacagatgaagaagaaatccgtaccaccaatcccgtggctacggagcagtacgggactgtgtcaaataatttgcaaaactcaaatactggtccaactactggaactgtcaatcaccaaggagcgttacctggtatggtgtggcaggatcgagacgtgtaccttcagggacccatttgggccaagattcctcacaccgatggacactttcacccttctccgctgatgggaggttttggactcaaacacccgcctcctcagatcatgatcaaaaacactcccgttccagccaatcctcccacaaacttcagttctgccaagtttgcttctttcatcacacagtattccacgggacaggttagcgtggagatcgagtgggagctgcagaaggagaacagcaaacgctggaaccccgagatccagtacacttccaactacaacaagtctgttaatgtggactttactgtggacactaatggtgtgtattcagagcctcgccccattggcaccagatacctgactcgtaatctgtaa

SEQ ID NO: 3615 - DNA, 2208 bp, synthetic construct
  misc_feature 1..2208: note = source = /note="Description of Artificial Sequence: Synthetic polynucleotide"
  source 1..2208: mol_type = other DNA
atggctgccgatggttatcttccagattggctcgaggacattctctctgaaggaataagacagtggtggaagctcaaacctggcccaccaccaccaaagcccgcagagcggcataaggacgacagcaggggtcttgtgcttcctgggtacaagtacctcggacccttcaacggactcgacaaaggagagccggtcaacgaggcagacgccgcggccctcgagcacgacaaggcctacgaccggcagctcgacagcggagacaacccgtacctcaagtacaaccacgccgacgcggagtttcaggagcgtcttaaagaagatacgtcttttgggggcaacctcggacgagcagtcttccaggcaaaaaagagggttcttgaacctctgggcctggttgaggaacctgttaagacggctccgggaaaaaagaggccggtagagcaatctcctgcggagccagactcctcctcgggaaccggaaaggcgggcaaccagcctgcaagaaagagattgaattttggtcagactggagacgcagactccgtacctgacccccagcctctcggacagccaccagcagccccctctggtctgggatctactacaatggctacaggcagtggcgcaccaatggcagacaataacgagggtgccgatggagtgggtaattcctcaggaaattggcattgcgattcccaatggttgggcgacagagtcatcaccaccagcacccgaacctgggccctgcccacctacaacaatcacctctacaagcaaatctccagccaatcaggagcagcgaacgacaaccactactttggctacagcaccccctgggggtattttgacttcaacagattccactgccacttttcaccacgtgactggcaaagactcatcaacaacaactggggattccgacccaaaagactcaacttcaagctctttaacattcaagtcaaagaggtcacgcagaatgacggtacgacgacgattgccaataaccttaccagcacggttcaggtgtttactgactcggagtaccagctcccgtacgtcctcggctcggcgcatcaaggatgcctcccgccgtttccagcggacgtcttcatggtcccacagtatggatacctcaccctgaacaacgggagtcaggcggtaggacgctcttccttttactgcctggagtactttccttctcagatgcttcgtaccggaaacaactttaccttcagttacacctttgaagacgttcctttccacagcagctacgctcacagtcaaagtctggaccggctgatgaatcctctgatagaccagtacctgtattatctaaacaaaacacaatcaaatagtggaactcttcagcagtctcggctactgtttagtcaagctggacccaccagcatgtctcttcaagctaaaaactggctgcctggaccttgctacagacaacagcgtctgtcaaagcaggcaaacgacaacaacaacagcaactttccctggactgcggctacaaagtatcatctaaatggccgggactcgttggttaatccaggaccagctatggccagccacaaagacgatgaagaaaagtttttccccatgcatggaaccctgatatttggtaaacaaggaacaaatgctaacgacgcggatttggacaatgtcatgattacagatgaagaagaaatccgcaccaccaatcccgtggctacggagcagtacgggactgtgtcaaataatttgcaaaactcaaatactggtccaactactggaactgtcaatcaccaaggagcgttacctggtatggtgtggcaggatcgagacgtgtaccttcagggacccatttgggccaagattcctcacaccgatggacactttcatccttctccactgatgggaggttttggactcaaacacccgcctcctcagatcatgatcaaaaacactcccgttccagccaatcctcctacaaacttcagttctgccaagtttgcttctttcatcacacagtattccacggggcaggtcagcgtggagatagagtgggagctgcagaaggagaacagcaaacgctggaaccccgagatccagtatacttccaactacaacaagtctgttaatgtggactttactgtggacactaatggtgtgtattcagagcctcgccccattggcaccagatacctgactcgtaatctgtaa

SEQ ID NO: 3616 - DNA, 2208 bp, synthetic construct
  misc_feature 1..2208: note = source = /note="Description of Artificial Sequence: Synthetic polynucleotide"
  source 1..2208: mol_type = other DNA
atggctgccgatggttatcttccagattggctcgaggacactctctctgaaggaataagacagtggtggaagctcaaacctggcccaccaccaccaaggcccgcagagcggcatcaggacgacagcaggggtcttgtgcttcctgggtacaagtacctcggacccttcaacggactcgacaaaggagagccggtcaacgaggcagacgctgcggccctcgagcacgacaaggcctacgaccggcagctcgacagcggagacaacccgtacctcaagtacaaccacgccggcgcggagtttcaggagcgccttaaagaagatacgtcttttgggggcaacctcggacgagcagtattccaggcgaaaaagagggttcttgaacctctgggcctggttgaggagcctgttaagacggccccgggaaaaaagaggccggtagagcactctcctgtggagccagactcctcctcgggaaccggaaaagcgggccagcagcctgcgaggaagagattgaattttggtcagactggagacgcagactccgtacctgacccccagcctctcggacagccaccagcagcccccacaagtttgggatctactacaatggctacaggcagtggcgcaccaatggcagacaataacgagggtgccgatggagtgggtaattcctcagggaattggcattgcgattcccaatggttgggcgacagagtcatcaccaccagcacccgaacctgggccctgcccacctacaacaaccacctctacaagcaaatctccagccaatcaggagcagcgaacgacaaccactactttggctacagcaccccctgggggtattttgacttcaacagattccactgccacttttcaccacgtgactggcaaagactcatcaacaacaactggggattccgacccaagagactcaacttcaagctctttaacattcaagtcaaagaggtcacgcagaatgacggtacgacgacgattgccaataaccttaccagcacggttccggtgtttactgactcggagtaccagctcccgtacgtcctcggctcggcgcatcaaggatgcctcccgccgtttccagcggacgtcttcatggtcccacagtatggatacctcaccctgaacaacgggagtcaggcggtaggacgctcttccttttactgcctggagtactttccttctcagatgcttcgtaccggaaacaactttaccttcagttacacctttgaagacgttcctttccacagcagctacgctcacagtcaaagtctggaccggctgatgaatcctcttatcgaccagtacctgtattatctaaacaaaacacaatcaaatagtggaactcttcagcagtctcggctactgtttagtcaagctggacctaccagcatgtctcttcaagctaaaaactggctgcctggaccttgctacagacaacagcgtctgtcaaagcaggcaaacgacaacaacaacagcaactttccctggactgcggctacaaagtatcatctaaatggccgggactcgttggttaatccaggaccagctatggccagccacaaagacgatgaagaaaagtttttccccatgcatggaaccctgatatttggcaaacaagggacaaatgctaacgacgcggatttggacaatgtcatgattacagatgaagaagaaatccgtaccaccaatcccgtggctacggagcagtacgggactgtgtcaaataatttgcaaaactcaaatactggtccaactactggaactgtcaatcaccaaggagcgttacctggtatggtgtggcaggatcgagacgtgtaccttcagggacccatttgggccaagattcctcacaccgatggacactttcacccttctccgctgatgggaggttttggactcaaacacccgcctcctcagatcatgatcaaaaacactcccgttccagccaatcctcccacaaacttcagttctgccaagtttgcttctttcatcacacagtattccacgggacaggttagcgtggagatcgagtgggagctgcagaaggagaacagcaaacgctggaaccccgagatccagtacacttccaactacaacaagtctgttaatgtggactttactgtggacactaatggtgtgtattcagagcctcgccccattggcaccagatacctgactcgtaatctgtaa

SEQ ID NO: 3617 - DNA, 2205 bp, synthetic construct
  misc_feature 1..2205: note = source = /note="Description of Artificial Sequence: Synthetic polynucleotide"
  source 1..2205: mol_type = other DNA
atggctgccgatggttatcttccagattggctcgaggacactctctctgaaggaataagacagtggtggaagctcaaacctggcccaccaccaaggcccgcagagcggcatcaggacgacagcaggggtcttgtgcttcctgggtacaagtacctcggacccttcaacggactcgacaaaggagagccggtcaacgaggcagacgctgcggccctcgagcacgacaaggcctacgaccggcagctcgacagcggagacaacccgtacctcaagtacaaccacgccgacgcggagtttcaggagcgtcttaaagaagatacgtcttttgggggcaacctcggacgagcagtcttccaggcgaaaaagagggttcttgaacctctgggcctggttgaggaacctgttaagacggctccgggaaaaaagaggccggtagagcactctcctgcggagccagactcctcctcgggaaccggaaaagcgggccagcagcctgcaagaaagagattgaatttcggtcagactggagacgcagactccgtacctgacccccagcctctcggacagccaccagcagcccccacaagtttgggatctactacaatggctacaggcagtggcgcaccaatggcagacaataacgagggtgccgatggagtgggtaattcctcaggaaattggcattgcgattcccaatggctgggcgacagagtcatcaccaccagcacccgaacctgggccctgcccacctacaacaaccacctctacaagcaaatctccagccaatcaggagcatcgaacgacaaccactactttggctacagcaccccttgggggtattttgacttcaacagattccactgtcacttctccccacgtgactggcaaagactcatcaacaacaactggggattccgacccaagagactcaacttcaagctctttaacattcaagtcaaagaggtcacgcagaatgacggtacgacgacgattgccaataaccttaccagcacggttcaggtgtttactgactcggagtaccagctcccgtacgtcctcggctcggcgcatcaaggatgcctcccgccgtttccagcggacgtcttcatggtcccacagtatggatacctcaccctgaacaacgggagtcaggcggtaggacgctcttccttttactgcctggagtactttccttctcagatgctgcgtaccggaaacaactttaccttcagctacacctttgaggacgtgcccttccacagcagctacgctcacagccagagtttggaccggctgatgaatcctctgatcgaccagtatctgtattatctgaacaggacacaatcaaatagtggaactcttcagcagtctaggctactgtttagccaagctggacccaccagcatgtcccttcaagctaaaaactggctgcctggaccttgctacagacagcagcgtctgtcaaagcaggcaaacgacaacaacaacagcaactttccctggactgcggctacaaagtatcatctaaatggtcgggactcgttggttaatccaggaccagctatggccagccacaaagacgatgaagaaaagtttttccccatgcatggaaccctgatatttggtaaacaaggaacaaatgctaacgacgcggatttggaacatgtcatgattacagatgaagaagaaatcaggaccaccaatcccgtggctacagagcagtacggaaacgtgtcaaataatttgcaaaactcaaatactggtccaactacagaaaatgtcaatcaccagggagcgttacctggtatggtgtggcaggatcgagacgtgtacctgcagggacccatttgggccaagattcctcacaccgacggacactttcacccttctccactgatgggaggttttggactcaaacacccgcctcctcaaatcatgatcaaaaacactcctgttccagccaatcctcctacaaacttcagcgcggcaaagtttgcttccttcatcacacagtattccacgggacaggtcagcgtggagatcgagtgggagctgcagaaggagaacagcaaacgctggaaccccgagatccagtacacttccaactacaacaaatctgttaatgtggactttactgtggacgctaatggtgtgtattcagagcctcgccccattggcaccagatacctgactcgtaatctgtaa

SEQ ID NO: 3618 - DNA, 2208 bp, synthetic construct
  misc_feature 1..2208: note = source = /note="Description of Artificial Sequence: Synthetic polynucleotide"
  source 1..2208: mol_type = other DNA
atggctgccgatggttatcttccagattggctcgaggacactctctctgaaggaataagacagtggtggaagctcaaacctggcccaccaccaccaaagcccgcagagcggcatcaggacgacagcaggggtcttgtgcttcccgggcacaagtacctcggacccttcaacggactcgacaaaggagagccggtcaacgaggcagacgctgcggccctcgagcacgacaaggcctacgaccggcagctcgacagcggagacaacccgtacctcaagtacaaccacgccgacgcggagtttcaggagcgtcttaaagaagatacgtcttttgggggcaacctcggacgagcagtcttccaggcgaaaaagagggttcttgaacctctgggcctggttgaggaacctgttaagacggctccgggaaaaaagaggccggtagagcactctcctgcggagccagactcctcctcgggaaccggaaaagcgggccagcagcctgcaagaaagagattgaatttcggtcagactggagacgcagactccgtacctgacccccagcctctcggacagccaccagcagcccccacaagtttgggatctactacaatggctacaggcagtggcgcaccaatggcagacaataacgagggtgccgatggagtgggtaattcctcaggaaattggcattgcgattcccaatggctgggcgacagagtcatcaccaccagcacccgaacctgggccctgcccacctacaacaaccacctctacaagcaaatctccagccaatcaggagcatcgaacgacaaccactactttggctacagcaccccttgggggtattttgacttcaacagattccactgtcacttctccccacgtgactggcaaagactcatcaacaacaactggggattccgacccaagagactcaacttcaagctctttaacattcaagtcaaagaggtcacgcagaatgacggtacgacgacgattgccaataaccttaccagcacggttcaggtgtttactgactcggagtaccagctcccgtacgtcctcggctcggcgcatcaaggatgcctcccgccgtttccagcggacgtcttcatggtcccacagtatggatacctcaccctgaacaacgggagtcaggcggtaggacgctcttccttttactgcctggagtactttccttctcagatgctgcgtaccggaaacaactttaccttcagctacacctttgaggacgtgcccttccacagcagctacgctcacagccagagtttggaccggctgatgaatcctctgatcgaccagtatctgtattatctgaacaggacacaatcaaatagtggaactcttcagcagtctaggctactgtttagccaagctggacccaccagcatgtcccttcaagctaaaaactggctgcctggaccttgctacagacagcagcgtctgtcaaagcaggcaaacgacaacaacaacagcaactttccctggactgcggctacaaagtatcatctaaatggtcgggactcgttggttaatccaggaccagctatggccagccacaaagacgatgaagaaaagtttttccccatgcatggaaccctgatatttggtaaacaaggaacaaatgctaacgacgcggatttggaacatgtcatgattacagatgaagaagaaatcaggaccaccaatcccgtggctacagagcagtacggaaacgtgtcaaataatttgcaaaactcaaatactggtccaactacagaaaatgtcaatcaccagggagcgttacctggtatggtgtggcaggatcgagacgtgtacctgcagggacccatttgggccaagattcctcacaccgacggacactttcacccttctccactgatgggaggttttggactcaaacacccgcctcctcaaatcatgatcaaaaacactcctgttccagccaatcctcctacaaacttcagcgcggcaaagtttgcttccttcatcacacagtattccacgggacaggtcagcgtggagatcgagtgggagctgcagaaggagaacagcaaacgctggaaccccgagatccagtacacttccaactacaacaaatctgttaatgtggactttactgtagacactaatggtgtgtattcagagcctcgccccattggcaccagatacctgactcgtaatctgtaa

SEQ ID NO: 3619 - DNA, 2208 bp, synthetic construct
  misc_feature 1..2208: note = source = /note="Description of Artificial Sequence: Synthetic polynucleotide"
  source 1..2208: mol_type = other DNA
atggctgccgatggttatcttccagattggctcgaggacactctctctgaaggaataagacagtggtggaagctcaaacctggcccaccaccaccaaggcccgcagagcggcatcaggacgacagcaggggtcttgtgcttcctgggtacaagtacctcggacccttcaacggactcgacaaaggagagccggtcaacgaggcagacgctgcggccctcgagcacgacaaggcctacgaccggcagctcgacagcggagacaacccgtacctcaagtacaaccacgccgacgcggagtttcaggagcgtcttaaagaagatacgtcttttgggggcaacctcggacgagcagtcttccaggcgaaaaagagggttcttgaacctctgggcctggttgaggaacctgttaagacggctccgggaaaaaagaggccggtagagcactctcctgcggagccagactcctcctcgggaaccggaaaagcgggccagcagcctgcaagaaagagattgaatttcggtcagactggagacgcagactccgtacctgacccccagcctctcggacagccaccagcagcccccacaagtttgggatctactacaatggctacaggcagtggcgcaccaatggcagacaataacgagggtgccgatggagtgggtaattcctcaggaaattggcattgcgattcccaatggctgggcgacagagtcatcaccaccagcacccgaacctgggccctgcccacctacaacaaccacctctacaagcaaatctccagccaatcaggagcatcgaacgacaaccactactttggctacagcaccccttgggggtattttgacttcaacagattccactgtcacttctccccacgtgactggcaaagactcatcaacaacaactggggattccgacccaagagactcaacttcaagctctttaacattcaagtcaaagaggtcacgcagaatgacggtacgacgacgattgccaataaccttaccagcacggttcaggtgtttactgactcggagtaccagctcccgtacgtcctcggctcggcgcatcaaggatgcctcccgccgtttccagcggacgtcttcatggtcccacagtatggatacctcaccctgaacaacgggagtcaggcggtaggacactcttcctcttactgcctggagtactttccttctcagatgctgcgtaccggaaacaactttaccttcagctacacctttgaggacgtgcctttccacagcagctacgctcacagccagagtttggaccggctgatgaatcctctgatcgaccagtatctgtattatctgaacaggacacaatcaaatagtggaactcttcagcagtctaggctactgtttagccaagctggacccaccagcatgtctcttcaagctaaaaactggctgcctggaccttgctacagacagcagcgtctgtcaaagcaggcaaacgacaacaacaacagcaactttccctggactgcggctacaaagtatcatctaaatggtcgggactcgttggttaatccaggaccagctatggccagccacaaagacgatgaagaaaagtttttccccatgcatggaaccctgatatttggtaaacaaggaacaaatgctaacgacgcggatttggaacatgtcatgattacagatgaagaagaaatcaggaccaccaatcccgtggctacagagcagtacggaaacgtgtcaaataatttgcaaaactcaaatactggtccaactacagaaaatgtcaatcaccagggagcgttacctggtatggtgtggcaggatcgagacgtgtacctgcagggacccatttgggccaagattcctcacaccgacggacactttcacccttctccactgatgggaggttttggactcaaacacccgcctcctcaaatcatgatcaaaaacactcctgttccagccaatcctcctacaaacttcagcgcggcaaagtttgcttccttcatcacacagtattccacgggacaggtcagcgtggagatcgagtgggagctgcagaaggagaacagcaaacgctggaaccccgagatccagtacacttccaactacaacaaatctgttaatgtggactttactgtggacgctaatggtgtgtattcagagcctcgccccattggcaccagatacctgactcgtaatctgtaa

SEQ ID NO: 3620 - DNA, 2208 bp, synthetic construct
  misc_feature 1..2208: note = source = /note="Description of Artificial Sequence: Synthetic polynucleotide"
  source 1..2208: mol_type = other DNA
atggctgccgatggttatcttccagattggctcgaggacactctctctgaaggaataagacagtggtggaagctcaaacctggcccaccaccaccaaggcccgcagagcggcatcaggacgacagcaggggtcttgtgcttcctgggtacaagtacctcggacccttcaacggactcgacaaaggagagccggtcaacgaggcagacgctgcggccctcgagcacgacaaggcctacgaccggcagctcgacagcggagacaacccgtacctcaagtacaaccacgccgacgcggagtttcaggagcgtcttaaagaagatacgtcttttgggggcaacctcggacgagcagtcttccaggcgaaaaagagggttcttgaacctctgggcctggttgaggaacctgttaagacggctccgggaaaaaagaggccggtagagcactctcctgcggagccagactcctcctcgggaaccggaaaagcgggccagcagcctgcaagaaagagattgaatttcggtcagactggagacgcagactccgtacctgacccccagcctctcggacagccaccagcagcccccacaagtttgggatctactacaatggctacaggcagtggcgcaccaatggcagacaataacgagggtgccgatggagtgggtaattcctcaggaaattggcattgcgattcccaatggctgggcgacagggtcatcaccaccagcacccgaacccgggccctgcccacctacaacaaccacctctacaagcaaatctccagccaatcaggagcatcgaacgacaaccactactttggctacagcaccccttgggggtattttgacttcaacagattccactgtcacttctccccacgtgactggcaaagactcaccaacaacaactggggattccgacccaagagactcaacttcaagctctttaacattcaagtcaaagaggtcacgcagaatgacggtacgacgacgattgccaataaccttaccagcacggttcaggtgtttactgactcggagtaccagctcccgtacgtcctcggctcggcgcatcaaggatgcctcccgccgtttccagcggacgtcttcatggtcccacagtatggatacctcaccctgaacaacgggagtcaggcggtaggacgctcttccttttactgcctggagtactttccttctcagatgctgcgtaccggaaacaactttaccttcagctacacctttgaggacgtgcccttccacagcagctacgctcacagccagagtttggaccggctgatgaatcctctgatcgaccagtatctgtattatctgaacaggacacaatcaaatagtggaactcttcagcagtctaggctactgtttagccaagctggacccaccagcatgtcccttcaagctaaaaactggctgcctggaccttgctacagacagcagcgtctgtcaaagcaggcaaacgacaacaacaacagcaactttccctggactgcggctacaaagtatcatctaaatggtcgggactcgttggttaatccaggaccagctatggccagccacaaagacgatgaagaaaagtttttccccatgcatggaaccctgatatttggtaaacaaggaacaaatgctaacgacgcggatttggaacatgtcatgattacagatgaagaagaaatcaggaccaccaatcccgtggctacagagcagtacggaaacgtgtcaaataatttgcaaaactcaaatactggtccaactacagaaaatgtcaatcaccagggagcgttacctggtatggtgtggcaggatcgagacgtgtacctgcagggacccatttgggccaagattcctcacaccgacggacactttcacccttctccactgatgggaggttttggactcaaacacccgcctcctcaaatcatgatcaaaaacactcctgttccagccaatcctcctacaaacttcagcgcggcaaagtttgcttccttcatcacacagtattccacgggacaggtcagcgtggagatcgagtgggagctgcagaaggagaacagcaaacgctggaaccccgagatccagtacacttccaactacaacaaatctgttaatgtggactttactgtggacgctaatggtgtgtattcagagcctcgccccattggcaccagatacctgactcgtaatctgtaa

SEQ ID NO: 3621 - DNA, 2208 bp, synthetic construct
  misc_feature 1..2208: note = source = /note="Description of Artificial Sequence: Synthetic polynucleotide"
  source 1..2208: mol_type = other DNA
atggctgccgatggttatcttccagattggctcgaggacactctctctgaaggaataagacagtggtggaagctcaaacctggcccaccaccgccaaagcccgcagagcggcataaggacgacagcaggggtcttgtgcttcctgggtacaagtacctcggacccttcaacggactcgacaaaggagagccggtcaacgaggcagacgccgcggccctcgagcacgacaaggcctacgaccggcagctcgacagcggagacaacccgtacctcaagtacaaccacgccgacgcggagtttcaggagcgccttaaagaagatacgtcttttgggggcaacctcgcaagagcagtattccaggcgaaaaagagggttcttgaacctctgggcctggttgaggagcctgttaagacggctccgggaaaaaagaggccggtagagcactctcctgcggggccagattcctcctccggaactggaaagtcgggccaacagcctgcaagaaagagattgaattttggtcagactggagacgcagactccgtacctgacccccagcctctcggacagccaccagcagccccctctggtctgggaactaatacgatggcttcaggcagtggcgcaccaatggcagacaataacgagggcgccgacggagtgggtaattcctcgggaaattggcattgcgattccacatggatgggcgacagagtcatcaccaccagcacccgcacctgggctctgcccacctacaacaaccatctgtacaagcaaatttccagccagtctggagcagcgaacgacaaccactactttggctacagcaccccttgggggtattttgacttcaacagattccactgtcacttctccccacgtgactggcaaagactcatcaacaacaactggggattccgacccaagagactcaacttcaagctctttaacattcaagtcaaagaggtcacgcagaatgacggtacgacgacgattgccaataaccttaccagcacggttcaggtgtttactgactcggagtaccagctcccgtacgtcctcggctcggcgcatcaaggatgcctcccgccgtttccagcggacgtcttcatggtcccacagtatggatacctcaccctgaacaacgggagtcaggcggtaggacgctcttccttttactgcctggagtactttccttctcagatgctgcgtaccggaaacaactttaccttcagctacacctttgaggacgtgcccttccacagcagctacgctcacagccagagtttggaccggctgatgaatcctctgatcgaccagtatctgtattatctgaacaggacacaatcaaatagtggaactcttcagcagtctaggctactgtttagccaagctggacccaccagcatgtcccttcaagctaaaaactggctgcctggaccttgctacagacagcagcgtctgtcaaagcaggcaaacgacaacaacaacagcaactttccctggactgcggctacaaagtatcatctaaatggtcgggactcgttggttaatccaggaccagctatggccagccacaaagacgatgaagaaaagtttttccccatgcatggaaccctgatatttggtaaacaaggaacaaatgctaacgacgcggatttggaacatgtcatgattacagatgaagaagaaatcaggaccaccaatcccgtggctacagagcagtacggaaacgtgtcaaataatttgcaaaactcaaatactggtccaactacagaaaatgtcaatcaccagggagcgttacctggtatggtgtggcaggatcgagacgtgtacctgcagggacccatttgggccaagattcctcacaccgacggacactttcacccttctccactgatgggaggttttggactcaaacacccgcctcctcaaatcatgatcaaaaacactcctgttccagccaatcctcctacaaacttcagcgcggcaaagtttgcttccttcatcacacagtattccacgggacaggtcagcgtggagatcgagtgggagctgcagaaggagaacagcaaacgctggaaccccgagatccagtacacttccaactacaacaaatctgttaatgtggactttactgtggacgctaatggtgtgtattcagagcctcgccccattggcaccagatacctgactcgtaatctgtaa

SEQ ID NO: 3622 - DNA, 2205 bp, synthetic construct
  misc_feature 1..2205: note = source = /note="Description of Artificial Sequence: Synthetic polynucleotide"
  source 1..2205: mol_type = other DNA
atggctgccgatggttatcttccagattggctcgaggacactctctctgaaggaataagacagtggtggaagctcaaacctggcccaccaccaccaaggcccgcagagcggcatcaggacgacagcaggggtcttgtgcttcctgggtacaagtacctcggacccttcaacggactcgacaaaggagagccggtcaacgaggcagacgctgcggccctcgagcacgacaaggcctacgaccggcagctcgacagcggagacaacccgtacctcaagtacaaccacgccgacgcggagtttcaggagcgtcttaaagaagatacgtcttttgggggcaacctcggacgagcagtcttccaggcgaaaaagagggttcttgaacctctgggcctggttgaggaacctgttaagacggctccgggaaaaaagaggccggtagagcactctcctgcggagccagactcctcctcgggaaccggaaaagcgggccagcagcctgcaagaaagagattgaatttcggtcagactggagacgcagactccgtacctgacccccagcctctcggacagccaccagcagcccccacaagtttgggatctactacaatggctacaggcagtggcgcaccaatggcagacaataacgagggtgccgatggagtgggtaattcctcaggaaattggcattgcgattcccaatggctgggcgacagagtcatcaccaccagcacccgaacctgggccctgcccacctacaacaaccacctctacaagcaaatctccagccaatcaggagcatcgaacgacaaccactactttggctacagcaccccttgggggtattttgacttcaacagattccactgtcacttctccccacgtgactggcaaagactcatcaacaacaactggggattccgacccaagagactcaacttcaagctctttaacattcaagtcaaagaggtcacgcagaatgacggtacgacgacgattgccaataaccttaccagcacggttcaggtgtttactgactcggagtaccagctcccgtacgtcctcggctcggcgcatcaaggatgcctcccgccgtttccagcggacgtcttcatggtcccacagtatggatacctcaccctgaacaacgggagtcaggcggtaggacgctcttccttttactgcctggagtactttccttctcagatgctgcgtaccggaaacaactttaccttcagctacacctttgaggacgtgcccttccacagcagctacgctcacagccagagtttggaccggctgatgaatcctctgatcgaccagtatctgtattatctgaacaggacacaatcaaatagtggaactcttcagcagtctaggctactgtttagccaagctggacccaccagcatgtcccttcaagctaaaaactggctgcctggaccttgctacagacagcagcgtctgtcaaagcaggcaaacgacaacaacagcaactttccctggactgcggctacaaagtatcatctaaatggtcgggactcgttggttaatccaggaccagctatggccagccacaaagacgatgaagaaaagtttttccccatgcatggaaccctgatatttggtaaacaaggaacaaatgctaacgacgcggatttggaacatgtcatgattacagatgaagaagaaatcaggaccaccaatcccgtggctacagagcagtacggaaacgtgtcaaataatttgcaaaactcaaatactggtccaactacagaaaatgtcaatcaccagggagcgttacctggtatggtgtggcaggatcgagacgtgtacctgcagggacccatttgggccaagattcctcacaccgacggacactttcacccttctccactgatgggaggttttggactcaaacacccgcctcctcaaatcatgatcaaaaacactcctgttccagccaatcctcctacaaacttcagcgcggcaaagtttgcttccttcatcacacagtattccacgggacaggtcagcgtggagatcgagtgggagctgcagaaggagaacagcaaacgctggaaccccgagatccagtacacttccaactacaacaaatctgttaatgtggactttactgtggacgctaatggtgtgtattcagagcctcgccccattggcaccagatacctgactcgtaatctgtaa

SEQ ID NO: 3623 - DNA, 2208 bp, synthetic construct
  misc_feature 1..2208: note = source = /note="Description of Artificial Sequence: Synthetic polynucleotide"
  source 1..2208: mol_type = other DNA
atggctgccgatggttatcttccagattggctcgaggacactctctctgaaggaataagacagtggtggaagctcaaacctggcccaccaccgccaaagcccgcagagcggcataaggacgacagcaggggtcttgtgcttcctgggtacaagtacctcggacccttcaacggactcgacaaaggagagccggtcaacgaggcagacgccgcggccctcgagcacgacaaggcctacgaccggcagctcgacagcggagacaacccgtacctcaagtacaaccacgccgacgcggagtttcaggagcgccttaaagaagatacgtcttttgggggcaacctcgcaagagcagtattccaggcgaaaaagagggttcttgaacctctgggcctggttgaggagcctgttaagacggctccgggaaaaaagaggccggtagagcactctcctgcggggccagattcctcctccggaactggaaagtcgggccaacagcctgcaagaaagagattgaattttggtcagactggagacgcagactccgtacctgacccccagcctctcggacagccaccagcagcccccacaagtttgggatctactacaatggctacaggcagtggcgcaccaatggcagacaataacgagggtgccgatggagtgggtaattcctcaggaaattggcattgcgattcccaatggctgggcgacagagtcatcaccaccagcacccgaacctgggccctgcccacctacaacaaccacctctacaagcaaatctccagccaatcaggagcatcgaacgacaaccactactttggctacagcaccccttgggggtattttgacttcaacagattccactgtcacttctccccacgtgactggcaaagactcatcaacaacaactggggattccgacccaagagactcaacttcaagctctttaacattcaagtcaaagaggtcacgcagaatgacggtacgacgacgattgccaataaccttaccagcacggttcaggtgtttactgactcggagtaccagctcccgtacgtcctcggctcggcgcatcaaggatgcctcccgccgtttccagcggacgtcttcatggtcccacagtatggatacctcaccctgaacaacgggagtcaggcggtaggacgctcttccttttactgcctggagtactttccttctcagatgctgcgtaccggaaacaactttaccttcagctacacctttgaggacgtgcccttccacagcagctacgctcacagccagagtttggaccggctgatgaatcctctgatcgaccagtatctgtattatctgaacaggacacaatcaaatagtggaactcttcagcagtctaggctactgtttagccaagctggacccaccagcatgtcccttcaagctaaaaactggctgcctggaccttgctacagacagcagcgtctgtcaaagcaggcaaacgacaacaacaacagcaactttccctggactgcggctacaaagtatcatctaaatggtcgggactcgttggttaatccaggaccagctatggccagccacaaagacgatgaagaaaagtttttccccatgcatggaaccctgatatttggtaaacaaggaacaaatgctaacgacgcggatttggaacatgtcatgattacagatgaagaagaaatcaggaccaccaatcccgtggctacagagcagtacggaaacgtgtcaaataatttgcaaaactcaaatactggtccaactacagaaaatgtcaatcaccagggagcgttacctggtatggtgtggcaggatcgagacgtgtacctgcagggacccatttgggccaagattcctcacaccgacggacactttcacccttctccactgatgggaggttttggactcaaacacccgcctcctcaaatcatgatcaaaaacactcctgttccagccaatcctcctacaaacttcagcgcggcaaagtttgcttccttcatcacacagtattccacgggacaggtcagcgtggagatcgagtgggagctgcagaaggagaacagcaaacgctggaaccccgagatccagtacacttccaactacaacaaatctgttaatgtggactttactgtggacgctaatggtgtgtattcagagcctcgccccattggcaccagatacctgactcgtaatctgtaa

SEQ ID NO: 3624 - DNA, 2208 bp, synthetic construct
  misc_feature 1..2208: note = source = /note="Description of Artificial Sequence: Synthetic polynucleotide"
  source 1..2208: mol_type = other DNA
atggctgccgatggttatcttccagattggctcgaggacactctctctgaaggaataagacagtggtggaagctcaaacctggcccaccaccgccaaagcccgcagggcggcataaggacgacagcaggggtcttgtgcttcctgggtacaagtacctcggacccttcaacggactcgacaagggagagccggtcaacgaggcagacgccgcggccctcgagcacgacaaggcctacgaccggcagctcgacagcggagacaacccgtacctcaagtacaaccacgccggcgcggagtttcaggagcgccttaaagaagatacgtcttttgggggcaacctcggacgagcagtattccaggcgaaaaagagggttcttgaacctctgggcctggttgaggagcctgttaagacggccccgggaaaaaagaggccggtagagcactctcctgtggagccagactcctcctcgggaaccggaaaagcgggccagcagcctgcgaggaagagattgaattttggtcagactggagacgcagactccgtacctgacccccagcctctcggacagccaccagcagcccccacaagtttgggatctactacaatggctacaggcagtggcgcaccaatggcagacaataacgagggtgccgatggagtgggtaattcctcagggaattggcattgcgattcccaatggttgggcgacagagtcatcaccaccagcacccgaacctgggccctgcccacctacaacaaccacctctacaagcaaatctccagccaatcaggagcagcgaacgacaaccactactttggctacagcaccccctgggggtattttgacttcaacagattccactgccacttttcaccacgtgactggcaaagactcatcaacaacaactggggattccgacccaagagactcaacttcaagctctttaacattcaagtcaaagaggtcacgcagaatgacggtacgacgacgattgccaataaccttaccagcacggttccggtgtttactgactcggagtaccagctcccgtacgtcctcggctcggcgcatcaaggatgcctcccgccgtttccagcggacgtcttcatggtcccacagtatggatacctcaccctgaacaacgggagtcaggcggtaggacgctcttccttttactgcctggagtactttccttctcagatgcttcgtaccggaaacaactttaccttcagttacacctttgaagacgttcctttccacagcagctacgctcacagtcaaagtctggaccggctgatgaatcctcttatcgaccagtacctgtattatctaaacaaaacacaatcaaatagtggaactcttcagcagtctcggctactgtttagtcaagctggacctaccagcatgtctcttcaagctaaaaactggctgcctggaccttgctacagacaacagcgtctgtcaaagcaggcaaacgacaacaacaacagcaactttccctggactgcggctacaaagtatcatctaaatggccgggactcgttggttaatccaggaccagctatggccagccacaaagacgatgaagaaaagtttttccccatgcatggaaccctgatatttggtaaacaaggaacaaatgctaacgacgcggatttggaacatgtcatgattacagatgaagaagaaatcaggaccaccaatcccgtggctacagagcagtacggaaacgtgtcaaataatttgcaaaactcaaatactggtccaactacagaaaatgtcaatcaccagggagcgttacctggtatggtgtggcaggatcgagacgtgtacctgcagggacccatttgggccaagattcctcacaccgacggacactttcacccttctccactgatgggaggttttggactcaaacacccgcctcctcaaatcatgatcaaaaacactcctgttccagccaatcctcctacaaacttcagcgcggcaaagtttgcttccttcatcacacagtattccacgggacaggtcagcgtggagatcgagtgggagctgcagaaggagaacagcaaacgctggaaccccgagatccagtacacttccaactacaacaaatctgttaatgtggactttactgtggacgctaatggtgtgtattcagagcctcgccccattggcaccagatacctgactcgtaatctgtaa

SEQ ID NO: 3625 - DNA, 2208 bp, synthetic construct
  misc_feature 1..2208: note = source = /note="Description of Artificial Sequence: Synthetic polynucleotide"
  source 1..2208: mol_type = other DNA
atggctgccgatggttatcttccagattggctcgaggacactctctctgaaggaataagacagtggtggaagctcaaacctggcccaccaccgccaaagcccgcagggcggcataaggacgacagcaggggtcttgtgcttcctgggtacaagtacctcggacccttcaacggactcgacaagggagagccggtcaacgaggcagacgccgcggccctcgagcacgacaaggcctacgaccggcagctcgacagcggagacaacccgtacctcaagtacaaccacgccggcgcggagtttcaggagcgccttaaagaagatacgtcttttgggggcaacctcggacgagcagtattccaggcgaaaaagagggttcttgaacctctgggcctggttgaggagcctgttaagacggccccgggaaaaaagaggccggtagagcactctcctgtggagccagactcctcctcgggaaccggaaaagcgggccagcagcctgcgaggaagagattgaattttggtcagactggagacgcagactccgtacctgacccccagcctctcggacagccaccagcagcccccacaagtttgggatctactacaatggctacaggcagtggcgcaccaatggcagacaataacgagggtgccgatggagtgggtaattcctcagggaattggcattgcgattcccaatggttgggcgacagagtcatcaccaccagcacccgaacctgggccctgcccacctacaacaaccacctctacaagcaaatctccagccaatcaggagcagcgaacgacaaccactactttggctacagcaccccctgggggtattttgacttcaacagattccactgccacttttcaccacgtgactggcaaagactcatcaacaacaactggggattccgacccaagagactcaacttcaagctctttaacattcaagtcaaagaggtcacgcagaatgacggtacgacgacgattgccaataaccttaccagcacggttccggtgtttactgactcggagtaccagctcccgtacgtcctcggctcggcgcatcaaggatgcctcccgccgtttccagcggacgtcttcatggtcccacagtatggatacctcaccctgaacaacgggagtcaggcggtaggacgctcttccttttactgcctggagtactttccttctcagatgcttcgtaccggaaacaactttaccttcagttacacctttgaagacgttcctttccacagcagctacgctcacagtcaaagtctggaccggctgatgaatcctcttatcgaccagtacctgtattatctaaacaaaacacaatcaaatagtggaactcttcagcagtctcggctactgtttagtcaagctggacctaccagcatgtctcttcaagctaaaaactggctgcctggaccttgctacagacaacagcgtctgtcaaagcaggcaaacgacaacaacaacagcaactttccctggactgcggctacaaagtatcatctaaatggccgggactcgttggttaatccaggaccagctatggccagccacaaagacgatgaagaaaagtttttccccatgcatggaaccctgatatttggcaaacaagggacaaatgctaacgacgcggatttggacaatgtcatgattacagatgaagaagaaatccgtaccaccaatcccgtggctacggagcagtacgggactgtgtcaaataatttgcaaaactcaaatactggtccaactactggaactgtcaatcaccaaggagcgttacctggtatggtgtggcaggatcgagacgtgtacctgcagggacccatttgggccaagattcctcacaccgacggacactttcacccttctccactgatgggaggttttggactcaaacacccgcctcctcaaatcatgatcaaaaacactcctgttccagccaatcctcctacaaacttcagcgcggcaaagtttgcttccttcatcacacagtattccacgggacaggtcagcgtggagatcgagtgggagctgcagaaggagaacagcaaacgctggaaccccgagatccagtacacttccaactacaacaaatctgttaatgtggactttactgtggacgctaatggtgtgtattcagagcctcgccccattggcaccagatacctgactcgtaatctgtaa

SEQ ID NO: 3626 - DNA, 2208 bp, synthetic construct
  misc_feature 1..2208: note = source = /note="Description of Artificial Sequence: Synthetic polynucleotide"
  source 1..2208: mol_type = other DNA
atggctgccgatggttatcttccagattggctcgaggacactctctctgaaggaataagacagtggtggaagctcaaacctggcccaccaccaccaaggcccgcagagcggcatcaggacgacagcaggggtcttgtgcttcctgggtacaagtacctcggacccttcaacggactcgacaaaggagagccggtcaacgaggcagacgctgcggccctcgagcacgacaaggcctacgaccggcagctcgacagcggagacaacccgtacctcaagtacaaccacgccgacgcggagtttcaggagcgtcttaaagaagatacgtcttttgggggcaacctcggacgagcagtcttccaggcgaaaaagagggttcttgaacctctgggcctggttgaggaacctgttaagacggctccgggaaaaaagaggccggtagagcactctcctgcggagccagactcctcctcgggaaccggaaaagcgggccagcagcctgcaagaaagagattgaatttcggtcagactggagacgcagactccgtacctgacccccagcctctcggacagccaccagcagcccccacaagtttgggatctactacaatggctacaggcagtggcgcaccaatggcagacaataacgagggtgccgatggagtgggtaattcctcaggaaattggcattgcgattcccaatggctgggcgacagagtcatcaccaccagcacccgaacctgggccctgcccacctacaacaaccacctctacaagcaaatctccagccaatcaggagcatcgaacgacaaccactactttggctacagcaccccttgggggtattttgacttcaacagattccactgtcacttctccccacgtgactggcaaagactcatcaacaacaactggggattccgacccaagagactcaacttcaagctctttaacattcaagtcaaagaggtcacgcagaatgacggtacgacgacgattgccaataaccttaccagcacggttcaggtgtttactgactcggagtaccagctcccgtacgtcctcggctcggcgcatcaaggatgcctcccgccgtttccagcggacgtcttcatggtcccacagtatggatacctcaccctgaacaacgggagtcaggcggtaggacgctcttccttttactgcctggagtactttccttctcagatgctgcgtaccggaaacaactttaccttcagctacacctttgaggacgtgcccttccacagcagctacgctcacagccagagtttggaccggctgatgaatcctctgatcgaccagtatctgtattatctgaacaggacacaatcaaatagtggaactcttcagcagtctaggctactgtttagccaagctggacccaccagcatgtcccttcaagctaaaaactggctgcctggaccttgctacagacagcagcgtctgtcaaagcaggcaaacgacaacaacaacagcaactttccctggactgcggctacaaagtatcatctaaatggtcgggactcgttggttaatccaggaccagctatggccagccacaaagacgatgaagaaaagtttttccccatgcatggaaccctgatatttggtaaacaaggaacaaatgctaacgacgcggatttggaacatgtcatgattacagatgaagaagaaatcaggaccaccaatcccgtggctacagagcagtacggaaacgtgtcaaataatttgcaaaactcaaatactggtccaactacagaaaatgtcaatcaccagggagcgttacctggtatggtgtggcaggatcgagacgtgtacctgcagggacccatttgggccaagattcctcacaccgacggacactttcacccttctccgctgatgggaggttttggactcaaacacccgcctcctcagatcatgatcaaaaacactcccgttccagccaatcctcccacaaacttcagttctgccaagtttgcttctttcatcacacagtattccacgggacaggttagcgtggagatcgagtgggagctgcagaaggagaacagcaaacgctggaaccccgagatccagtacacttccaactacaacaagtctgttaatgtggactttactgtggacactaatggtgtgtattcagagcctcgccccattggcaccagatacctgactcgtaatctgtaa

SEQ ID NO: 3627 - DNA, 2208 bp, synthetic construct
  misc_feature 1..2208: note = source = /note="Description of Artificial Sequence: Synthetic polynucleotide"
  source 1..2208: mol_type = other DNA
atggctgccgatggttatcttccagattggctcgaggacactctctctgaaggaataagacagtggtggaagctcaaacctggcccaccaccaccaaagcccgcagagcggcatcaggacgacagcaggggtcttgtgcttcctgggtacaagtacctcggacccttcaacggactcgacaaaggagagccggtcaacgaggcagacgctgcggccctcgagcacgacaaggcctacgaccggcagctcgacagcggagacaacccgtacctcaagtacaaccacgccgacgcggagtttcaggagcgtcttaaagaagatacgtcttttgggggcaacctcggacgagcagtcttccaggcgaaaaagagggttcttgaacctctgggcctggttgaggaacctgttaagacggctccgggaaaaaagaggccggtagagcactctcctgcggagccagactcctcctcgggaaccggaaaagcgggccagcagcctgcaagaaagagattgaatttcggtcagactggagacgcagactccgtacctgacccccagcctctcggacagccaccagcagcccccacaagtttgggatctactacaatggctacaggcagtggcgcaccaatggcagacaataacgagggtgccgatggagtgggtaattcctcaggaaattggcattgcgattcccaatggctgggcgacagagtcatcaccaccagcacccgaacctgggccctgcccacctacaacaaccacctctacaagcaaatctccagccaatcaggagcagcgaacgacaaccactactttggctacagcaccccctgggggtattttgacttcaacagattccactgccacttttcaccacgtgactggcaaagactcatcaacaacaactggggattccgacccaagagactcaacttcaagctctttaacattcaagtcaaagaggtcacgcagaatgacggtacgacgacgattgccaataaccttaccagcacggttccggtgtttactgactcggagtaccagctcccgtacgtcctcggctcggcgcatcaaggatgcctcccgccgtttccagcggacgtcttcatggtcccacagtatggatacctcaccctgaacaacgggagtcaggcggtaggacgctcttccttttactgcctggagtactttccttctcagatgcttcgtaccggaaacaactttaccttcagttacacctttgaagacgttcctttccacagcagctacgctcacagtcaaagtctggaccggctgatgaatcctcttatcgaccagtacctgtattatctaaacaaaacacaatcaaatagtggaactcttcagcagtctcggctactgtttagtcaagctggacctaccagcatgtctcttcaagctaaaaactggctgcctggaccttgctacagacaacagcgtctgtcaaagcaggcaaacgacaacaacaacagcaactttccctggactgcggctacaaagtatcatctaaatggccgggactcgttggttaatccaggaccagctatggccagccacaaagacgatgaagaaaagtttttccccatgcatggaaccctgatatttggcaaacaagggacaaatgctaacgacgcggatttggacaatgtcatgattacagatgaagaagaaatccgtaccaccaatcccgtggctacggagcagtacgggactgtgtcaaataatttgcaaaactcaaatactggtccaactactggaactgtcaatcaccaaggagcgttacctggtatggtgtggcaggatcgagacgtgtaccttcagggacccatttgggccaagattcctcacaccgatggacactttcacccttctccgctgatgggaggttttggactcaaacacccgcctcctcagatcatgatcaaaaacactcccgttccagccaatcctcccacaaacttcagttctgccaagtttgcttctttcatcacacagtattccacgggacaggttagcgtggagatcgagtgggagctgcagaaggagaacagcaaacgctggaaccccgagatccagtacacttccaactacaacaagtctgttaatgtggactttactgtggacactaatggtgtgtattcagagcctcgccccattggcaccagatacctgactcgtaatctgtaa

SEQ ID NO: 3628 - DNA, 2208 bp, synthetic construct
  misc_feature 1..2208: note = source = /note="Description of Artificial Sequence: Synthetic polynucleotide"
  source 1..2208: mol_type = other DNA
atggctgccgatggttatcttccagattggctcgaggacactctctctgaaggaataagacagtggtggaagctcaaacctggcccaccaccgccaaagcccgcagagcggcataaggacgacagcaggggtcttgtgcttcctgggtacaagtacctcggacccttcaacggactcgacaaaggagagccggtcaacgaggcagacgccgcggccctcgagcacgacaaggcctacgaccggcagctcgacagcggagacaacccgtacctcaagtacaaccacgccgacgcggagtttcaggagcgccttaaagaagatacgtcttttgggggcaacctcgcaagagcagtattccaggcgaaaaagagggttcttgaacctctgggcctggttgaggagcctgttaagacggctccgggaaaaaagaggccggtagagcactctcctgcggggccagattcctcctccggaactggaaagtcgggccaacagcctgcaagaaagagattgaattttggtcagactggagacgcagactccgtacctgacccccagcctctcggacagccaccagcagccccctctggtctgggaactaatacgatggcttcaggcagtggcgcaccaatggcagacaataacgagggcgccgacggagtgggtaattcctcgggaaattggcattgcgattccacatggatgggcgacagagtcatcaccaccagcacccgcacctgggctctgcccacctacaacaaccatctgtacaagcaaatttccagccagtctggagcagcgaacgacaaccactactttggctacagcaccccttgggggtattttgacttcaacagattccactgccacttctccccacgtgactggcaaagactcatcaacaacaattggggattccggcccaaaagactcaacttcgagctctttaacattcaagtcaaggaggtcacgcagaatgacggtacgacgacgattgccaataaccttaccagcacggttcaggtgtttactgactcggagtaccagctcccgtacgtcctcggctcggcgcatcaaggatgcctcccgccgttcccagcagacgtcttcatggtgccacagtatggatacctcaccctgaacaacgggagtcaggcggtaggacgctcttcattttactgcctggagtactttccttctcagatgctgcgtaccggaaacaactttaccttcagctacacctttgaggacgtgcccttccacagcagctacgctcacagccagagtttggaccggctgatgaatcctctgatcgaccagtatctgtattatctgaacaggacacaatcaaatagtggaactcttcagcagtctaggctactgtttagccaagctggacccaccagcatgtcccttcaagctaaaaactggctgcctggaccttgctacagacagcagcgtctgtcaaagcaggcaaacgacaacaacaacagcaactttccctggactgcggctacaaagtatcatctaaatggtcgggactcgttggttaatccaggaccagctatggccagccacaaagacgatgaagaaaagtttttccccatgcatggaaccctgatatttggtaaacaaggaacaaatgctaacgacgcggatttggaacatgtcatgattacagatgaagaagaaatcaggaccaccaatcccgtggctacagagcagtacggaaacgtgtcaaataatttgcaaaactcaaatactggtccaactacagaaaatgtcaatcaccagggagcgttacctggtatggtgtggcaggatcgagacgtgtacctgcagggacccatttgggccaagattcctcacaccgacggacactttcacccttctccactgatgggaggttttggactcaaacacccgcctcctcaaatcatgatcaaaaacactcctgttccagccaatcctcctacaaacttcagcgcggcaaagtttgcttccttcatcacacagtattccacgggacaggtcagcgtggagatcgagtgggagctgcagaaggagaacagcaaacgctggaaccccgagatccagtacacttccaactacaacaaatctgttaatgtggactttactgtggacgctaatggtgtgtattcagagcctcgccccattggcaccagatacctgactcgtaatctgtaa

SEQ ID NO: 3629 - DNA, 2208 bp, synthetic construct
  misc_feature 1..2208: note = source = /note="Description of Artificial Sequence: Synthetic polynucleotide"
  source 1..2208: mol_type = other DNA
atggctgccgatggttatcttccagattggctcgaggacattctctctgaaggaataagacagtggtggaagctcaaacctggcccaccaccaccaaagcccgcagagcggcataaggacgacagcaggggtcttgtgcttcctgggtacaagtacctcggacccttcaacggactcgacaaaggagagccggtcaacgaggcagacgccgcggccctcgagcacgacaaggcctacgaccggcagctcgacagcggagacaacccgtacctcaagtacaaccacgccgacgcggagtttcaggagcgtcttaaagaagatacgtcttttgggggcaacctcggacgagcagtcttccaggcgaaaaagagggttcttgaacctctgggcctggttgaggaacctgttaagacggctccgggaaaaaagaggccggtagagcactctcctgcggagccagactcctcctcgggaaccggaaaagcgggccagcagcctgcaagaaagagattgaatttcggtcagactggagacgcagactccgtacctgacccccagcctctcggacagccaccagcagcccccacaagtttgggatctactacaatggctacaggcagtggcgcaccaatggcagacaataacgagggtgccgatggagtgggtaattcctcaggaaattggcattgcgattcccaatggctgggcgacagagtcatcaccaccagcacccgaacctgggccctgcccacctacaacaaccacctctacaagcaaatctccagccaatcaggagcatcgaacgacaaccactactttggctacagcaccccttgggggtattttgacttcaacagattccactgtcacttctccccacgtgactggcaaagactcatcaacaacaactggggattccgacccaagagactcaacttcaagctctttaacattcaagtcaaagaggtcacgcagaatgacggtacgacgacgattgccaataaccttaccagcacggttcaggtgtttactgactcggagtaccagctcccgtacgtcctcggctcggcgcatcaaggatgcctcccgccgtttccagcggacgtcttcatggtcccacagtatggatacctcaccctgaacaacgggagtcaggcggtaggacgctcttccttttactgcctggagtactttccttctcagatgctgcgtaccggaaacaactttaccttcagctacacctttgaggacgtgcccttccacagcagctacgctcacagccagagtttggaccggctgatgaatcctctgatcgaccagtatctgtattatctgaacaggacacaatcaaatagtggaactcttcagcagtctaggctactgtttagccaagctggacccaccagcatgtcccttcaagctaaaaactggctgcctggaccttgctacagacagcagcgtctgtcaaagcaggcaaacgacaacaacaacagcaactttccctggactgcggctacaaagtatcatctaaatggtcgggactcgttggttaatccaggaccagctatggccagccacaaagacgatgaagaaaagtttttccccatgcatggaaccctgatatttggtaaacaaggaacaaatgctaacgacgcggatttggaacatgtcatgattacagatgaagaagaaatcaggaccaccaatcccgtggctacagagcagtacggaaacgtgtcaaataatttgcaaaactcaaatactggtccaactacagaaaatgtcaatcaccagggagcgttacctggtatggtgtggcaggatcgagacgtgtacctgcagggacccatttgggccaagattcctcacaccgacggacactttcacccttctccactgatgggaggttttggactcaaacacccgcctcctcaaatcatgatcaaaaacactcctgttccagccaatcctcctacaaacttcagcgcggcaaagtttgcttccttcatcacacagtattccacgggacaggtcagcgtggagatcgagtgggagctgcagaaggagaacagcaaacgctggaaccccgagatccagtacacttccaactacaacaaatctgttaatgtggactttactgtggacgctaatggtgtgtattcagagcctcgccccattggcaccagatacctgactcgtaatctgtaa

SEQ ID NO: 3630 - DNA, 2208 bp, synthetic construct
  misc_feature 1..2208: note = source = /note="Description of Artificial Sequence: Synthetic polynucleotide"
  source 1..2208: mol_type = other DNA
atggctgccgatggttatcttccagattggctcgaggacactctctctgaaggaataagacagtggtggaagctcaaacctggcccaccaccaccaaggcccgcagagcggcatcaggacgacagcaggggtcttgtgcttcctgggtacaagtacctcggacccttcaacggactcgacaaaggagagccggtcaacgaggcagacgctgcggccctcgagcacgacaaggcctacgaccggcagctcgacagcggagacaacccgtacctcaagtacaaccacgccgacgcggagtttcaggagcgtcttaaagaagatacgtcttttgggggcaacctcggacgagcagtattccaggcgaaaaagagggttcttgaacctctgggcctggttgaggagcctgttaagacggccccgggaaaaaagaggccggtagagcactctcctgtggagccagactcctcctcgggaaccggaaaagcgggccagcagcctgcgaggaagagattgaattttggtcagactggagacgcagactccgtacctgacccccagcctctcggacagccaccagcagcccccacaagtttgggatctactacaatggctacaggcagtggcgcaccaatggcagacaataacgagggtgccgatggagtgggtaattcctcagggaattggcattgcgattcccaatggttgggcgacagagtcatcaccaccagcacccgaacctgggccctgcccacctacaacaaccacctctacaagcaaatctccagccaatcaggagcagcgaacgacaaccactactttggctacagcaccccctgggggtattttgacttcaacagattccactgccacttttcaccacgtgactggcaaagactcatcaacaacaactggggattccgacccaagagactcaacttcaagctctttaacattcaagtcaaagaggtcacgcagaatgacggtacgacgacgattgccaataaccttaccagcacggttccggtgtttactgactcggagtaccagctcccgtacgtcctcggctcggcgcatcaaggatgcctcccgccgtttccagcggacgtcttcatggtcccacagtatggatacctcaccctgaacaacgggagtcaggcggtaggacgctcttccttttactgcctggagtactttccttctcagatgcttcgtaccggaaacaactttaccttcagttacacctttgaagacgttcctttccacagcagctacgctcacagtcaaagtctggaccggctgatgaatcctcttatcgaccagtacctgtattatctaaacaaaacacaatcaaatagtggaactcttcagcagtctcggctactgtttagtcaagctggacctaccagcatgtctcttcaagctaaaaactggctgcctggaccttgctacagacaacagcgtctgtcaaagcaggcaaacgacaacaacaacagcaactttccctggactgcggctacaaagtatcatctaaatggccgggactcgttggttaatccaggaccagctatggccagccacaaagacgatgaagaaaagtttttccccatgcatggaaccctgatatttggcaaacaagggacaaatgctaacgacgcggatttggacaatgtcatgattacagatgaagaagaaatccgtaccaccaatcccgtggctacggagcagtacgggactgtgtcaaataatttgcaaaactcaaatactggtccaactactggaactgtcaatcaccaaggagcgttacctggtatggtgtggcaggatcgagacgtgtaccttcagggacccatttgggccaagattcctcacaccgatggacactttcacccttctccgctgatgggaggttttggactcaaacacccgcctcctcagatcatgatcaaaaacactcccgttccagccaatcctcccacaaacttcagttctgccaagtttgcttctttcatcacacagtattccacgggacaggttagcgtggagatcgagtgggagctgcagaaggagaacagcaaacgctggaaccccgagatccagtacacttccaactacaacaagtctgttaatgtggactttactgtggacactaatggtgtgtattcagagcctcgccccattggcaccagatacctgactcgtaatctgtaa

SEQ ID NO: 3631 - DNA, 2208 bp, synthetic construct
  misc_feature 1..2208: note = source = /note="Description of Artificial Sequence: Synthetic polynucleotide"
  source 1..2208: mol_type = other DNA
atggctgccgatggttatcttccagattggctcgaggacactctctctgaaggaataagacagtggtggaagctcaaacctggcccaccaccgccaaagcccgcagagcggcataaggacgacagcaggggtcttgtgcttcctgggtacaagtacctcggacccttcaacggactcgacaaaggagagccggtcaacgaggcagacgccgcggccctcgagcacgacaaggcctacgaccggcagctcgacagcggagacaacccgtacctcaagtacaaccacgccgacgcggagtttcaggagcgccttaaagaagatacgtcttttgggggcaacctcgcaagagcagtattccaggcgaaaaagagggttcttgaacctctgggcctggttgaggagcctgttaagacggctccgggaaaaaagaggccggtagagcactctcctgcggagccagattcctcctccggaaccggaaaagcgggccagcagcctgcaagaaagagattgaatttcggtcagactggagacgcagactccgtacctgacccccagcctctcggacagccaccagcagcccccacaagtttgggatctactacaatggctacaggcagtggcgcaccaatggcagacaataacgagggtgccgatggagtgggtaattcctcaggaaattggcattgcgattcccaatggctgggcgacagagtcatcaccaccagcacccgaacctgggccctgcccacctacaacaaccacctctacaagcaaatctccagccaatcaggagcatcgaacgacaaccactactttggctacagcaccccttgggggtattttgacttcaacagattccactgtcacttctccccacgtgactggcaaagactcatcaacaacaactggggattccgacccaagagactcaacttcaagctctttaacattcaagtcaaagaggtcacgcagaatgacggtacgacgacgattgccaataaccttaccagcacggttcaggtgtttactgactcggagtaccagctcccgtacgtcctcggctcggcgcatcaaggatgcctcccgccgtttccagcggacgtcttcatggtcccacagtatggatacctcaccctgaacaacgggagtcaggcggtaggacgctcttccttttactgcctggagtactttccttctcagatgctgcgtaccggaaacaactttaccttcagctacacctttgaggacgtgcccttccacagcagctacgctcacagccagagtttggaccggctgatgaatcctctgatcgaccagtatctgtattatctgaacaggacacaatcaaatagtggaactcttcagcagtctaggctactgtttagccaagctggacccaccagcatgtcccttcaagctaaaaactggctgcctggaccttgctacagacagcagcgtctgtcaaagcaggcaaacgacaacaacaacagcaactttccctggactgcggctacaaagtatcatctaaatggtcgggactcgttggttaatccaggaccagctatggccagccacaaagacgatgaagaaaagtttttccccatgcatggaaccctgatatttggtaaacaaggaacaaatgctaacgacgcggatttggaacatgtcatgattacagatgaagaagaaatcaggaccaccaatcccgtggctacagagcagtacggaaacgtgtcaaataatttgcaaaactcaaatactggtccaactacagaaaatgtcaatcaccagggagcgttacctggtatggtgtggcaggatcgagacgtgtacctgcagggacccatttgggccaagattcctcacaccgacggacactttcacccttctccactgatgggaggttttggactcaaacacccgcctcctcaaatcatgatcaaaaacactcctgttccagccaatcctcctacaaacttcagcgcggcaaagtttgcttccttcatcacacagtattccacgggacaggtcagcgtggagatcgagtgggagctgcagaaggagaacagcaaacgctggaaccccgagatccagtacacttccaactacaacaaatctgttaatgtggactttactgtggacgctaatggtgtgtattcagagcctcgccccattggcaccagatacctgactcgtaatctgtaa

SEQ ID NO: 3632 - DNA, 2208 bp, synthetic construct
  misc_feature 1..2208: note = source = /note="Description of Artificial Sequence: Synthetic polynucleotide"
  source 1..2208: mol_type = other DNA
atggctgccgatggttatcttccagattggctcgaggacactctctctgaaggaataagacagtggtggaagctcaaacctggcccaccaccaccaaggcccgcagagcggcatcaggacgacagcaggggtcttgtgcttcctgggtacaagtacctcggacccttcaacggactcgacaaaggagagccggtcaacgaggcagacgctgcggccctcgagcacgacaaggcctacgaccggcagctcgacagcggagacaacccgtacctcaagtacaaccacgccgacgcggagtttcaggagcgtcttaaagaagatacgtcttttgggggcaacctcggacgagcagtcttccaggcgaaaaagagggttcttgaacctctgggcctggttgaggaacctgttaagacggctccgggaaaaaagaggccggtagagcactctcctgcggagccagactcctcctcgggaaccggaaaagcgggccagcagcctgcaagaaagagattgaatttcggtcagactggagacgcagactccgtacctgacccccagcctctcggacagccaccagcagcccccacaagtttgggatctactacaatggctacaggcagtggcgcaccaatggcagacaataacgagggtgccgatggagtgggtaattcctcagggaattggcattgcgattcccaatggttgggcgacagagtcatcaccaccagcacccgaacctgggccctgcccacctacaacaaccacctctacaagcaaatctccagccaatcaggagcagcgaacgacaaccactactttggctacagcaccccctgggggtattttgacttcaacagattccactgccacttttcaccacgtgactggcaaagactcatcaacaacaactggggattccgacccaagagactcaacttcaagctctttaacattcaagtcaaagaggtcacgcagaatgacggtacgacgacgattgccaataaccttaccagcacggttccggtgtttactgactcggagtaccagctcccgtacgtcctcggctcggcgcatcaaggatgcctcccgccgtttccagcggacgtcttcatggtcccacagtatggatacctcaccctgaacaacgggagtcaggcggtaggacgctcttccttttactgcctggagtactttccttctcagatgcttcgtaccggaaacaactttaccttcagttacacctttgaagacgttcctttccacagcagctacgctcacagtcaaagtctggaccggctgatgaatcctcttatcgaccagtacctgtattatctaaacaaaacacaatcaaatagtggaactcttcagcagtctcggctactgtttagtcaagctggacctaccagcatgtctcttcaagctaaaaactggctgcctggaccttgctacagacaacagcgtctgtcaaagcaggcaaacgacaacaacaacagcaactttccctggactgcggctacaaagtatcatctaaatggccgggactcgttggttaatccaggaccagctatggccagccacaaagacgatgaagaaaagtttttccccatgcatggaaccctgatatttggcaaacaagggacaaatgctaacgacgcggatttggacaatgtcatgattacagatgaagaagaaatccgtaccaccaatcccgtggctacggagcagtacgggactgtgtcaaataatttgcaaaactcaaatactggtccaactactggaactgtcaatcaccaaggagcgttacctggtatggtgtggcaggatcgagacgtgtaccttcagggacccatttgggccaagattcctcacaccgatggacactttcacccttctccgctgatgggaggttttggactcaaacacccgcctcctcagatcatgatcaaaaacactcccgttccagccaatcctcccacaaacttcagttctgccaagtttgcttctttcatcacacagtattccacgggacaggttagcgtggagatcgagtgggagctgcagaaggagaacagcaaacgctggaaccccgagatccagtacacttccaactacaacaagtctgttaatgtggactttactgtggacactaatggtgtgtattcagagcctcgccccattggcaccagatacctgactcgtaatctgtaa

SEQ ID NO: 3633 - DNA, 2208 bp, synthetic construct
  misc_feature 1..2208: note = source = /note="Description of Artificial Sequence: Synthetic polynucleotide"
  source 1..2208: mol_type = other DNA
atggctgccgatggttatcttccagattggctcgaggacactctctctgaaggaataagacagtggtggaagctcaaacctggcccaccaccgccaaagcccgcagggcggcataaggacgacagcaggggtcttgtgcttcctgggtacaagtacctcggacccttcaacggactcgacaagggagagccggtcaacgaggcagacgccgcggccctcgagcacgacaaggcctacgaccggcagctcgacagcggagacaacccgtacctcaagtacaaccacgccggcgcggagtttcaggagcgccttaaagaagatacgtcttttgggggcaacctcggacgagcagtattccaggcgaaaaagagggttcttgaacctctgggcctggttgaggagcctgttaagacggctccgggaaaaaagaggccggtagagcactctcctgtggagccagactcctcctcgggaaccggaaaagcgggccagcagcctgcgaggaagagattgaattttggtcagactggagacgcagactccgtacctgacccccagcctctcggacagccaccagcagcccccacaagtttgggatctactacaatggctacaggcagtggcgcaccaatggcagacaataacgagggtgccgatggagtgggtaattcctcagggaattggcattgcgattcccaatggttgggcgacagagtcatcaccaccagcacccgaacctgggccctgcccacctacaacaaccacctctacaagcaaatctccagccaatcaggagcagcgaacgacaaccactactttggctacagcaccccctgggggtattttgacttcaacagattccactgccacttttcaccacgtgactggcaaagactcatcaacaacaactggggattccgacccaagagactcaacttcaagctctttaacattcaagtcaaagaggtcacgcagaatgacggtacgacgacgattgccaataaccttaccagcacggttccggtgtttactgactcggagtaccagctcccgtacgtcctcggctcggcgcatcaaggatgcctcccgccgtttccagcggacgtcttcatggtcccacagtatggatacctcaccctgaacaacgggagtcaggcggtaggacgctcttccttttactgcctggagtactttccttctcagatgcttcgtaccggaaacaactttaccttcagttacacctttgaagacgttcctttccacagcagctacgctcacagtcaaagtctggaccggctgatgaatcctcttatcgaccagtacctgtattatctaaacaaaacacaatcaaatagtggaactcttcagcagtctcggctactgtttagtcaagctggacctaccagcatgtctcttcaagctaaaaactggctgcctggaccttgctacagacaacagcgtctgtcaaagcaggcaaacgacaacaacaacagcaactttccctggactgcggctacaaagtatcatctaaatggccgggactcgttggttaatccaggaccagctatggccagccacaaagacgatgaagaaaagtttttccccatgcatggaaccctgatatttggcaaacaagggacaaatgctaacgacgcggatttggacaatgtcatgattacagatgaagaagaaatccgtaccaccaatcccgtggctacggagcagtacgggactgtgtcaaataatttgcaaaactcaaatactggtccaactactggaactgtcaatcaccaaggagcgttacctggtatggtgtggcaggatcgagacgtgtaccttcagggacccatttgggccaagattcctcacaccgatggacactttcacccttctccgctgatgggaggttttggactcaaacacccgcctcctcagatcatgatcaaaaacactcccgttccagccaatcctcccacaaacttcagttctgccaagtttgcttctttcatcacacagtattccacgggacaggttagcgtggagatcgagtgggagctgcagaaggagaacagcaaacgctggaaccccgagatccagtacacttccaactacaacaagtctgttaatgtggactttactgtggacactaatggtgtgtattcagagcctcgccccattggcaccagatacctgactcgtaatctgtaa

SEQ ID NO: 3634 - DNA, 2208 bp, synthetic construct
  misc_feature 1..2208: note = source = /note="Description of Artificial Sequence: Synthetic polynucleotide"
  source 1..2208: mol_type = other DNA
atggctgccgatggttatcttccagattggctcgaggacactctctctgaaggaataagacagtggtggaagctcaaacctggcccaccaccaccaaggcccgcagagcggcatcaggacgacagcaggggtcttgtgcttcctgggtacaagtacctcggacccttcaacggactcgacaaaggagagccggtcaacgaggcagacgctgcggccctcgagcacgacaaggcctacgaccggcagctcgacagcggagacaacccgtacctcaagtacaaccacgccgacgcggagtttcaggagcgtcttaaagaagatacgtcttttgggggcaacctcggacgagcagtcttccaggcgaaaaagagggttcttgaacctctgggcctggttgaggaacctgttaagacggctccgggaaaaaagaggccggtagagcactctcctgcggagccagactcctcctcgggaaccggaaaagcgggccagcagcctgcaagaaagagattgaatttcggtcagactggagacgcagactccgtacctgacccccagcctctcggacagccaccagcagcccccacaagtttgggatctactacaatggctacaggcagtggcgcaccaatggcagacaataacgagggtgccgatggagtgggtaattcctcaggaaattggcattgcgattcccaatggctgggcgacagagtcatcaccaccagcacccgaacctgggccctgcccacctacaacaaccacctctacaagcaaatctccagccaatcaggagcatcgaacgacaaccactactttggctacagcacccctttggggtattttgacttcaacagattccactgtcacttctccccacgtgactggcaaagactcatcaacaacaactggggattccgacccaagagactcaacttcaagctctttaacattcaagtcaaagaggtcacgcagaatgacggtacgacgacgattgccaataaccttaccagcacggttcaggtgtttactgactcggagtaccagctcccgtacgtcctcggctcggcgcatcaaggatgcctcccgccgtttccagcggacgtcttcatggtcccacagtatggatacctcaccctgaacaacgggagtcaggcggtaggacgctcttccttttactgcctggagtactttccttctcagatgctgcgtaccggaaacaactttaccttcagctacacctttgaggacgtgcccttccacagcagctacgctcacagccagagtttggaccggctgatgaatcctctgatcgaccagtatctgtattatctgaacaggacacaatcaaatagtggaactcttcagcagtctaggctactgtttagccaagctggacccaccagcatgtcccttcaagctaaaaactggctgcctggaccttgctacagacagcagcgtctgtcaaagcaggcaaacgacaacaacaacagcaactttccctggactgcggctacaaagtatcatctaaatggtcgggactcgttggttaatccaggaccagctatggccagccacaaagacgatgaagaaaagtttttccccatgcatggaaccctgatatttggtaaacaaggaacaaatgctaacgacgcggatttggaacatgtcatgattacagatgaagaagaaatcaggaccaccaatcccgtggctacagagcagtacggaaacgtgtcaaataatttgcaaaactcaaatactggtccaactacagaaaatgtcaatcaccagggagcgttacctggtatggtgtggcaggatcgagacgtgtacctgcagggacccatttgggccaagattcctcacaccgacggacactttcacccttctccactgatgggaggttttggactcaaacacccgcctcctcaaatcatgatcaaaaacactcctgttccagccaatcctcctacaaacttcagcgcggcaaagtttgcttccttcatcacacagtattccacgggacaggtcagcgtggagatcgagtgggagctgcagaaggagaacagcaaacgctggaaccccgagatccagtacacttccaactacaacaaatctgttaatgtggactttactgtggacgctaatggtgtgtattcagagcctcgccccattggcaccagatacctgactcgtaatctgtaa

SEQ ID NO: 3635 - DNA, 2208 bp, synthetic construct
  misc_feature 1..2208: note = source = /note="Description of Artificial Sequence: Synthetic polynucleotide"
  source 1..2208: mol_type = other DNA
atggctgccgatggttatcttccagattggctcgaggacactctctctgaaggaataagacagtggtggaagctcaaacctggcccaccaccgccaaagcccgcagggcggcataaggacgacagcaggggtcttgtgcttcctgggtacaagtacctcggacccttcaacggactcgacaagggagagccggtcaacgaggcagacgccgcggccctcgagcacgacaaggcctacgaccggcagctcgacagcggagacaacccgtacctcaagtacaaccacgccggcgcggagtttcaggagcgccttaaagaagatacgtcttttgggggcaacctcggacgagcagtattccaggcgaaaaagagggttcttgaacctctgggcctggttgaggagcctgttaagacggccccgggaaaaaagaggccggtagagcactctcctgtggagccagactcctcctcgggaaccggaaaagcgggccagcagcctgcgaggaagagattgaattttggtcagactggagacgcagactccgtacctgacccccagcctctcggacagccaccagcagcccccacaagtttgggatctactacaatggctacaggcagtggcgcaccaatggcagacaataacgagggtgccgatggagtgggtaattcctcagggaattggcattgcgattcccaatggttgggcgacagagtcatcaccaccagcacccgaacctgggccctgcccacctacaacaaccacctctacaagcaaatctccagccaatcaggagcagcgaacgacaaccactactttggctacagcaccccctgggggtattttgacttcaacagattccactgccacttttcaccacgtgactggcaaagactcatcaacaacaactggggattccgacccaagagactcaacttcaagctctttaacattcaagtcaaagaggtcacgcagaatgacggtacgacgacgattgccaataaccttaccagcacggttccggtgtttactgactcggagtaccagctcccgtacgtcctcggctcggcgcatcaaggatgcctcccgccgtttccagcggacgtcttcatggtcccacagtatggatacctcaccctgaacaacgggagtcaggcggtaggacgctcttccttttactgcctggagtactttccttctcagatgcttcgtaccggaaacaactttaccttcagttacacctttgaagacgttcctttccacagcagctacgctcacagtcaaagtctggaccggctgatgaatcctcttatcgaccagtatctgtattatctgaacaggacacaatcaaatagtggaactcttcagcagtctaggctactgtttagccaagctggacccaccagcatgtcccttcaagctaaaaactggctgcctggaccttgctacagacagcagcgtctgtcaaagcaggcaaacgacaacaacaacagcaactttccctggactgcggctacaaagtatcatctaaatggtcgggactcgttggttaatccaggaccagctatggccagccacaaagacgatgaagaaaagtttttccccatgcatggaaccctgatatttggtaaacaaggaacaaatgctaacgacgcggatttggaacatgtcatgattacagatgaagaagaaatcaggaccaccaatcccgtggctacagagcagtacggaaacgtgtcaaataatttgcaaaactcaaatactggtccaactacagaaaatgtcaatcaccagggagcgttacctggtatggtgtggcaggatcgagacgtgtacctgcagggacccatttgggccaagattcctcacaccgacggacactttcacccttctccactgatgggaggttttggactcaaacacccgcctcctcaaatcatgatcaaaaacactcctgttccagccaatcctcctacaaacttcagcgcggcaaagtttgcttccttcatcacacagtattccacgggacaggtcagcgtggagatcgagtgggagctgcagaaggagaacagcaaacgctggaaccccgagatccagtacacttccaactacaacaaatctgttaatgtggactttactgtggacgctaatggtgtgtattcagagcctcgccccattggcaccagatacctgactcgtaatctgtaa

SEQ ID NO: 3636 - DNA, 2208 bp, synthetic construct
  misc_feature 1..2208: note = source = /note="Description of Artificial Sequence: Synthetic polynucleotide"
  source 1..2208: mol_type = other DNA
atggctgccgatggttatcttccagattggctcgaggacattctctctgaaggaataagacagtggtggaagctcaaacctggcccaccaccaccaaagcccgcagagcggcataaggacgacagcaggggtcttgtgcttcctgggtacaagtacctcggacccttcaacggactcgacaaaggagagccggtcaacgaggcagacgccgcggccctcgagcacgacaaggcctacgaccggcagctcgacagcggagacaacccgtacctcaagtacaaccacgccgacgcggagtttcaggagcgtcttaaagaagatacgtcttttgggggcaacctcggacgagcagtcttccaggcaaaaaagagggttcttgaacctctgggcctggttgaggaacctgttaagacggctccgggaaaaaagaggccggtagagcaatctcctgcggagccagactcctcctcgggaaccggaaaggcgggcaaccagcctgcaagaaagagattgaattttggtcagactggagacgcagactccgtacctgacccccagcctctcggacagccaccagcagccccctctggtctgggatctactacaatggctacaggcagtggcgcaccaatggcagacaataacgagggtgccgatggagtgggtaattcctcaggaaattggcattgcgattcccaatggttgggcgacagagtcatcaccaccagcacccgaacctgggccctgcccacctacaacaatcacctctacaagcaaatctccagccaatcaggagcagcgaacgacaaccactactttggctacagcaccccctgggggtattttgacttcaacagattccactgccacttttcaccacgtgactggcaaagactcatcaacaacaactggggattccgacccaagagactcaacttcaagctctttaacattcaagtcaaagaggtcacgcagaatgacggtacgacgacgattgccaataaccttaccagcacggttccggtgtttactgactcggagtaccagctcccgtacgtcctcggctcggcgcatcaaggatgcctcccgccgtttccagcggacgtcttcatggtcccacagtatggatacctcaccctgaacaacgggagtcaggcggtaggacgctcttccttttactgcctggagtactttccttctcagatgcttcgtaccggaaacaactttaccttcagttacacctttgaagacgttcctttccacagcagctacgctcacagtcaaagtctggaccggctgatgaatcctcttatcgaccagtacctgtattatctaaacaaaacacaatcaaatagtggaactcttcagcagtctcggctactgtttagtcaagctggacctaccagcatgtctcttcaagctaaaaactggctgcctggaccttgctacagacaacagcgtctgtcaaagcaggcaaacgacaacaacaacagcaactttccctggactgcggctacaaagtatcatctaaatggccgggactcgttggttaatccaggaccagctatggccagccacaaagacgatgaagaaaagtttttccccatgcatggaaccctgatatttggcaaacaagggacaaatgctaacgacgcggatttggacaatgtcatgattacagatgaagaagaaatccgtaccaccaatcccgtggctacggagcagtacgggactgtgtcaaataatttgcaaaactcaaatactggtccaactactggaactgtcaatcaccaaggagcgttacctggtatggtgtggcaggatcgagacgtgtaccttcagggacccatttgggccaagattcctcacaccgatggacactttcacccttctccgctgatgggaggttttggactcaaacacccgcctcctcagatcatgatcaaaaacactcccgttccagccaatcctcccacaaacttcagttctgccaagtttgcttctttcatcacacagtattccacgggacaggttagcgtggagatcgagtgggagctgcagaaggagaacagcaaacgctggaaccccgagatccagtacacttccaactacaacaagtctgttaatgtggactttactgtggacactaatggtgtgtattcagagcctcgccccattggcaccagatacctgactcgtaatctgtaa

SEQ ID NO: 3637 - DNA, 2208 bp, synthetic construct
  misc_feature 1..2208: note = source = /note="Description of Artificial Sequence: Synthetic polynucleotide"
  source 1..2208: mol_type = other DNA
atggctgccgatggttatcttccagattggctcgaggacactctctctgaaggaataagacagtggtggaagctcaaacctggcccaccaccaccaaggcccgcagagcggcatcaggacgacagcaggggtcttgtgcttcctgggtacaagtacctcggacccttcaacggactcgacaaaggagagccggtcaacgaggcagacgctgcggccctcgagcacgacaaggcctacgaccggcagctcgacagcggagacaacccgtacctcaagtacaaccacgccgacgcggagtttcaggagcgtcttaaagaagatacgtcttttgggggcaacctcggacgagcagtcttccaggcgaaaaagagggttcttgaacctctgggcctggttgaggaacctgttaagacggctccgggaaaaaagaggccggtagagcactctcctgcggagccagactcctcctcgggaaccggaaaagcgggccagcagcctgcaagaaagagattgaatttcggtcagactggagacgcagactccgtacctgacccccagcctctcggacagccaccagcagcccccacaagtttgggatctactacaatggctacaggcagtggcgcaccaatggcagacaataacgagggtgccgatggagtgggtaattcctcaggaaattggcattgcgattcccaatggctgggcgacagagtcatcaccaccagcacccgaacctgggccctgcccacctacaacaaccacctctacaagcaaatctccagccaatcaggagcatcgaacgacaaccactactttggctacagcaccccttgggggtattttgacttcaacagattccactgtcacttctccccacgtgactggcaaagactcatcaacaacaactggggattccgacccaagagactcaacttcaagctctttaacattcaagtcaaagaggtcacgcagaatgacggtacgacgacgattgccaataaccttaccagcacggttcaggtgtttactgactcggagtaccagctcccgtacgtcctcggctcggcgcatcaaggatgcctcccgccgtttccagcggacgtcttcatggtcccacagtatggatacctcaccctgaacaacgggagtcaggcggtaggacgctcttccttttactgcctggagtactttccttctcagatgctgcgtaccggaaacaactttaccttcagctacacctttgaggacgtgcccttccacagcagctacgctcacagccagagtttggaccggctgatgaatcctctgatcgaccagtatctgtattatctgaacaggacacaatcaaatagtggaactcttcagcagtctaggctactgtttagccaagctggacccaccagcatgtcccttcaagctaaaaactggctgcctggaccttgctacagacagcagcgtctgtcaaagcaggcaaacgacaacaacaacagcaactttccctggactgcggctacaaagtatcatctaaatggtcgggactcgttggttaatccaggaccagctatggccagccacaaagacgatgaagaaaagtttttccccatgcatggaaccctgatatttggtaaacaaggaacaaatgctaacgacgcggatttggaacatgtcatgattacagatgaagaagaaatcaggaccaccaatcccgtggctacagagcagtacggaaacgtgtcaaataatttgcaaaactcaaatactggtccaactacagaaaatgtcaatcaccagggagcgttacctggtatggtgtggcaggatcgagacgtgtacctgcagggacccatttgggccaagattcctcacaccgacggacactttcacccttctccactgatgggaggttttggactcaaacacccgcctcctcaaatcatgatcaaaaacactcctgttccagccaatcctcctacaaacttcagcgcggcaaagtttgcttccttcatcacacagtattccacgggacaggtcagcgtggagatcgagtgggagctgcagaaggagaacagcaaacgctggaaccccgagatccagtacacttccaactacaacaaatctgttaatgtggactttactgtggacgctaatggtgtgtattcagagcctcgccccattggcaccagatacctgactcgtaatctgtaa

SEQ ID NO: 3638 - DNA, 2208 bp, synthetic construct
  misc_feature 1..2208: note = source = /note="Description of Artificial Sequence: Synthetic polynucleotide"
  source 1..2208: mol_type = other DNA
atggctgccgatggttatcttccagattggctcgaggacactctctctgaaggaataagacagtggtggaagctcaaacctggcccaccaccgccaaagcccgcagggcggcataaggacgacagcaggggtcttgtgcttcctgggtacaagtacctcggacccttcaacggactcgacaagggagagccggtcaacgaggcagacgccgcggccctcgagcacgacaaggcctacgaccggcagctcgacagcggagacaacccgtacctcaagtacaaccacgccggcgcggagtttcaggagcgccttaaagaagatacgtcttttgggggcaacctcggacgagcagtattccaggcgaaaaagagggttcttgaacctctgggcctggttgaggagcctgttaagacggctccgggaaaaaagaggccggtagagcactctcctgtggagccagactcctcctcgggaaccggaaaagcgggccagcagcctgcgagaaagagattgaatttcggtcagactggagacgcagactccgtacctgacccccagcctctcggacagccaccagcagcccccacaagtttgggatctactacaatggctacaggcagtggcgcaccaatggcagacaataacgagggtgccgatggagtgggtaattcctcaggaaattggcattgcgattcccaatggctgggcgacagagtcatcaccaccagcacccgaacctgggccctgcccacctacaacaaccacctctataagcaaatctccagccaatcaggagcatcgaacgacaaccactactttggctacagcaccccttgggggtattttgacttcaacagattccactgtcacttctccccacgtgactggcaaagactcatcaacaacaactggggattccgacccaagagactcaacttcaagctctttaacattcaagtcaaagaggtcacgcagaatgacggtacgacgacgattgccaataaccttaccagcacggttcaggtgtttactgactcggagtaccagctcccgtacgtcctcggctcggcgcatcaaggatgcctcccgccgtttccagcggacgtcttcatggtcccacagtatggatacctcaccctgaacaacgggagtcaggcggtaggacactcttccycttactgcctggagtactttccttctcagatgctgcgtaccggaaacaactttaccttcagctacacctttgaggacgtgcctttccacagcagctacgctcacagccagagtttggaccggctgatgaatcctctgatcgaccagtatctgtattatctgaacaggacacaatcaaatagtggaactcttcagcagtctaggctactgtttagccaagctggacccaccagcatgtctcttcaagctaaaaactggctgcctggaccttgctacagacagcagcgtctgtcaaagcaggcaaacgacaacaacaacagcaactttccctggactgcggctacaaagtatcatctaaatggtcgggactcgttggttaatccaggaccagctatggccagccacaaagacgatgaagaaaagtttttccccatgcatggaaccctgatatttggtaaacaaggaacaaatgctaacgacgcggatttggaacatgtcatgattacagatgaagaagaaatcaggaccaccaatcccgtggctacagagcagtacggaaacgtgtcaaataatttgcaaaactcaaatactggtccaactacagaaaatgtcaatcaccagggagcgttacctggtatggtgtggcaggatcgagacgtgtacctgcagggacccatttgggccaagattcctcacaccgacggacactttcacccttctccactgatgggaggttttggactcaaacacccgcctcctcaaatcatgatcaaaaacactcctgttccagccaatcctcctacaaacttcagcgcggcaaagtttgcttccttcatcacacagtattccacgggacaggtcagcgtggagatcgagtgggagctgcagaaggagaacagcaaacgctggaaccccgagatccagtacacttccaactacaacaaatctgttaatgtggactttactgtagacactaatggtgtgtattcagagcctcgccccattggcaccagatacctgactcgtaatctgtaa

SEQ ID NO: 3639 - DNA, 2208 bp, synthetic construct
  misc_feature 1..2208: note = source = /note="Description of Artificial Sequence: Synthetic polynucleotide"
  source 1..2208: mol_type = other DNA
atggctgccgatggttatcttccagattggctcgaggacactctctctgaaggaataagacagtggtggaagctcaaacctggcccaccaccgccaaagcccgcagagcggcatmaggacgacagcaggggtcttgtgcttcctgggtacaagtacctcggacccttcaacggactcgacaaaggagagccggtcaacgaggcagacgctgcggccctcgagcacgacaaggcctacgaccggcagctcgacagcggagacaacccgtacctcaagtacaaccacgccgacgcggagtttcaggagcgtcttaaagaagatacgtcttttgggggcaacctcggacgagcagtcttccaggcgaaaaagagggttcttgaacctctgggcctggttgaggaacctgttaagacggctccgggaaaaaagaggccggtagagcactctcctgcggagccagactcctcctcgggaaccggaaaagcgggccagcagcctgcaagaaagagattgaatttcggtcagactggagacgcagactccgtacctgacccccagcctctcggacagccaccagcagcccccacaagtttgggatctactacaatggctacaggcagtggcgcaccaatggcagacaataacgagggtgccgatggagtgggtaattcctcaggaaattggcattgcgattcccaatggctgggcgacagagtcatcaccaccagcacccgaacctgggccctgcccacctacaacaaccacctctacaagcaaatctccagccaatcaggagcatcgaacgacaaccactactttggctacagcaccccttgggggtattttgacttcaacagattccactgtcacttctccccacgtgactggcaaagactcatcaacaacaactggggattccgacccaagagactcaacttcaagctctttaacattcaagtcaaagaggtcacgcagaatgacggtacgacgacgattgccaataaccttaccagcacggttcaggtgtttactgactcggagtaccagctcccgtacgtcctcggctcggcgcatcaaggatgcctcccgccgtttccagcggacgtcttcatggtcccacagtatggatacctcaccctgaacaacgggagtcaggcggtaggacgctcttccttttactgcctggagtactttccttctcagatgctgcgtaccggaaacaactttaccttcagctacacctttgaggacgtgcccttccacagcagctacgctcacagccagagtttggaccggctgatgaatcctctgatcgaccagtatctgtattatctgaacaggacacaatcaaatagtggaactcttcagcagtctaggctactgtttagccaagctggacccaccagcatgtcccttcaagctaaaaactggctgcctggaccttgctacagacagcagcgtctgtcaaagcaggcaaacgacaacaacaacagcaactttccctggactgcggctacaaagtatcatctaaatggtcgggactcgttggttaatccaggaccagctatggccagccacaaagacgatgaagaaaagtttttccccatgcatggaaccctgatatttggtaaacaaggaacaaatgctaacgacgcggatttggaacatgtcatgattacagatgaagaagaaatcaggaccaccaatcccgtggctacagagcagtacggaaacgtgtcaaataatttgcaaaactcaaatactggtccaactacagaaaatgtcaatcaccagggagcgttacctggtatggtgtggcaggatcgagacgtgtacctgcagggacccatttgggccaagattcctcacaccgacggacactttcacccttctccactgatgggaggttttggactcaaacacccgcctcctcaaatcatgatcaaaaacactcctgttccagccaatcctcctacaaacttcagcgcggcaaagtttgcttccttcatcacacagtattccacgggacaggtcagcgtggagatcgagtgggagctgcagaaggagaacagcaaacgctggaaccccgagatccagtacacttccaactacaacaaatctgttaatgtggactttactgtagacactaatggtgtgtattcagagcctcgccccattggcaccagatacctgactcgtaatctgtaa

SEQ ID NO: 3640 - DNA, 2208 bp, synthetic construct
  misc_feature 1..2208: note = source = /note="Description of Artificial Sequence: Synthetic polynucleotide"
  source 1..2208: mol_type = other DNA
atggctgccgatggttatcttccagattggctcgaggacactctctctgaaggaataagacagtggtggaagctcaaacctggcccaccaccaccaaagcccgcagagcggcatcaggacgacagcaggggtcttgtgcttcccgggcacaagtacctcggacccttcaacggactcgacaaaggagagccggtcaacgaggcagacgctgcggccctcgagcacgacaaggcctacgaccggcagctcgacagcggagacaacccgtacctcaagtacaaccacgccgacgcggagtttcaggagcgtcttaaagaagatacgtcttttgggggcaacctcggacgagcagtcttccaggcgaaaaagagggttcttgaacctctgggcctggttgaggaacctgttaagacggctccgggaaaaaagaggccggtagagcactctcctgcggagccagactcctcctcgggaaccggaaaagcgggccagcagcctgcaagaaagagattgaatttcggtcagactggagacgcagactccgtacctgacccccagcctctcggacagccaccagcagcccccacaagtttgggatctactacaatggctacaggcagtggcgcaccaatggcagacaataacgagggtgccgatggagtgggtaattcctcaggaaattggcattgcgattcccaatggctgggcgacagagtcatcaccaccagcacccgaacctgggccctgcccacctacaacaaccacctctataagcaaatctccagccaatcaggagcatcgaacgacaaccactactttggctacagcaccccttgggggtattttgacttcaacagattccactgtcacttctccccacgtgactggcaaagactcatcaacaacaactggggattccgacccaagagactcaacttcaagctctttaacattcaagtcaaagaggtcacgcagaatgacggtacgacgacgattgccaataaccttaccagcacggttcaggtgtttactgactcggagtaccagctcccgtacgtcctcggctcggcgcatcaaggatgcctcccgccgtttccagcggacgtcttcatggtcccacagtatggatacctcaccctgaacaacgggagtcaggcggtaggacactcttcctcttactgcctggagtactttccttctcagatgctgcgtaccggaaacaactttaccttcagctacacctttgaggacgtgcctttccacagcagctacgctcacagccagagtttggaccggctgatgaatcctctgatcgaccagtatctgtattatctgaacaggacacaatcaaatagtggaactcttcagcagtctaggctactgtttagccaagctggacccaccagcatgtctcttcaagctaaaaactggctgcctggaccttgctacagacagcagcgtctgtcaaagcaggcaaacgacaacaacaacagcaactttccctggactgcggctacaaagtatcatctaaatggtcgggactcgttggttaatccaggaccagctatggccagccacaaagacgatgaagaaaagtttttccccatgcatggaaccctgatatttggtaaacaaggaacaaatgctaacgacgcggatttggaacatgtcatgattacagatgaagaagaaatcaggaccaccaatcccgtggctacagagcagtacggaaacgtgtcaaataatttgcaaaactcaaatactggtccaactacagaaaatgtcaatcaccagggagcgttacctggtatggtgtggcaggatcgagacgtgtacctgcagggacccatttgggccaagattcctcacaccgacggacactttcacccttctccactgatgggaggatttggactgaagcaccctcccccgcagattctcatcaagaataccccggtacctgcgaatccttctaccaccttcagcgcggcaaagtttgcttccttcatcacacagtactccacggggcaggtcagcgtggagatcgagtgggagctgcagaaagagaacagcaaacgctggaaccccgagatccagtatacctccaactacaacaagtctgttaatgtggactttactgtggacactaatggcgtgtattcagagcctcgccccattggcacaagatacctgactcgtaatctgtaa

SEQ ID NO: 3641 - DNA, 2208 bp, synthetic construct
  misc_feature 1..2208: note = source = /note="Description of Artificial Sequence: Synthetic polynucleotide"
  source 1..2208: mol_type = other DNA
atggctgccgatggttatcttccagattggctcgaggacactctctctgaaggaataagacagtggtggaagctcaaacctggcccaccaccgccaaagcccgcagagcggcataaggacgacagcaggggtcttgtgcttcctgggtacaagtacctcggacccttcaacggactcgacaaaggagagccggtcaacgaggcagacgccgcggccctcgagcacgacaaggcctacgaccggcagctcgacagcggagacaacccgtacctcaagtacaaccacgccgacgcggagtttcaggagcgccttaaagaagatacgtcttttgggggcaacctcgcaagagcagtattccaggcgaaaaagagggttcttgaacctctgggcctggttgaggagcctgttaagacggctccgggaaaaaagaggccggtagagcactctcctgcggagccagattcctcctccggaactggaaagtcgggccaacagcctgcaagaaagagattgaattttggtcagactggagacgcagactccgtacctgacccccagcctctcggacagccaccagcagccccctctggtctgggaactaatacgatggcttcaggcagtggcgcaccaatggcagacaataacgagggcgccgacggagtgggtaattcctcgggaaattggcattgcgattccacatggatgggcgacagagtcatcaccaccagcacccgaacctgggccctgcccacctacaacaaccacctctacaagcaaatctccagccaatcaggagcatcgaacgacaaccactactttggctacagcaccccttgggggtattttgacttcaacagattccactgtcacttctccccacgtgactggcaaagactcatcaacaacaactggggattccgacccaagagactcaacttcaagctctttaacattcaagtcaaagaggtcacgcagaatgacggtacgacgacgattgccaataaccttaccagcacggttcaggtgtttactgactcggagtaccagctcccgtacgtcctcggctcggcgcatcaaggatgcctcccgccgtttccagcggacgtcttcatggtcccacagtatggatacctcaccctgaacaacgggagtcaggcggtaggacgctcttccttttactgcctggagtactttccttctcagatgctgcgtaccggaaacaactttaccttcagctacacctttgaggacgtgcccttccacagcagctacgctcacagccagagtttggaccggctgatgaatcctctgatcgaccagtatctgtattatctgaacaggacacaatcaaatagtggaactcttcagcagtctaggctactgtttagccaagctggacccaccagcatgtcccttcaagctaaaaactggctgcctggaccttgctacagacagcagcgtctgtcaaagcaggcaaacgacaacaacaacagcaactttccctggactgcggctacaaagtatcatctaaatggtcgggactcgttggttaatccaggaccagctatggccagccacaaagacgatgaagaaaagtttttccccatgcatggaaccctgatatttggtaaacaaggaacaaatgctaacgacgcggatttggaacatgtcatgattacagatgaagaagaaatcaggaccaccaatcccgtggctacagagcagtacggaaacgtgtcaaataatttgcaaaactcaaatactggtccaactacagaaaatgtcaatcaccagggagcgttacctggtatggtgtggcaggatcgagacgtgtacctgcagggacccatttgggccaagattcctcacaccgacggacactttcacccttctccactgatgggaggttttggactcaaacacccgcctcctcaaatcatgatcaaaaacactcctgttccagccaatcctcctacaaacttcagcgcggcaaagtttgcttccttcatcacacagtattccacgggacaggtcagcgtggagatcgagtgggagctgcagaaggagaacagcaaacgctggaaccccgagatccagtacacttccaactacaacaaatctgttaatgtggactttactgtggacgctaatggtgtgtattcagagcctcgccccattggcaccagatacctgactcgtaatctgtaa

SEQ ID NO: 3642 - DNA, 2208 bp, synthetic construct
  misc_feature 1..2208: note = source = /note="Description of Artificial Sequence: Synthetic polynucleotide"
  source 1..2208: mol_type = other DNA
atggctgccgatggttatcttccagattggctcgaggacattctctctgaaggaataagacagtggtggaagctcaaacctggcccaccaccaccaaagcccgcagagcggcataaggacgacagcaggggtcttgtgcttcctgggtacaagtacctcggacccttcaacggactcgacaaaggagagccggtcaacgaggcagacgccgcggccctcgagcacgacaaggcctacgaccggcagctcgacagcggagacaacccgtacctcaagtacaaccacgccgacgcggagtttcaggagcgtcttaaagaagatacgtcttttgggggcaacctcggacgagcagtcttccaggcgaaaaagagggttcttgaacctctgggcctggttgaggaacctgttaagacggctccgggaaaaaagaggccggtagagcaatctcctgcggagccagactcctcctcgggaaccggaaaggcgggcaaccagcctgcaagaaagagattgaattttggtcagactggagacgcagactccgtacctgacccccagcctctcggacagccaccagcagccccctctggtctgggatctactacaatggctacaggcagtggcgcaccaatggcagacaataacgagggtgccgatggagtgggtaattcctcaggaaattggcattgcgattcccaatggttgggcgacagagtcatcaccaccagcacccgaacctgggccctgcccacctacaacaatcacctctacaagcaaatctccagccaatcaggagcagcgaacgacaaccactactttggctacagcaccccctgggggtattttgacttcaacagattccactgccacttttcaccacgtgactggcaaagactcatcaacaacaactggggattccgacccaaragactcaacttcaagctctttaacattcaagtcaaagaggtcacgcagaatgacggtacgacgacgattgccaataaccttaccagcacggttcaggtgtttactgactcggagtaccagctcccgtacgtcctcggctcggcgcatcaaggatgcctcccgccgtttccagcggacgtcttcatggtcccacagtatggatacctcaccctgaacaacgggagtcaggcggtaggacgctcttccttttactgcctggagtactttccttctcagatgctgcgtaccggaaacaactttaccttcagctacacctttgaggacgtgcccttccacagcagctacgctcacagccagagtttggaccggctgatgaatcctctgatcgaccagtatctgtattatctgaacaggacacaatcaaatagtggaactcttcagcagtctaggctactgtttagccaagctggacccaccagcatgtcccttcaagctaaaaactggctgcctggaccttgctacagacagcagcgtctgtcaaagcaggcaaacgacaacaacaacagcaactttccctggactgcggctacaaagtatcatctaaatggtcgggactcgttggttaatccaggaccagctatggccagccacaaagacgatgaagaaaagtttttccccatgcatggaaccctgatatttggtaaacaaggaacaaatgctaacgacgcggatttggaacatgtcatgattacagatgaagaagaaatcaggaccaccaatcccgtggctacagagcagtacggaaacgtgtcaaataatttgcaaaactcaaatactggtccaactacagaaaatgtcaatcaccagggagcgttacctggtatggtgtggcaggatcgagacgtgtacctgcagggacccatttgggccaagattcctcacaccgacggacactttcacccttctccactgatgggaggttttggactcaaacacccgcctcctcaaatcatgatcaaaaacactcctgttccagccaatcctcctacaaacttcagcgcggcaaagtttgcttccttcatcacacagtattccacgggacaggtcagcgtggagatcgagtgggagctgcagaaggagaacagcaaacgctggaaccccgagatccagtacacttccaactacaacaaatctgttaatgtggactttactgtggacgctaatggtgtgtattcagagcctcgccccattggcaccagatacctgactcgtaatctgtaa

SEQ ID NO: 3643 - DNA, 2208 bp, synthetic construct
  misc_feature 1..2208: note = source = /note="Description of Artificial Sequence: Synthetic polynucleotide"
  source 1..2208: mol_type = other DNA
atggctgccgatggttatcttccagattggctcgaggacactctctctgaaggaataagacagtggtggaagctcaaacctggcccaccaccaccaaggcccgcagagcggcatcaggacgacagcaggggtcttgtgcttcctgggtacaagtacctcggacccttcaacggactcgacaaaggagagccggtcaacgaggcagacgctgcggccctcgagcacgacaaggcctacgaccggcagctcgacagcggagacaacccgtacctcaagtacaaccacgccgacgcggagtttcaggagcgtcttaaagaagatacgtcttttgggggcaacctcggacgagcagtcttccaggcgaaaaagagggttcttgaacctctgggcctggttgaggaacctgttaagacggctccgggaaaaaagaggccggtagagcactctcctgcggagccagactcctcctcgggaaccggaaaagcgggccagcagcctgcaagaaagagattgaatttcggtcagactggagacgcagactccgtacctgacccccagcctctcggacagccaccagcagcccccacaagtttgggatctactacaatggctacaggcagtggcgcaccaatggcagacaataacgagggtgccgatggagtgggtaattcctcaggaaattggcattgcgattcccaatggctgggcgacagagtcatcaccaccagcacccgaacctgggccctgcccacctacaacaaccacctctacaagcaaatctccagccaatcaggagcatcgaacgacaaccactactttggctacagcaccccttgggggtattttgacttcaacagattccactgtcacttctccccacgtgactggcaaagactcatcaacaacaactggggattccgacccaagagactcaacttcaagctctttaacattcaagtcaaagaggtcacgcagaatgacggtacgacgacgattgccaataaccttaccagcacggttcaggtgtttactgactcggagtaccagctcccgtacgtcctcggctcggcgcatcaaggatgcctcccgccgtttccagcggacgtcttcatggtcccacagtatggatacctcaccctgaacaacgggagtcaggcggtaggacgctcttccttttactgcctggagtactttccttctcagatgctgcgtaccggaaacaactttaccttcagctacacctttgaggacgtgcccttccacagcagctacgctcacagccagagtttggaccggctgatgaatcctctgatcgaccagtatctgtattatctgaacaggacacaatcaaatagtggaactcttcagcagtctaggctactgtttagccaagctggacccaccagcatgtcccttcaagctaaaaactggctgcctggaccttgctacagacagcagcgtctgtcaaagcaggcaaacgacaacaacaacagcaactttccctggactgcggctacaaagtatcatctaaatggtcgggactcgttggttaatccaggaccagctatggccagccacaaagacgatgaagaaaagtttttccccatgcatggaaccctgatatttggtaaacaaggaacaaatgctaacgacgcggatttggaacatgtcatgattacagatgaagaagaaatcaggaccaccaatcccgtggctacagagcagtacggaaacgtgtcaaataatttgcaaaactcaaatactggtccaactacagaaaatgtcaatcaccagggagcgttacctggtatggtgtggcaggatcgagacgtgtacctgcagggacccatttgggccaagattcctcacaccgacggacactttcacccttctcctcttatgggaggatttggactgaagcaccctcccccgcagattctcatcaagagtaccccggtacctgcgaatccttctaccaccttcagcgcggcaaagtttgcttccttcatcacacagtactccacggggcaggtcagcgtggagatcgagtgggagctgcagaaagagaacagcaaacgctggaaccccgagatccagtatacctccaactacaacaagtctgttaatgtggactttactgtggacactaatggcgtgtattcagagcctcgccccattggcacaagatacctgactcgtaatctgtaa

SEQ ID NO: 3644 - DNA, 2208 bp, synthetic construct
  misc_feature 1..2208: note = source = /note="Description of Artificial Sequence: Synthetic polynucleotide"
  source 1..2208: mol_type = other DNA
atggctgccgatggttatcttccagattggctcgaggacactctctctgaaggaataagacagtggtggaagctcaaacctggcccaccaccaccaaggcccgcagagcggcatcaggacgacagcaggggtcttgtgcttcctgggtacaagtacctcggacccttcaacggactcgacaaaggagagccggtcaacgaggcagacgctgcggccctcgagcacgacaaggcctacgaccggcagctcgacagcggagacaacccgtacctcaagtacaaccacgccgacgcggagtttcaggagcgtcttaaagaagatacgtcttttgggggcaacctcggacgagcagtcttccaggcgaaaaagagggttcttgaacctctgggcctggttgaggaacctgttaagacggctccgggaaaaaagaggccggtagagcactctcctgcggagccagactcctcctcgggaaccggaaaagcgggccagcagcctgcaagaaagagattgaatttcggtcagactggagacgcagactccgtacctgacccccagcctctcggacagccaccagcagcccccacaagtttgggatctactacaatggctacaggcagtggcgcaccaatggcagacaataacgagggtgccgatggagtgggtaattcctcaggaaattggcattgcgattcccaatggctgggcgacagagtcatcaccaccagcacccgaacctgggccctgcccacctacaacaaccacctctacaagcaaatctccagccaatcaggagcatcgaacgacaaccactactttggctacagcaccccttgggggtattttgacttcaacagattccactgtcacttctccccacgtgactggcaaagactcaccaacaacaactggggattccgacccaagagactcaacttcaagctctttaacattcaagtcaaagaggtcacgcagaatgacggtacgacgacgattgccaataaccttaccagcacggttcaggtgtttactgactcggagtaccagctcccgtacgtcctcggctcggcgcatcaaggatgcctcccgccgtttccagcggacgtcttcatggtcccacagtatggatacctcaccctgaacaacgggagtcaggcggtaggacgctcttccttttactgcctggagtactttccttctcagatgctgcgtaccggaaacaactttaccttcagctacacctttgaggacgtgcccttccacagcagctacgctcacagccagagtttggaccggctgatgaatcctctgatcgaccagtatctgtattatctgaacaggacacaatcaaatagtggaactcttcagcagtctaggctactgtttagccaagctggacccaccagcatgtcccttcaagctaaaaactggctgcctggaccttgctacagacagcagcgtctgtcaaagcaggcaaacgacaacaacaacagcaactttccctggactgcggctacaaagtatcatctaaatggtcgggactcgttggttaatccaggaccagctatggccagccacaaagacgatgaagaaaagtttttccccatgcatggaaccctgatatttggtaaacaaggaacaaatgctaacgacgcggatttggaacatgtcatgattacagatgaagaagaaatcaggaccaccaatcccgtggctacagagcagtacggaaacgtgtcaaataatttgcaaaactcaaatactggtccaactacagaaaatgtcaatcaccagggagcgttacctggtatggtgtggcaggatcgagacgtgtacctgcagggacccatttgggccaagattcctcacaccgacggacactttcacccttctccactgatgggaggttttggactcaaacacccgcctcctcaaatcatgatcaaaaacactcctgttccagccaatcctcctacaaacttcagcgcggcaaagtttgcttccttcatcacacagtattccacgggacaggtcagcgtggagatcgagtgggagctgcagaaggagaacagcaaacgctggaaccccgagatccagtacacttccaactacaacaaatctgttaatgtggactttactgtggacgctaatggtgtgtattcagagcctcgccccattggcaccagatacctgactcgtaatctgtaa

SEQ ID NO: 3645 - DNA, 2208 bp, synthetic construct
  misc_feature 1..2208: note = source = /note="Description of Artificial Sequence: Synthetic polynucleotide"
  source 1..2208: mol_type = other DNA
atggctgccgatggttatcttccagattggctcgaggacactctctctgaaggaataagacagtggtggaagctcaaacctggcccaccaccgccaaagcccgcagggcggcataaggacgacagcaggggtcttgtgcttcctgggtacaagtacctcggacccttcaacggactcgacaagggagagccggtcaacgaggcagacgccgcggccctcgagcacgacaaggcctacgaccggcagctcgacagcggagacaacccgtacctcaagtacaaccacgccggcgcggagtttcaggagcgccttaaagaagatacgtcttttgggggcaacctcggacgagcagtattccaggcgaaaaagagggttcttgaacctctgggcctggttgaggagcctgttaagacggccccgggaaaaaagaggccggtagagcactctcctgtggagccagactcctcctcgggaaccggaaaagcgggccagcagcctgcgaggaagagattgaattttggtcagactggagacgcagactccgtacctgacccccagcctctcggacagccaccagcagcccccacaagtttgggatctactacaatggctacaggcagtggcgcaccaatggcagacaataacgagggtgccgatggagtgggtaattcctcagggaattggcattgcgattcccaatggttgggcgacagagtcatcaccaccagcacccgaacctgggccctgcccacctacaacaaccacctctacaagcaaatctccagccaatcaggagccagcaacgacaaccactactttggctacagcaccccctgggggtattttgacttcaacagattccactgccacttttcaccacgtgactggcaaagactcatcaacaacaactggggattccgacccaagagactcaacttcaagctctttaacattcaagtcaaagaggtcacgcagaatgacggtacgacgacgattgccaataaccttaccagcacggttccggtgtttactgactcggagtaccagctcccgtacgtcctcggctcggcgcatcaaggatgcctcccgccgtttccagcggacgtcttcatggtcccacagtatggatacctcaccctgaacaacgggagtcaggcggtaggacgctcttccttttactgcctggagtactttccttctcagatgcttcgtaccggaaacaactttaccttcagttacacctttgaagacgttcctttccacagcagctacgctcacagtcaaagtctggaccggctgatgaatcctcttatcgaccagtacctgtattatctaaacaaaacacaatcaaatagtggaactcttcagcagtctcggctactgtttagtcaagctggacctaccagcatgtctcttcaagctaaaaactggctgcctggaccttgctacagacaacagcgtctgtcaaagcaggcaaacgacaacaacaacagcaactttccctggactgcggctacaaagtatcatctaaatggccgggactcgttggttaatccaggaccagctatggccagccacaaagacgatgaagaaaagtttttccccatgcatggaaccctgatatttggcaaacaagggacaaatgctaacgacgcggatttggacaatgtcatgattacagatgaagaagaaatccgtaccaccaatcccgtggctacggagcagtacgggactgtgtcaaataatttgcaaaactcaaatactggtccaactactggaactgtcaatcaccaaagagcgttacctggtatggtgtggcaggatcgagacgtgtaccttcagggacccatttgggccaagattcctcacaccgatggacactttcacccttctccgctgatgggaggttttggactcaaacacccgcctcctcagatcatgatcaaaaacactcccgttccagccaatcctcccacaaacttcagttctgccaagtttgcttctttcatcacacagtattccacgggacaggttagcgtggagatcgagtgggagctgcagaaggagaacagcaaacgctggaaccccgagatccagtacacttccaactacaacaagtctgttaatgtggactttactgtggacactaatggtgtgtattcagagcctcgccccattggcaccagatacctgactcgtaatctgtaa

SEQ ID NO: 3646 - DNA, 2208 bp, synthetic construct
  misc_feature 1..2208: note = source = /note="Description of Artificial Sequence: Synthetic polynucleotide"
  source 1..2208: mol_type = other DNA
atggctgccgatggttatcttccagattggctcgaggacactctctctgaaggaataagacagtggtggaagctcaaacctggcccaccaccgccaaagcccgcagggcggcataaggacgacagcaggggtcttgtgcttcctgggtacaagtacctcggacccttcaacggactcgacaagggagagccggtcaacgaggcagacgccgcggccctcgagcacgacaaggcctacgaccggcagctcgacagcggagacaacccgtacctcaagtacaaccacgccggcgcggagtttcaggagcgccttaaagaagatacgtcttttgggggcaacctcggacgagcagtattccaggcgaaaaagagggttcttgaacctctgggcctggttgaggagcctgttaagacggccccgggaaaaaagaggccggtagagcactctcctgtggagccagactcctcctcgggaaccggaaaagcgggccagcagcctgcgaggaagagattgaattttggtcagactggagacgcagactccgtacctgacccccagcctctcggacagccaccagcagcccccacaagtttgggatctactacaatggctacaggcagtggcgcaccaatggcagacaataacgagggtgccgatggagtgggtaattcctcagggaattggcattgcgattcccaatggttgggcgacagagtcatcaccaccagcacccgaacctgggccctgcccacctacaacaaccacctctacaagcaaatctccagccaatcaggagccagcaacgacaaccactactttggctacagcaccccctgggggtattttgacttcaacagattccactgccacttttcaccacgtgactggcaaagactcatcaacaacaactggggattccgacccaagagactcaacttcaagctctttaacattcaagtcaaagaggtcacgcagaatgacggtacgacgacgattgccaataaccttaccagcacggttccggtgtttactgactcggagtaccagctcccgtacgtcctcggctcggcgcatcaaggatgcctcccgccgtttccagcggacgtcttcatggtcccacagtatggatacctcaccctgaacaacgggagtcaggcggtaggacgctcttccttttactgcctggagcactttccttctcagatgcttcgtaccggaaacaactttaccttcagttacacctttgaagacgttcctttccacagcagctacgctcacagtcaaagtctggaccggctgatgaatcctcttatcgaccagtacctgtattatctaaacaaaacacaatcaaatagtggaactcttcagcagtctcggctactgtttagtcaagctggacctaccagcatgtctcttcaagctaaaaactggctgcctggaccttgctacagacaacagcgtctgtcaaagcaggcaaacgacaacaacaacagcaactttccctggactgcggctacaaagtatcatctaaatggccgggactcgttggttaatccaggaccagctatggccagccacaaagacgatgaagaaaagtttttccccatgcatggaaccctgatatttggcaaacaagggacaaatgctaacgacgcggatttggacaatgtcatgattacagatgaagaagaaatccgtaccaccaatcccgtggctacggagcagtacgggactgtgtcaaataatttgcaaaactcaaatactggtccaactactggaactgtcaatcaccaaagagcgttacctggtatggtgtggcaggatcgagacgtgtaccttcagggacccatttgggccaagattcctcacaccgatggacactttcacccttctccgctgatgggaggttttggactcaaacacccgcctcctcagatcatgatcaaaaacactcccgttccagccaatcctcccacaaacttcagttctgccaagtttgcttctttcatcacacagtattccacgggacaggttagcgtggagatcgagtgggagctgcagaaggagaacagcaaacgctggaaccccgagatccagtacacttccaactacaacaagtctgttaatgtggactttactgtggacactaatggtgtgtattcagagcctcgccccattggcaccagatacctgactcgtaatctgtaa

SEQ ID NO: 3647 - DNA, 2208 bp, synthetic construct
  misc_feature 1..2208: note = source = /note="Description of Artificial Sequence: Synthetic polynucleotide"
  source 1..2208: mol_type = other DNA
atggctgccgatggttatcttccagattggctcgaggacactctctctgaaggaataagacagtggtggaagctcaaacctggcccaccaccgccaaagcccgcagggcggcataaggacgacagcaggggtcttgtgcttcctgggtacaagtacctcggacccttcaacggactcgacaagggagagccggtcaacgaggcagacgccgcggccctcgagcacgacaaggcctacgaccggcagctcgacagcggagacaacccgtacctcaagtacaaccacgccggcgcggagtttcaggagcgccttaaagaagatacgtcttttgggggcaacctcggacgagcagtattccaggcgaaaaagagggttcttgaacctctgggcctggttgaggagcctgttaagacggccccgggaaaaaagaggccggtagagcactctcctgtggagccagactcctcctcgggaaccggaaaagcgggccagcagcctgcgaggaagagattgaattttggtcagactggagacgcagactccgtacctgacccccagcctctcggacagccaccagcagcccccacaagtttgggatctactacaatggctacaggcagtggcgcaccaatggcagacagtaacgagggtgccgatggagtgggtaattcctcagggaattggcattgcgattcccaatggttgggcgacagagtcatcaccaccagcacccgaacctgggccctgcccacctacaacaaccacctctacaagcaaatctccagccaatcaggagccagcaacgacaaccactactttggctacagcaccccctgggggtattttgacttcaacagattccactgccacttttcaccacgtgactggcaaagactcatcaacaacaactggggattccgacccaagagactcaacttcaagctctttaacattcaagtcaaagaggtcacgcagaatgacggtacgacgacgattgccaataaccttaccagcacggttccggtgtttactgactcggagtaccagctcccgtacgtcctcggctcggcgcatcaaggatgcctcccgccgtttccagcggacgtcttcatggtcccacagtatggatacctcaccctgaacaacgggagtcaggcggtaggacgctcttccttttactgcctggagtactttccttctcagatgcttcgtaccggaaacaactttaccttcagttacacctttgaagacgttcctttccacagcagctacgctcacagtcaaagtctggaccggctgatgaatcctcttatcgaccagtacctgtattatctaaacaaaacacaatcaaatagtggaactcttcagcagtctcggctactgtttagtcaagctggacctaccagcatgtctcttcaagctaaaaactggctgcctggaccttgctacagacaacagcgtctgtcaaagcaggcaaacgacaacaacaacagcaactttccctggactgcggctacaaagtatcatctaaatggccgggactcgttggttaatccaggaccagctatggccagccacaaagacgatgaagaaaagtttttccccatgcatggaaccctgatatttggcaaacaagggacaaatgctaacgacgcggatttggacaatgtcatgattacagatgaagaagaaatccgtaccaccaatcccgtggctacggagcagtacgggactgtgtcaaataatttgcaaaactcaaatactggtccaactactggaactgtcaatcaccaaagagcgttacctggtatggtgtggctggatcgagacgtgtaccttcagggacccatttgggccaagattcctcacaccgatggacactttcacccttctccgctgatgggaggttttggactcaaacacccgcctcctcagatcatgatcaaaaacactcccgttccagccaatcctcccacaaacttcagttctgccaagtttgcttctttcatcacacagtattccacgggacaggttagcgtggagatcgagtgggagctgcagaaggagaacagcaaacgctggaaccccgagatccagtacacttccaactacaacaagtctgttaatgtggactttactgtggacactaatggtgtgtattcagagcctcgccccattggcaccagatacctgactcgtaatctgtaa

SEQ ID NO: 3648 - DNA, 2208 bp, synthetic construct
  misc_feature 1..2208: note = source = /note="Description of Artificial Sequence: Synthetic polynucleotide"
  source 1..2208: mol_type = other DNA
atggctgccgatggttatcttccagattggctcgaggacactctctctgaaggaataagacagtggtggaggctcaaacctggcccaccaccgccaaagcccgcagggcggcataaggacgacagcaggggtcttgtgcttcctgggtacaagtacctcggacccttcaacggactcgacaagggagagccggtcaacgaggcagacgccgcggccctcgagcacgacaaggcctacgaccggcagctcgacagcggagacaacccgtacctcaagtacaaccacgccggcgcggagtttcaggagcgccttaaagaagatacgtcttttgggggcaacctcggacgagcagtattccaggcgaaaaagagggttcttgaacctctgggcctggttgaggagcctgttaagacggccccgggaaaaaagaggccggtagagcactctcctgtggagccagactcctcctcgggaaccggaaaagcgggccagcagcctgcgaggaagagattgaattttggtcagactggagacgcagactccgtacctgacccccagcctctcggacagccaccagcagcccccacaagtttgggatctactacaatggctacaggcagtggcgcaccaatggcagacaataacgagggtgccgatggagtgggtaattcctcagggaattggcattgcgattcccaatggttgggcgacagagtcatcaccaccagcacccgaacctgggccctgcccacctacaacaaccacctctacaagcaaatctccagccaatcaggagccagcaacgacaaccactactttggctacagcaccccctgggggtattttgacttcaacagattccactgccacttttcaccacgtgactggcaaagactcatcaacaacaactggggattccgacccaagagactcaacttcaagctctttaacattcaagtcaaagaggtcacgcagaatgacggtacgacgacgattgccaataaccttaccagcacggttccggtgtttactgactcggagtaccagctcccgtacgtcctcggctcggcgcatcaaggatgcctcccgccgtttccagcggacgtcttcatggtcccacagtatggatacctcaccctgaacaacgggagtcaggcggtaggacgctcttccttttactgcctggagtactttccttctcagatgcttcgtaccggaaacaactttaccttcagttacacctttgaagacgttcctttccacagcagctacgctcacagtcaaagtctggaccggctgatgaatcctcttatcgaccagtacctgtattatctaaacaaaacacaatcaaatagtggaactcttcagcagtctcggctactgtttagtcaagctggacctaccagcatgtctcttcaagctaaaaactggctgcctggaccttgctacagacaacagcgtctgtcaaagcaggcaaacgacaacaacaacagcaactttccctggactgcggctacaaagtatcatctaaatggccgggactcgttggttaatccaggaccagctatggccagccacaaagacgatgaagaaaagtttttccccatgcatggaaccctgatatttggcaaacaagggacaaatgctaacgacgcggatttggacaatgtcatgattacagatgaagaagaaatccgtaccaccaatcccgtggctacggagcagtacgggactgtgtcaaataatttgcaaaactcaaatactggtccaactactggaactgtcaatcaccaaagagcgttacctggtatggtgtggcaggatcgagacgtgtaccttcagggacccatttgggccaagattcctcacaccgatggacactttcacccttctccgctgatgggaggttttggactcaaacacccgcctcctcagatcatgatcaaaaacactcccgttccagccaatcctcccacaaacttcagttctgccaagtttgcttctttcatcacacagtattccacgggacaggttagcgtggagatcgagtgggagctgcagaaggagaacagcaaacgctggaaccccgagatccagtacacttccaactacaacaagtctgttaatgtggactttactgtggacactaatggtgtgtattcagagcctcgccccattggcaccagatacctgactcgtaatctgtaa

SEQ ID NO: 3649 - DNA, 2208 bp, synthetic construct
  misc_feature 1..2208: note = source = /note="Description of Artificial Sequence: Synthetic polynucleotide"
  source 1..2208: mol_type = other DNA
atggctgccgatggttatcttccagattggctcgaggacactctctctgaaggaataagacagtggtggaagctcaaacctggcccaccaccgccaaagcccgcagggcggcataaggacgacagcaggggtcttgtgcttcctgggtacaagtacctcggacccttcaacggactcgacaagggagagccggtcaacgaggcagacgccgcggccctcgagcacgacaaggcctacgaccggcagctcgacagcggagacaacccgtacctcaagtacaaccacgccggcgcggagtttcaggagcgccttaaagaagatacgtcttttgggggcaacctcggacgagcagtattccaggcgaaaaagagggttcttgaacctctgggcctggttgaggagcctgttaagacggccccgggaaaaaagaggccggtagagcactctcctgtggagccagactcctcctcgggaaccggaaaagcgggccagcagcctgcgaggaagagattgaattttggtcagactggagacgcagactccgtacctgacccccagcctctcggacagccaccagcagcccccacaagtttgggatctactacaatggctacaggcagtggcgcaccaatggcagacaataacgagggtgccgatggagtgggtaattcctcagggaattggcattgcgattcccaatggttgggcgacagagtcatcaccaccagcacccgaacctgggccctgcccacctacaacaaccacctctacaagcaaatctccagccaatcaggagccagcaacgacaaccactactttggctacagcaccccctgggggtattttgacttcaacagattccactgccacttttcaccacgtgactggcaaagactcatcaacaacaactggggattccgacccaagagactcaacttcaagctctttaacattcaagtcaaagaggtcacgcagaatgacggtacgacgacgattgccaataaccttaccagcacggttccggtgtttactgactcggagtaccagctcccgtacgtcctcggctcggcgcatcaaggatgcctcccgccgtttccagcggacgtcttcatggtcccacagtatggatacctcaccctgaacaacgggagtcaggcggtaggacgctcttccttttactgcctggagtactttccttctcagatgcttcgtaccggaaacaactttaccttcagttacacctttgaagacgttcctttccacagcagctacgctcacagtcaaagtctggaccggctgatgaatcctcttatcgaccagtacctgtattatctaaacaaaacacaatcaaatagtggaactcttcagcagtctcggctactgtttagtcaagctggacctaccagcatgtctcttcaagctaaaaactggctgcctggaccttgctacagacaacagcgtctgtcaaagcaggcaaacgacaacaacaacagcaactttccctggactgcggctacaaagtatcatctaaatggccgggactcgttggttaatccaggaccagctatggccagccacaaagacgatgaagaaaagtttttccccatgcatggaaccctgatatttggcaaacaagggacaaatgctaacgacgcggatttggacaatgtcatgattacagatgaagaagaaatccgtaccaccaatcccgtggctacggagcagtacgggactgtgtcaaataatttgcaaaactcaaatactggtccaactactggaactgtcaatcaccaaagagcgttacctggtatggtgtggcaggatcgagacgtgtaccttcagggacccatttgggccaagattcctcacaccgatggacactttcacccttctccgctgatgggaggttttggactcaaacacccgcctcctcagatcatgatcaaaaacactcccgttccagccaatcctcccacaaacttcagttctgccaagtttgcttctttcatcacacagtattccacgggacaggttagcgtggagatcgagtgggagctgcagaaggagaacagcaaacgctggaaccccgagatccagtacacttccaactacaacaagtctgttaatgtggaccttactgtggacactaatggtgtgtattcagagcctcgccccattggcaccagatacctgactcgtaatctgtaa

SEQ ID NO: 3650 - DNA, 2208 bp, synthetic construct
  misc_feature 1..2208: note = source = /note="Description of Artificial Sequence: Synthetic polynucleotide"
  source 1..2208: mol_type = other DNA
atggctgccgatggttatcttccagattggctcgaggacactctctctgaaggaataagacagtggyggaagctcaaacctggcccaccaccgccaaagcccgcagggcggcataaggacgacagcaggggtcttgtgcttcctgggtacaagtacctcggacccttcaacggactcgacaagggagagccggtcaacgaggcagacgccgcggccctcgagcacgacaaggcctacgaccggcagctcgacagcggagacaacccgtacctcaagtacaaccacgccggcgcggagtttcaggagcgccttaaagaagatacgtcttttgggggcaacctcggacgagcagtattccaggcgaaaaagagggttcttgaacctctgggcctggttgaggagcctgttaagacggccccgggaaaaaagaggccggtagagcactctcctgtggagccagactcctcctcgggaaccggaaaagcgggccagcagcctgcgaggaagagattgaattttggtcagactggagacgcagactccgtacctgacccccagcctctcggacagccaccagcagcccccacaagtttgggatctactacaatggctacaggcagtggcgcaccaatggcagacaataacgagggtgccgatggagtgggtaattcctcagggaattggcattgcgattcccaatggttgggcgacagagtcatcaccaccagcacccgaacctgggccctgcccacctacaacaaccacctctacaagcaaatctccagccaatcaggagccagcaacgacaaccactactttggctacagcaccccctgggggtattttgacttcaacagattccactgccacttttcaccacgtgactggcaaagactcatcaacaacaactggggattccgacccaagagactcaacttcaagctctttaacattcaagtcaaagaggtcacgcagaatgacggtacgacgacgattgccaataaccttaccagcacggttccggtgtttactgactcggagtaccagctcccgtacgtcctcggctcggcgcatcaaggatgcctcccgccgtttccagcggacgtcttcatggtcccacagtatggataccccaccctgaacaacgggagtcaggcggtaggacgctcttccttttactgcctggagtactttccttctcagatgcttcgtaccggaaacaactttaccttcagttacacctttgaagacgttcctttccacagcagctacgctcacagtcaaagtctggaccggctgatgaatcctcttatcgaccagtacctgtattatctaaacaaaacacaatcaaatagtggaactcttcagcagtctcggctactgtttagtcaagctggacctaccagcatgtctcttcaagctaaaaactggctgcctggaccttgctacagacaacagcgtctgtcaaagcaggcaaacgacaacaacaacagcaactttccctgggctgcggctacaaagtatcatctaaatggccgggactcgttggttaatccaggaccagctatggccagccacaaagacgatgaagaaaagtttttccccatgcatggaaccctgatatttggcaaacaagggacaaatgctaacgacgcggatttggacaatgtcatgattacagatgaagaagaaatccgtaccaccaatcccgtggctacggagcagtacgggactgtgtcaaataatttgcaaaactcaaatactggtccaactactggaactgtcaatcaccaaagagcgttacctggtatggtgtggcaggatcgagacgtgtaccttcagggacccatttgggccaagattcctcacaccgatggacactttcacccttctccgctgatgggaggttttggactcaaacacccgcctcctcagatcatgatcaaaaacactcccgttccagccaatcctcccacaaacttcagttctgccaagtttgcttctttcatcacacagtattccacgggacaggttagcgtggagatcgagtgggagctgcagaaggagaacagcaaacgctggaaccccgagatccagtacacttccaactacaacaagtctgttaatgtggactttactgtggacactaatggtgtgtattcagagcctcgccccattggcaccagatacctgactcgtaatctgtaa

SEQ ID NO: 3651 - DNA, 2208 bp, synthetic construct
  misc_feature 1..2208: note = source = /note="Description of Artificial Sequence: Synthetic polynucleotide"
  source 1..2208: mol_type = other DNA
atggctgccgatggttatcttccagattggctcgaggacactctctctgaaggaataagacagtggtggaagctcaaacctggcccaccaccaccaaagcccgcagagcggcatcaggacgacagcaggggtcttgtgcttcctgggtacaagtacctcggacccttcaacggactcgacaaaggagagccggtcaacgaggcagacgctgcggccctcgagcacgacaaggcctacgaccggcagctcgacagcggagacaacccgtacctcaagtacaaccacgccgacgcggagtttcaggagcgtcttaaagaagatacgtcttttgggggcaacctcggacgagcagtcttccaggcgaaaaagagggttcttgaacctctgggcctggttgaggaacctgttaagacggctccgggaaaaaagaggccggtagagcactctcctgcggagccagactcctcctcgggaaccggaaaagcgggccagcagcctgcaagaaagagattgaatttcggtcagactggagacgcagactccgtacctgacccccagcctctcggacagccaccagcagcccccacaagtttgggatctactacaatggctacaggcagtggcgcaccaatggcagacaataacgagggtgccgatggagtgggtaattcctcaggaaattggcattgcgattcccaatggctgggcgacagagtcatcaccaccagcacccgaacctgggccctgcccacctacaacaaccacctctacaagcaaatctccagccaatcaggagcatcgaacgacaaccactactttggctacagcaccccttgggggtattttgacttcaacagattccactgtcacttctccccacgtgactggcaaagactcatcaacaacaactggggattccgacccaagagactcaacttcaagctctttaacattcaagtcaaagaggtcacgcagaatgacggtacgacgacgattgccaataaccttaccagcacggttcaggtgtttactgactcggagtaccagctcccgtacgtcctcggctcggcgcatcaaggatgcctcccgccgtttccagcggacgtcttcatggtcccacagtatggatacctcaccctgaacaacgggagtcaggcggtaggacgctcttccttttactgcctggagtactttccttctcagatgctgcgtaccggaaacaactttaccttcagctacacctttgaggacgtgcctttccacagcagctacgctcacagccagagtttggaccggctgatgaatcctctgatcgaccagtatctgtattatctgaacaggacacaatcaaatagtggaactcttcagcagtctaggctactgtttagccaagctggacccaccagcatgtctcttcaagctaaaaactggctgcctggaccttgctacagacagcagcgtctgtcaaagcaggcaaacgacaacaacaacagcaactttccctggactgcggctacaaagtatcatctaaatggtcgggactcgttggttaatccaggaccagctatggccagccacaaagacgatgaagaaaagtttttccccatgcatggaaccctgatatttggtaaacaaggaacaaatgctaacgacgcggatttggaacatgtcatgattacagatgaagaagaaatcaggaccaccaatcccgtggctacagagcagtacggaaacgtgtcaaataatttgcaaaactcaaatactggtccaactacagaaaatgtcaatcaccagggagcgttacctggtatggtgtggcaggatcgagacgtgtacctgcagggacccatttgggccaagattcctcacaccgacggacactttcacccttctccactgatgggaggttttggactcaaacacccgcctcctcaaatcatgatcaaaaacactcctgttccagccaatcctcctacaaacttcagcgcggcaaagtttgcttccttcatcacacagtattccacgggacaggtcagcgtggagatcgagtgggagctgcagaaggagaacagcaaacgctggaaccccgagatccagtacacttccaactacaacaaatctgttaatgtggactttactgtggacactaatggtgtgtattcagagcctcgccccattggcaccagatacctgactcgtaatctgtaa

SEQ ID NO: 3652 - DNA, 2205 bp, synthetic construct
  misc_feature 1..2205: note = source = /note="Description of Artificial Sequence: Synthetic polynucleotide"
  source 1..2205: mol_type = other DNA
atggctgccgatggttatcttccagattggctcgaggacactctctctgaaggaataagacagtggtggaagctcaaacctggcccaccaccaccaaagcccgcagagcggcatcaggacgacagcaggggtcttgtgcttcctgggtacaagtacctcggacccttcaacggactcgacaaaggagagccggtcaacgaggcagacgctgcggccctcgagcacgacaaggcctacgaccggcagctcgacagcggagacaacccgtacctcaagtacaaccacgccgacgcggagtttcaggagcgtcttaaagaagatacgtcttttgggggcaacctcggacgagcagtcttccaggcgaaaaagagggttcttgaacctctgggcctggttgaggaacctgttaagacggctccgggaaaaaagaggccggtagagcactctcctgcggagccagactcctcctcgggaaccggaaaagcgggccagcagcctgcaagaaagagattgaatttcggtcagactggagacgcagactccgtacctgacccccagcctctcggacagccaccagcagcccccacaagtttgggatctactacaatggctacaggcagtggcgcaccaatggcagacaataacgagggtgccgatggagtgggtaattcctcaggaaattggcattgcgattcccaatggctgggcgacagagtcatcaccaccagcacccgaacctgggccctgcccacctacaacaaccacctctacaagcaaatctccagccaatcaggagcatcgaacgacaaccactactttggctacagcaccccttgggggtattttgacttcaacagattccactgtcacttctccccacgtgactggcaaagactcatcaacaacaactggggattccgacccaagagactcaacttcaagctctttaacattcaagtcaaagaggtcacgcagaatgacggtacgacgacgattgccaataaccttaccagcacggttcaggtgtttactgactcggagtaccagctcccgtacgtcctcggctcggcgcatcaaggatgcctcccgccgtttccagcggacgtcttcatggtcccacagtatggatacctcaccctgaacaacgggagtcaggcggtaggacgctcttccttttactgcctggagtactttccttctcagatgctgcgtaccggaaacaactttaccttcagctacacctttgaggacgtgcctttccacagcagctacgctcacagccagagtttggaccggctgatgaatcctctgatcgaccagtatctgtattatctgaacaggacacaatcaaatagtggaactcttcagcagtctaggctactgtttagccaagctggacccaccagcatgtctcttcaagctaaaaactggctgcctggaccttgctacagacagcagcgtctgtcaaagcaggcaaacgacaacaacagcaactttccctggactgcggctacaaagtatcatctaaatggtcgggactcgttggttaatccaggaccagctatggccagccacaaagacgatgaagaaaagtttttccccatgcatggaaccctgatatttggtaaacaaggaacaaatgctaacgacgcggatttggaacatgtcatgattacagatgaagaagaaatcaggaccaccaatcccgtggctacagagcagtacggaaacgtgtcaaataatttgcaaaactcaaatactggtccaactacagaaaatgtcaatcaccagggagcgttacctggtatggtgtggcaggatcgagacgtgtacctgcagggacccatttgggccaagattcctcacaccgacggacactttcacccttctccactgatgggaggttttggactcaaacacccgcctcctcaaatcatgatcaaaaacactcctgttccagccaatcctcctacaaacttcagcgcggcaaagtttgcttccttcatcacacagtattccacgggacaggtcagcgtggagatcgagtgggagctgcagaaggagaacagcaaacgctggaaccccgagatccagtacacttccaactacaacaaatctgttaatgtggactttactgtggacactaatggtgtgtattcagagcctcgccccattggcaccagatacctgactcgtaatctgtaa

SEQ ID NO: 3653 - DNA, 2205 bp, synthetic construct
  misc_feature 1..2205: note = source = /note="Description of Artificial Sequence: Synthetic polynucleotide"
  source 1..2205: mol_type = other DNA
atggctgccgatggttatcttccagattggctcgaggacactctctctgaaggaataagacagtggtggaagctcaaacctggcccaccaccaaagcccgcagagcggcatcaggacgacagcaggggtcttgtgcttcctgggtacaagtacctcggacccttcaacggactcgacaaaggagagccggtcaacgaggcagacgctgcggccctcgagcacgacaaggcctacgaccggcagctcgacagcggagacaacccgtacctcaagtacaaccacgccgacgcggagtttcaggagcgtcttaaagaagatacgtcttttgggggcaacctcggacgagcagtcttccaggcgaaaaagagggttcttgaacctctgggcctggttgaggaacctgttaagacggctccgggaaaaaagaggccggtagagcactctcctgcggagccagactcctcctcgggaaccggaaaagcgggccagcagcctgcaagaaagagattgaatttcggtcagactggagacgcagactccgtacctgacccccagcctctcggacagccaccagcagcccccacaagtttgggatctactacaatggctacaggcagtggcgcaccaatggcagacaataacgagggtgccgatggagtgggtaattcctcaggaaattggcattgcgattcccaatggctgggcgacagagtcatcaccaccagcacccgaacctgggccctgcccacctacaacaaccacctctacaagcaaatctccagccaatcaggagcatcgaacgacaaccactactttggctacagcaccccttgggggtattttgacttcaacagattccactgtcacttctccccacgtgactggcaaagactcatcaacaacaactggggattccgacccaagagactcaacttcaagctctttaacattcaagtcaaagaggtcacgcagaatgacggtacgacgacgattgccaataaccttaccagcacggttcaggtgtttactgactcggagtaccagctcccgtacgtcctcggctcggcgcatcaaggatgcctcccgccgtttccagcggacgtcttcatggtcccacagtatggatacctcaccctgaacaacgggagtcaggcggtaggacgctcttccttttactgcctggagtactttccttctcagatgctgcgtaccggaaacaactttaccttcagctacacctttgaggacgtgcctttccacagcagctacgctcacagccagagtttggaccggctgatgaatcctctgatcgaccagtatctgtattatctgaacaggacacaatcaaatagtggaactcttcagcagtctaggctactgtttagccaagctggacccaccagcatgtctcttcaagctaaaaactggctgcctggaccttgctacagacagcagcgtctgtcaaagcaggcaaacgacaacaacaacagcaactttccctggactgcggctacaaagtatcatctaaatggtcgggactcgttggttaatccaggaccagctatggccagccacaaagacgatgaagaaaagtttttccccatgcatggaaccctgatatttggtaaacaaggaacaaatgctaacgacgcggatttggaacatgtcatgattacagatgaagaagaaatcaggaccaccaatcccgtggctacagagcagtacggaaacgtgtcaaataatttgcaaaactcaaatactggtccaactacagaaaatgtcaatcaccagggagcgttacctggtatggtgtggcaggatcgagacgtgtacctgcagggacccatttgggccaagattcctcacaccgacggacactttcacccttctccactgatgggaggttttggactcaaacacccgcctcctcaaatcatgatcaaaaacactcctgttccagccaatcctcctacaaacttcagcgcggcaaagtttgcttccttcatcacacagtattccacgggacaggtcagcgtggagatcgagtgggagctgcagaaggagaacagcaaacgctggaaccccgagatccagtacacttccaactacaacaaatctgttaatgtggactttactgtggacactaatggtgtgtattcagagcctcgccccattggcaccagatacctgactcgtaatctgtaa

SEQ ID NO: 3654 - DNA, 2208 bp, synthetic construct
  misc_feature 1..2208: note = source = /note="Description of Artificial Sequence: Synthetic polynucleotide"
  source 1..2208: mol_type = other DNA
atggctgccgatggttatcttccagattggctcgaggacactctctctgaaggaataagacagtggtggaagctcaaacctggcccaccaccaccaaagcccgcagagcggcatcaggacgacagcaggggtcttgtgcttcctgggtacaagtacctcggacccttcaacggactcgacaaaggagagccggtcaacgaggcagacgctgcggccctcgagcacgacaaggcctacgaccggcagctcgacagcggagacaacccgtacctcaagtacaaccacgccgacgcggagtttcaggagcgtcttaaagaagatacgtcttttgggggcaacctcggacgagcagtcttccaggcgaaaaagagggttcttgaacctctgggcctggttgaggaacctgttaagacggctccgggaaaaaagaggccggtagagcactctcctgcggagccagactcctcctcgggaaccggaaaagcgggccagcagcctgcaagaaagagattgaatttcggtcagactggagacgcagactccgtacctgacccccagcctctcggacagccaccagcagcccccacaagtttgggatctactacaatggctacaggcagtggcgcaccaatggcagacaataacgagggtgccgatggagtgggtaattcctcaggaaattggcattgcgattcccaatggctgggcgacagagtcatcaccaccagcacccgaacctgggccctgcccacctacaacaaccacctctacaagcaaatctccagccaatcaggagcatcgaacgacaaccactactttggctacagcaccccttgggggtattttgacttcaacagattccactgtcacttctccccacgtgactggcaaagactcatcaacaacaactggggattccgacccaagagactcaacttcaagctctttaacattcaagtcaaagaggtcacgcagaatgacggtacgacgacgattgccaataaccttaccagcacggttcaggtgtttactgactcggagtaccagctcccgtacgtcctcggctcggcgcatcaaggatgcctcccgccgtttccagcggacgtcttcatggtcccacagtatggatacctcaccctgaacaacgggagtcaggcggtaggacgctcttccttttactgcctggagtactttccttctcagatgctgcgtaccggaaacaactttaccttcagctacacctttgaggacgtgcctttccacagcagctacgctcacagccagagtttggaccggctgatgaatcctctgatcgaccagtatctgtattatctgaacaggacacaatcaaatagtggaactcttcagcagtctaggctactgtttagccaagctggacccaccagcatgtctcttcaagctaaaaactggctgcctggaccttgctacagacagcagcgtctgtcaaagcaggcaaacgacaacaacaacagcaactttccctggactgcggctacaaagtatcatctaaatggtcgggactcgttggttaatccaggaccagctatggccagccacaaagacgatgaagaaaagtttttccccatgcatggaaccctgatatttggtaaacaaggaacaaatgctaacgacgcggatttggaacatgtcatgattacagatgaagaagaaatcaggaccaccaatcccgtggctacagagcagtacggaaacgtgtcaaataatttgcaaaactcaaatactggtccaactacagaaaatgtcaatcaccagggagcgttacctggtatggtgtggcaggatcgagacgcgtacctgcagggacccatttgggccaagattcctcacaccgacggacactttcacccttctccactgatgggaggttttggactcaaacacccgcctcctcaaatcatgatcaaaaacactcctgttccagccaatcctcctacaaacttcagcgcggcaaagtttgcttccttcatcacacagtattccacgggacaggtcagcgtggagatcgagtgggagctgcagaaggagaacagcaaacgctggaaccccgagatccagtacacttccaactacaacaaatctgttaatgtggactttactgtggacactaatggtgtgtattcagagcctcgccccattggcaccagatacctgactcgtaatctgtaa

SEQ ID NO: 3655 - DNA, 2208 bp, synthetic construct
  misc_feature 1..2208: note = source = /note="Description of Artificial Sequence: Synthetic polynucleotide"
  source 1..2208: mol_type = other DNA
atggctgccgatggttatcttccagattggctcgaggacactctctctgaaggaataagacagtggtggaagctcaaacctggcccaccaccaccaaagcccgcagagcggcatcaggacgacagcaggggtcttgtgcttcctgggtacaagtacctcggacccttcaacggactcgacaaaggagagccggtcaacgaggcagacgctgcggccctcgagcacgacaaggcctacgaccggcagctcgacagcggagacaacccgtacctcaagtacaaccacgccgacgcggagtttcaggagcgtcttaaagaagatacgtcttttgggggcaacctcggacgagcagtcttccaggcgaaaaagagggttcttgaacctctgggcctggttgaggaacctgctaagacggctccgggaaaaaagaggccggtagagcactctcctgcggagccagactcctcctcgggaaccggaaaagcgggccagcagcctgcaagaaagagattgaatttcggtcagactggagacgcagactccgtacctgacccccagcctctcggacagccaccagcagcccccacaagtttgggatctactacaatggctacaggcagtggcgcaccaatggcagacaataacgagggtgccgatggagtgggtaattcctcaggaaattggcattgcgattcccaatggctgggcgacagagtcatcaccaccagcacccgaacctgggccctgcccacctacaacaaccacctctacaagcaaatctccagccaatcaggagcatcgaacgacaaccactactttggctacagcaccccttgggggtattttgacttcaacagattccactgtcacttctccccacgtgactggcaaagactcatcaacaacaactggggattccgacccaagagactcaacttcaagctctttaacattcaagtcaaagaggtcacgcagaatgacggtacgacgacgattgccaataaccttaccagcacggttcaggtgtttactgactcggagtaccagctcccgtacgtcctcggctcggcgcatcaaggatgcctcccgccgtttccagcggacgtcttcatggtcccacagtatggatacctcaccctgaacaacgggagtcaggcggtaggacgctcttccttttactgcctggagtactttccttctcagatgctgcgtaccggaaacaactttaccttcagctacacctttgaggacgtgcctttccacagcagctacgctcacagccagagtttggaccggctgatgaatcctctgatcgaccagtatctgtattatctgaacaggacacaatcaaatagtggaactcttcagcagtctaggctactgtttagccaagctggacccaccagcatgtctcttcaagctaaaaactggctgcctggaccttgctacagacagcagcgtctgtcaaagcaggcaaacgacaacaacaacagcaactttccctggactgcggctacaaagtatcatctaaatggtcgggactcgttggttaatccaggaccagctatggccagccacaaagacgatgaagaaaagtttttccccatgcatggaaccctgatatttggtaaacaaggaacaaatgctaacgacgcggatttggaacatgtcatgattacagatgaagaagaaatcaggaccaccaatcccgtggctacagagcagtacggaaacgtgtcaaataatttgcaaaactcaaatactggtccaactacagaaaatgtcaatcaccagggagcgttacctggtatggtgtggcaggatcgagacgtgtacctgcagggacccatttgggccaagattcctcacaccgacggacactttcacccttctccactgatgggaggttttggactcaaacacccgcctcctcaaatcatgatcaaaaacactcctgttccagccaatcctcctacaaacttcagcgcggcaaagtttgcttccttcatcacacagtattccacgggacaggtcagcgtggagatcgagtgggagctgcagaaggagaacagcaaacgctggaaccccgagatccagtacacttccaactacaacaaatctgttaatgtggactttactgtggacactaatggtgtgtattcagagcctcgccccattggcaccagatacctgactcgtaatctgtaa

SEQ ID NO: 3656 - DNA, 2208 bp, synthetic construct
  misc_feature 1..2208: note = source = /note="Description of Artificial Sequence: Synthetic polynucleotide"
  source 1..2208: mol_type = other DNA
atggctgccgatggttatcttccagattggctcgaggacactctctctgaaggaataagacagtggtggaagctcaaacctggcccaccaccaccaaagcccgcagagcggcatcaggacgacagcaggggtcttgtgcttcctgggtacaagtacctcggacccttcaacggactcgacaaaggagagccggtcaacgaggcagacgctgcggccctcgagcacgacaaggcctacgaccggcagctcgacagcggagacaacccgtacctcaagtacaaccacgccgacgcggagtttcaggagcgtcttaaagaagatacgtcttttgggggcaacctcggacgagcagtcttccaggcgaaaaagagggttcttgaacctctgggcctggttgaggaacctgttaagacggctccgggaaaaaagaggccggtagagcactctcctgcggagccagactcctcctcgggaaccggaaaagcgggccagcagcctgcaagaaagagattgaatttcggtcagactggagacgcagactccgtacctgacccccagcctctcggacagccaccagcagcccccacaagtttgggatctactacaatggctacaggcagtggcgcaccaatggcagacaataacgagggtgccgatggagtgggtaattcctcaggaaattggcattgcgattcccaatggctgggcgacagagtcatcaccaccagcacccgaacctgggccctgcccacctacaacaaccacctctacaagcaaatctccagccaatcaggagcatcgaacgacaaccactactttggctacagcaccccttgggggtattttgacttcaacagattccactgtcacttctccccacgtgactggcaaagactcatcaacaacaactggggattccgacccaagagactcaacttcaagctctttaacattcaagtcaaagaggtcacgcagaatgacggtacgacgacgattgccaataaccttaccagcacggttcaggtgtttactgactcggagtaccagctcccgtacgtcctcggctcggcgcatcaaggatgcctcccgccgtttccagcggacgtcttcatggtcccacagtatggatacctcaccctgaacaacgggagtcaggcggtaggacgctcttccttttactgcctggagtactttccttctcagatgctgcgtaccggaaacaactttaccttcagctacacctttgaggacgtgcctttccacagcagctacgctcacagccagagtttggaccggctgatgaatcctctgatcgaccagtatctgtattatctgaacaggacacaatcaaatagtggaactcttcagcagtctaggctactgtttagccaagctggacccaccagcatgtctcttcaagctaaaaactggctgcctggaccttgctacagacagcagcgtctgtcaaagcaggcaaacgacaacaacaacagcaactttccctggactgcggctacaaagtatcatctaaatggtcgggactcgttggttaatccaggaccagctatggccagccacaaagacgatgaagaaaagtttttccccatgcatggaaccctgatatttggtaaacaaggaacaaatgctaacgacgcggatttggaacatgtcatgattacagatgaagaagaaatcaggaccaccaatcccgtggctacagagcagtacggaaacgtgtcaaataatttgcaaaactcaaatactggtccaactacagaaaatgtcaatcaccagggagcgttacctggtatggtgtggcaggatcgagacgtgtacctgcagggacccatttgggccaagattcctcacaccgacggacactttcacccttctccactgatgggaggttttggactcaaacacccgcctcctcaaatcatgatcaaaaacactcctgttccagccaatcctcctacaaacttcagcgcggcaaagtttgcttccttcatcacacagtattccacgggacaggtcagcgtggagatcgagtgggagctgcagaaggagaacagcaaacgctggaaccccgagatccagtacacttccaactacaacaaatctgttaatgtggactttactgtggacactaatggtgcgtattcagagcctcgccccattggcaccagatacctgactcgtaatctgtaa

SEQ ID NO: 3657 - DNA, 2208 bp, synthetic construct
  misc_feature 1..2208: note = source = /note="Description of Artificial Sequence: Synthetic polynucleotide"
  source 1..2208: mol_type = other DNA
atggctgccgatggttatcttccagattggctcgaggacactctctctgaaggaataagacagtggtggaagctcaaacctggcccaccaccgccaaagcccgcagagcggcataaggacgacagcaggggtcttgtgcttcctgggtacaagtacctcggacccttcaacggactcgacaagggagagccggtcaacgaggcagacgccgcggccctcgagcacgacaaggcctacgaccggcagctcgacagcggagacaacccgtacctcaagtacaaccacgccgacgcggagtttcaggagcgccttaaagaagatacgtcttttgggggcaacctcggacgagcagtattccaggcgaaaaagagggttcttgaacctctgggcctggttgaggagcctgttaagacggctccgggaaaaaagaggccggtagagcactctcctgtggagccagactcctcctcgggaaccggaaaagcgggccagcagcctgcgagaaagagattgaattttggtcagactggagacgcagactccgtacctgacccccagcctctcggacagccaccagcagcccccacaagtttgggatctactacaatggctacaggcagtggcgcaccaatggcagacaataacgagggtgccgatggagtgggtaattcctcaggaaattggcattgcgattcccaatggtcgggcgacagagtcatcaccaccagcacccgaacctgggccctgcccacctacaacaaccacctctacaagcaaatctccagccaatcaggagccagcaacgacaaccactactttggctacagcaccccctgggggtattttgacttcaacagattccactgccacttttcaccacgtgactggcaaagactcatcaacaacaactggggattccgacccaagagactcaacttcaagctctttaacattcaagtcaaagaggtcacgcagaatgacggtacgacgacgattgccaataaccttaccagcacggttcaggtgtttactgactcggagtaccagctcccgtacgtcctcggctcggcgcatcaaggatgcctcccgccgtttccagcggacgtcttcatggtcccacagtatggatacctcaccctgaacaacgggagtcaggcggtaggacgctcttccttttactgcctggagtactttccttctcagatgcttcgtaccggaaacaactttaccttcagttacacctttgaagacgttcctttccacagcagctacgctcacagtcaaagtctggaccggctgatgaatcctcttatcgaccagtacctgtattatctaaacaaaacacaatcaaatagtggaactcttcagcagtctcggctactgtttagtcaagctggacctaccagcatgtctcttcaagctaaaaactggctgcctggaccttgctacagacaacagcgtctgtcaaagcaggcaaacgacaacaacaacagcaactttccctggactgcggctacaaagtatcatctaaatggccgggactcgttggttaatccaggaccagctatggccagccacaaagacgatgaagaaaagtttttccccatgcatggaaccctgatatttggcaaacaaggaacaaatgctaacgacgcggatttggacaatgtcatgattacagatgaagaagaaatccgtaccaccaatcccgtggctacggagcagtacgggactgtgtcaaataatttgcaaaactcaaatactggtccaactactggaactgtcaatcaccaaggagcgttacctggtatggtgtggcaggatcgagacgtgtaccttcagggacccatttgggccaagattcctcacaccgatggacactttcacccttctccgctgatgggaggttttggactcaaacacccgcctcctcagatcatgatcaaaaacactcccgttccagccaatcctcccacaaacttcagttctgccaagtttgcttctttcatcacacagtattccacgggacaggttagcgtggagatcgagtgggagctgcagaaggagaacagcaaacgctggaaccccgagatccagtacacttccaactacaacaagtctgttaatgtggactttactgtggacactaatggtgtgtattcagagcctcgccccattggcaccagatacctgactcgtaatctgtaa

SEQ ID NO: 3658 - DNA, 2208 bp, synthetic construct
  misc_feature 1..2208: note = source = /note="Description of Artificial Sequence: Synthetic polynucleotide"
  source 1..2208: mol_type = other DNA
atggctgccgatggttatcttccagattggctcgaggacgctctctctgaaggaataagacagtggtggaagctcaaacctggcccaccaccgccaaagcccgcagagcggcataaggacgacagcaggggtcttgtgcttcctgggtacaagtacctcggacccttcaacggactcgacaagggagagccggtcaacgaggcagacgccgcggccctcgagcacgacaaggcctacgaccggcagctcgacagcggagacaacccgtacctcaagtacaaccacgccgacgcggagtttcaggagcgccttaaagaagatacgtcttttgggggcaacctcggacgagcagtattccaggcgaaaaagagggttcttgaacctctgggcctggttgaggagcccgttaagacggctccgggaaaaaagaggccggtagagcactctcctgtggagccagactcctcctcgggaaccggaaaagcgggccagcagcctgcgagaaagagattgaattttggtcagactggagacgcagactccgtacctgacccccagcctctcggacagccaccagcagcccccacaagtttgggatctactacaatggctacaggcagtggcgcaccaatggcagacaataacgagggtgccgatggagtgggtaattcctcaggaaattggcattgcgattcccaatggtcgggcgacagagtcatcaccaccagcacccgaacctgggccctgcccacctacaacaaccacctctacaagcaaatctccagccaatcaggagccagcaacgacaaccactactttggctacagcaccccctgggggtattttgacttcaacagattccactgccacttttcaccacgtgactggcaaagactcatcaacaacaactggggattccgacccaagagactcaacttcaagctctttaacattcaagtcaaagaggtcacgcagaatgacagtacgacgacgattgccaataaccttaccagcacggttcaggtgtttactgactcggagtaccagctcccgtacgtcctcggctcggcgcatcaaggatgcctcccgccgtttccagcggacgtcttcatggtcccacagtatggatacctcaccctgaacaacgggagtcaggcggtaggacgctcttccttttactgcctggagtactttccttctcagatgcttcgtaccggaaacaactttaccttcagttacacctttgaagacgttcctttccacagcagctacgctcacagtcaaagcctggaccggctgatgaatcctcttatcgaccagtacctgtattatctaaacaaaacacaatcaaatagtggaactcttcagcagtctcggctactgtttagtcaagctggacctaccagcatgtctcctcaagctaaaaactggctgcctggaccttgctacagacaacagcgtctgtcaaagcaggcaaacgacaacaacaacagcaactttccctggactgcggctacaaagtatcatctaaatggccgggactcgttggttaatccaggaccagctatggccagccacaaagacgatgaagaaaagtttttccccatgcatggaaccctgatatttggcaaacaaggaacaaatgctaacgacgcggatttggacaatgtcatgattacagatgaagaagaaatccgtaccaccaatcccgtggctacggagcagtacgggactgtgtcaaataatttgcaaaactcaaatactggtccaactactggaactgtcaatcaccaaggagcgttacctggtatggtgtggcaggatcgagacgtgtaccttcagggacccatttgggccaagattcctcacaccgatggacactttcacccttctccgctgatgggaggttttggactcaaacacccgcctcctcagatcatgatcaaaaacactcccgttccagccaatcctcccacaaacttcagttctgccaagtttgcttctttcatcacacagtattccacgggacaggttagcgtggagatcgagtgggagctgcagaaggagaacagcaaacgctggaaccccgagatccagtacacttccaactacaacaagtctgttaatgtggactttactgtggacactaatggtgtgtattcagagcctcgccccattggcaccagatacctgactcgtaatctgtaa

SEQ ID NO: 3659 - DNA, 2208 bp, synthetic construct
  misc_feature 1..2208: note = source = /note="Description of Artificial Sequence: Synthetic polynucleotide"
  source 1..2208: mol_type = other DNA
atggctgccgatggttatcttccagattggctcgaggacactctctctgaaggaataagacagtggtggaagctcaaacctggcccaccaccgccaaagcccgcagagcggcataaggacgacagcaggggtcttgtgcttcctgggtacaagtacctcggacccttcaacggactcgacaagggagagccggtcaacgaggcaaacgccgcggccctcgagcacgacaaggcctacgaccggcagctcgacagcggagacaacccgtacctcaagtacgaccacgccgacgcggagtttcaggagcgccttaaagaagatacgtcttttgggggcaacctcggacgagcagtattccaggcgaaaaagagggttcttgaacctctgggcctggttgaggagcctgttaagacggctccgggaaaaaagaggtcggtagagcactctcctgtggagccagactcctcctcgggaaccggaaaagcgggccagcagcctgcgagaaagagattgaattttggtcagactggagacgcagactccgtacctgacccccagcctctcggacagccaccagcagcccccacaagtttgggatctactacaatggctacaggcagtggcgcaccaatggcagacaataacgagggtgccgatggagtgggtaattcctcaggaaattggcattgcgattcccaatggtcgggcgacagagtcatcaccaccagcacccgaacctgggccctgcccacctacaacaaccacctctacaagcaaatctccagccaatcaggagccagcaacgacaaccactactttggccacagcaccccctgggggtattttgacttcaacagattccactgccacttttcaccacgtgactggcaaagactcatcaacaacaactggggattccgacccaagagactcaacttcaagctctttaacattcaagtcaaagaggtcacgcagaatgacggtacgacgacgattgccaataaccttaccagcacggttcaggtgtttactgactcggagtaccggctcccgtacgtcctcggctcggcgcatcaaggatgcctcccgccgtttccagcggacgtcttcatggtcccacagtatggatacctcaccctgaacaacgggagtcaggcggtaggacgctcctccttttactgcctggagtactttccttctcagatgcttcgtaccggaaacaactttaccttcagttacacctttgaagacgttcctttccacagcagctacgctcacagtcaaagtctggaccggctgatgaatcctcttatcgaccagtacctgtattatctaaacaaaacacaatcaaatagtggaactcttcagcagtctcggctactgtttagtcaagctggacctaccagcatgtctcttcaagctaaaaactggctgcctggaccttgctacagacaacagcgtctgtcaaagcaggcaaacgacaacaacaacagcaactttccctggactgtggctacaaagtatcatctaaatggccgggactcgttggttaatccaggaccagctatggccagccacaaagacgatgaagaaaagtttttccccatgcatggaaccctgatatttggcaaacaaggaacaaatgctaacgacgcggatttggacaatgtcatgattacagatgaagaagaaatccgtaccaccaatcccgtggctacggagcagtacgggactgtgtcaaataatttgcaaaactcaaatactggtccaactactggaactgtcaatcaccaaggagcgttacctggtatggtgtggcaggatcgagacgtgtaccttcagggacccatttgggccaagattcctcacaccgatggacactttcacccttctccgctgatgggaggttttggactcaaacacccgcctcctcagatcatgatcaaaaacactcccgttccagccaatcctcccacaaacttcagttctgccaagtttgcttctttcatcacacagtattccacgggacaggttagcgtggagatcgagtgggagctgcagaaggagaacagcaaacgctggaaccccgagacccagtacacttccaactacaacaagtctgttaatgtggactttactgtggacactaatggtgtgtattcagagcctcgccccattggcaccagatacctgactcgtaatctgtaa

SEQ ID NO: 3660 - DNA, 2208 bp, synthetic construct
  misc_feature 1..2208: note = source = /note="Description of Artificial Sequence: Synthetic polynucleotide"
  source 1..2208: mol_type = other DNA
atggctgccgatggttatcttccagattggctcgaggacactctctctgaaggaataagacagtggtggaagctcaaacctggcccaccaccgccaaagcccgcagagcggcataaggacgacagcaggggtcttgtgcttcctgggtacaagtacctcggacccttcaacggactcgacaagggagagccggtcaacgaggcaaacgccgcggccctcgagcacgacaaggcctacgaccggcagctcgacagcggagacaacccgtacctcaagtacaaccacgccgacgcggagtttcaggagcgccttaaagaagatacgtcttttgggggcaacctcggacgagcagtattccaggcgaaaaagagggttcttgaacctctgggcctggttgaggagcctgttaagacggctccgggaaaaaagaggccggtagagcactctcctgtggagccagactcctcctcgggaaccggaaaagcgggccagcagcctgcgagaaagagattgaattttggtcagactggagacgcagactccgtacctgacccccagcctctcggacagccaccagcagcccccacaagtttgggatctactacaatggctacaggcagtggcgcaccaatggcagacaataacgagggtgccgatggagtgggtaattcctcaggaaattggcattgcgattcccaatggtcgggcgacagagtcatcaccaccagcacccgaacctgggccctgcccacctacaacaaccacctctacaagcaaatctccagccaatcaggagccagcaacgacaaccactactttggctacagcaccccctgggggtattttgacttcaacagattccactgccgcttttcaccacgtgactggcaaagactcatcaacaacaactggggattccgacccaagagactcaacttcaagctccttaacattcaagtcaaagaggtcacgcagaatgacggtacgacgacgattgccaataaccttaccagcacggttcaggtgtttactgactcggagtaccagctcccgtacgtcctcggctcggcgcatcaaggatgcctcccgccgtttccagcggacgtcttcatggtcccacagtatggatacctcaccctgaacaacgggagtcaggcggtaggacgctcttccttttactgcctggagtactttccttctcagatgcttcgtaccggaaacaactttaccttcagttacacctttgaagacgttcctttccacagcagctacgctcacagtcaaagtctggaccggctgatgaatcctcttatcgaccagtacctgtattatctaaacaaaacacaatcaaatagtggaactcttcagcagtctcggctactgtttagtcaagctggacctaccagcatgtctcttcaagctaaaaactggctgcctggaccttgctacagacaacagcgtctgtcaaagcaggcaaacgacaacaacaacagcaactttccctggactgcggctacaaagtatcatctaaatggccgggactcgttggttaatccaggaccagctatggccagccacaaagacgatgaagaaaagtttttccccatgcatggaaccctgatatttggcaaacaaggaacaaatgctaacgacgcggatttggacaatgtcatggttacagatgaagaagaaatccgtaccaccaatcccgtggctacggagcagtacgggactgtgtcaaataatttgcaaaactcaaatactggtccaactactggaactgtcaatcaccaaggagcgttacctggtatggtgtggcaggatcgagacgtgtaccttcagggacccatttgggccaagattcctcacaccgatggacactttcacccttctccgctgatgggaggttttggactcaaacacccgcctcctcagatcatgatcaaaaacactcccgttccagccaatcctcccacaaacttcagttctgccaagtttgcttctttcatcacacagtattccacgggacaggttagcgtggagatcgagtgggagctgcagaaggagaacagcaaacgctggaaccccgagacccagtacacttccaactacaacaagtctgttaatgtggactttactgtggacactaatggtgtgtattcagagcctcgccccattggcaccagatacctgactcgtaatctgtaa

SEQ ID NO: 3661 - DNA, 2208 bp, synthetic construct
  misc_feature 1..2208: note = source = /note="Description of Artificial Sequence: Synthetic polynucleotide"
  source 1..2208: mol_type = other DNA
atggctgccgatggttatcttccagattggctcgaggacactctctctgaaggaataagacagtggtggaagctcaaacctggcccaccaccgccaaagcccgcagagcggcataaggacgacagcaggggccttgtgcttcctgggtacaagtacctcggacccttcaacggactcgacaagggagagccggtcaacgaggcagacgccgcggccctcgagcacgacaaggcctacgaccggcagctcgacagcggagacaacccgtacctcaagtacaaccacgccgacgcggagtttcaggagcgccttaaagaagatacgtcttttgggggcaacctcggacgagcagtattccaggcgaaaaagagggttcttgaacctctgggcctggttgaggagcctgttaagacggctccgggaaaaaagaggccggtagagcactctcctgtggagccagactcctcctcgggaaccggaaaagcgggccagcagcctgcgagaaagggattgaattttggtcagactggagacgcagactccgtacctgacccccggcctctcggacagccaccagcagcccccgcaagtttgggatctactacaatggctacaggcagtggcgcaccaatggcagacaataacgagggtgccgatggagtgggtaattcctcaggaaattggcattgcgattcccaatggttgggcgacagagtcatcaccaccagcacccgaacctgggccctgcccacctacaacaaccacctctacaagcaaatctccagccaatcaggagccagcaacgacaaccactactttggctacagcaccccctgggggtattttgacttcaacagattccactgccacttttcaccacgtgactggcaaagactcatcaacaacaactggggattccgacccaagagactcaacttcaagctctttaacattcaagtcaaagaggtcacgcagaatgacggtacgacgacgattgccaataaccttaccagcacggttccggtgtttactgactcggagtaccagctcccgtacgtcctcggctcggcgcatcaaggatgcctcccgccgtttccagcggacgtcttcatggtcccacagtatggatacctcaccctgaacaacgggagtcaggcggtaggacgctcttccttttactgcctggagtactttccttctcagatgcttcgtaccggaaacaactttaccttcagttacacctttgaagacgttcctttccacagcagctacgctcacagtcaaagtctggaccggctgatgaatcctcttatcgaccagtacctgtattatctaaacaaaacacaatcaaatagtggaactcttcagcagtctcggctactgtttagtcaagctggacctaccagcatgtctctccaagctaaaaactggctgcctggaccttactacagacaacagcgtctgtcaaagcaggcaaacgacaacaacaacagcaactttccctggactgcggctacaaagtatcatccaaatggccgggactcgttggttgatccaggaccagctatggccagccacaaagacgatgaagaaaagtttttccccatgcatggaaccctgatatttggcaaacaagggacaaatgctaacgacgcggatttggacaatgtcatgattacagatgaagaagaaatccgtaccaccaatcccgtggctacggggcagtacgggactgtgtcaaataatttgcaaaactcaaatactggtccaactactggaactgtcaatcaccaaggagcgttacctggtatggtgtggcaggatcgagacgtgtaccttcagggacccatttgggccaagattcctcacaccgatggacactttcacccttctccgctgatgggaggttttggactcaaacacccgcctcctcagatcatggtcaaaaacactcccgttccagccaatcctcccacaaacttcagttctgccaagtttgtttctttcatcacacggtattccacgggacaggttagcgtggagatcgagtgggagctgcagaaggagaacagcaaacgctggaaccccgagatccagtacacttccaactacaacaagtctgttaatgtggactttactgtggacactaatggtgtgtattcagagcctcgccccattggcaccagatacctgactcgtaatctgtaa

SEQ ID NO: 3662 - DNA, 2208 bp, synthetic construct
  misc_feature 1..2208: note = source = /note="Description of Artificial Sequence: Synthetic polynucleotide"
  source 1..2208: mol_type = other DNA
atggctgccgatggttatcttccagattggctcgaggacactctctctgaaggaataagacagtggtggaagctcaaacctggcccaccaccgccaaagcccgcagagcggcataaggacgacagcaggggtcttgtgcttcctgggtacaagtacctcggacccttcaacggacccgacaagggagagccggtcaacgaggcagacgccgcggccctcgagcacgacaaggcctacgaccggcagctcgacagcggagacaacccgtacctcaagtacaaccacgccgacgcggagtttcaggagcgccttaaagaagatacgtcttttgggggcaacctcggacgagcagtattccaggcgaaaaagagggttcttgaacctctgggcctggttgaggagcctgttaagacggctccgggaaaaaagaggccggtagagcactctcctgtggagccagactcctcctcgggaaccggaaaagcgggccagcagcctgcgagaaagagattgaattttggtcagactggagacgcagactccgtacctgacccccagcctctcggacagccaccagcagcccccacaagtttgggatctactacaatggctacaggcagtggcgcaccaatggcagacaataacgagggtgccgatggagtgggtaattcctcaggaaattggcattgcgattcccaatggtcgggcgacagagtcatcaccaccagcacccgaacctgggccctgcccacctacaacaaccacctctacaagcaaatctccagccaatcaggagccagcaacgacaaccactactttggctacagcaccccctgggggtattttgacttcaacagattccactgccacttttcaccacgtgactggcaaagactcatcaacaacaactggggattccgacccaagagactcaacttcaagctctttaacattcaagtcaaagaggtcacgcagaatgacggtacgacgacgattgccaataaccttaccagcacggttcaggtgtttactgactcggagtaccagctcccgtacgtcctcggctcggcgcatcaaggatgcctcccgccgtttccagcggacgtcttcatggtcccacagtatggatacctcaccctgaacaacgggagtcaggcggtaggacgctcttccttttactgcctggagtactttccttctcagatgcttcgtaccggaaacaactttaccttcagttacacctttgaagacgttcctttccacagcagctacgctcacagtcaaagtctggaccggctgatgaatcctcttatcgaccagtacctgtattatctaaacaaaacacaatcaaatagtggaactcttcagcagtctcggctactgtttagtcaagctggacctaccagcatgtctcttcaagctaaaaactggctgcctggaccttgctacagacaacagcgtctgtcaaagcaggcaaacgacaacaacaacagcaactttccctggactgcggctacaaagtatcatctaaatggccgggactcgttggttaatccaggaccagctatggccagccacaaagacgatgaagaaaagtttttccccatgcatggaaccctgatatttggcaaacaaggaacaaatgctaacgacgcggatttggacaatgtcatgattacagatgaagaagaaatccgtaccaccaatcccgtggctacggagcagtacgggactgtgtcaaataatttgcaaaactcaaatactggtccaactactggaactgtcaatcaccaaggagcgttacctggtatggtgtggcaggatcgagacgtgtaccttcagggacccatttgggccaagattcctcacaccgatggacactttcacccttctccgctgatgggaggttttggactcaaacacccgcctcctcagatcatgatcaaaaacactcccgttccagccaatcctcccacaaacttcagttctgccaagtttgcttctttcatcacacagtattccacgggacaggttagcgtggagatcgagtgggagctgcagaaggagaacagcaaacgctggaaccccgagatccagtacacttccaactacaacaagtctgttaatgtggactttactgtggacactaatggtgtgtattcagagcctcgccccattggcaccagatacctgactcgtaatctgtaa

SEQ ID NO: 3663 - DNA, 2208 bp, synthetic construct
  misc_feature 1..2208: note = source = /note="Description of Artificial Sequence: Synthetic polynucleotide"
  source 1..2208: mol_type = other DNA
atggctgccgatggttatcttccagattggctcgaggacactctctctgaaggaataagacagtggtggaagctcaaacctggcccaccaccgccaaagcccgcagagcggcataaggacgacagcaggggtcttgtgcttcctgggtacaagtacctcggacccttcaacggactcgacaagggagagccggtcaacgaggcagacgccgcggccctcgagcacgacaaggcctacgaccggcagctcgacagcggagacaacccgtacctcaagtacaaccacgccgacgcggagtttcaggagcgccttaaagaagatacgtcttttgggggcaacctcggacgagcagtattccaggcgaaaaagagggttcttgaacctctgggcctggttgaggagcctgttaagacggctccgggaaaaaagaggccggtagagcactctcctgtggagccagactcctcctcgggaaccggaaaagcgggccagcagcctgcgagaaagagattgaattttggtcagactggagacgcagactccgtacctgacccccagcctctcggacagccaccagcagcccccacaagtttgggatctactacaatggctacaggcagtggcgcaccaatggcagacaataacgagggtgccgatggagtgggtaattcctcaggaaattggcattgcgattcccaatggtcgggcgacagagtcatcaccaccagcacccgaacctgggccctgcccacctacaacaaccacctctacaagcaaatctccagccaatcaggagccagcaacgacaaccactactttggctacagcaccccctgggggtattttgacttcaacagattccactgccacttttcaccacgtgactggcaaagactcatcaacaacaactggggattccgacccaagagactcaacttcaagctctttaacattcaagtcaaagaggtcacgcagaatgacggtacgacgacgattgccaataaccttaccagcacggttcaggtgtttactgactcggagtaccagctcccgtacgtcctcggctcggcgcatcaaggatgcctcccgccgtttccagcggacgtcttcatggtcccacagtatggatacctcaccctgaacaacgggagtcaggcggtaggacgctcttccttttactgcctggagtactttccttctcagatgcttcgtaccggaaacaactttaccttcagttacacctttgaagacgttcctttccacagcagctacgctcacagtcaaagtctggaccggctgatgaatcctcttatcgaccagtacctgtattatctaaacaaaacacaatcaaatagtggaactcttcagcagtctcggctactgtttagtcaagctggacctaccagcatgtctcttcaagctaaaaactggctgcctggaccttgctacagacaacagcgtctgtcaaagcaggcaaacgacaacaacaacagcaactttccctggactgcggctacaaagtatcatctaaatggccgggactcgttggttaatccaggaccagctatggccagccacaaagacgatgaagaaaagtttttccccatgcatggaaccctgatatttggcaaacaaggaacaaatgctaacgacgcggatttggacaatgtcatgattacagatgaagaagaaatccgtaccaccaatcccgtggctacggagcagtacgggactgtgtcaaataatttgcaaaactcaaatactggtccaactactggaactgtcaatcaccaaggagcgttacctggtatggtgtggcaggatcgagacgtgtaccttcagggacccatttgggccaagattcctcacaccgatggacactttcacccttctccgctgatgggaggttttggactcaaacacccgcctcctcagatcatgatcaaaaacactcccgttccagccaatcctcccacaaacttcagttctgccaagtttgcttctttcatcacacagtattccacgggacaggttagcgtggagatcgagtgggagctgcagaaggagaacagcaaacgctggaaccccgagacccagtacacttccaactacaacaagtctgttaatgtggactttactgtggacactaatggtgtgtattcagagcctcgccccattggcaccagatacctgactcgtaatctgtaa

SEQ ID NO: 3664 - DNA, 2208 bp, synthetic construct
  misc_feature 1..2208: note = source = /note="Description of Artificial Sequence: Synthetic polynucleotide"
  source 1..2208: mol_type = other DNA
atggctgccgatggttatcttccagattggctcgaggacactctctctgaaggaataagacagtggtggaagctcaaacctggcccaccaccgccaaagcccgcagagcggcataaggacgacagcaggggccttgtgcttcctgggtacaagtacctcggacccttcaacggactcgacaagggagagccggtcaacgaggcagacgccgcggccctcgagcacgacaaggcctacgaccggcagctcgacagcggagacaacccgtacctcaagtacaaccacgccgacgcggagtttcaggagcgccttaaagaagatacgtcttttgggggcaacctcggacgagcagtattccaggcgaaaaagagggttcttgaacctctgggcctggttgaggagcctgttaagacggctccgggaaaaaagaggccggtagagcactctcctgtggagccagactcctcctcgggaaccggaaaagcgggccagcagcctgcgagaaagggattgaattttggtcagactggagacgcagactccgtacctgacccccggcctctcggacagccaccagcagcccccgcaagtttgggatctactacaatggctacaggcagtggcgcaccaatggcagacaataacgagggtgccgatggagtgggtaattcctcaggaaattggcattgcgattcccaatggttgggcgacagagtcatcaccaccagcacccgaacctgggccctgcccacctacaacaaccacctctacaagcaaatctccagccaatcaggagccagcaacgacaaccactactttggctacagcaccccctgggggtattttgacttcaacagattccactgccacttttcaccacgtgactggcaaagactcatcaacaacaactggggattccgacccaagagactcaacttcaagctctttaacattcaagtcaaagaggtcacgcagaatgacggtacgacgacgattgccaataaccttaccagcacggttccggtgtttactgactcggagtaccagctcccgtacgtcctcggctcggcgcatcaaggatgcctcccgccgtttccagcggacgtcttcatggtcccacagtatggatacctcaccctgaacaacgggagtcaggcggtaggacgctcttccttttactgcctggagtactttccttctcagatgcttcgtaccggaaacaactttaccttcagttacacctttgaagacgttcctttccacagcagctacgctcacagtcaaagtctggaccggctgatgaatcctcttatcgaccagtacctgtattatctaaacaaaacacaatcaaatagtggaactcttcagcagtctcggctactgtttagtcaagctggacctaccagcatgtctctccaagctaaaaactggctgcctggaccttactacagacaacagcgtctgtcaaagcaggcaaacgacaacaacaacagcaactttccctggactgcggctacaaagtatcatccaaatggccgggactcgttggttgatccaggaccagctatggccagccacaaagacgatgaagaaaagtttttccccatgcatggaaccctgatatttggcaaacaagggacaaatgctaacgacgcggatttggacaatgtcatgattacagatgaagaagaaatccgtaccaccaatcccgtggctacggrgcagtacgggactgtgtcaaataatttgcaaaactcaaatactggtccaactactggaactgtcaatcaccaaggagcgttacctggtatggtgtggcaggatcgagacgtgtaccttcagggacccatttgggccaagattcctcacaccgatggacactttcacccttctccgctgatgggaggttttggactcaaacacccgcctcctcagatcatggtcaaaaacactcccgttccagccaatcctcccacaaacttcagttctgccaagtttgcttctttcatcacacggtattccacgggacaggttagcgtggagatcgagtgggagctgcagaaggagaacagcaaacgctggaaccccgagatccagtacacttccaactacaacaagtctgttaatgtggactttactgtggacactaatggtgtgtattcagagcctcgccccattggcaccagatacctgactcgtaatctgtaa

SEQ ID NO: 3665 - DNA, 2208 bp, synthetic construct
  misc_feature 1..2208: note = source = /note="Description of Artificial Sequence: Synthetic polynucleotide"
  source 1..2208: mol_type = other DNA
atggctgccgatggttatcttccagattggctcgaggacactctctctgaaggaataagacagtggtggaagctcaaacctggcccaccaccgccaaagcccgcagagcggcataaggacgacagcaggggtcttgtgcttcctgggtacaagtacctcggacccttcaacggactcgacaagggagagccggtcaacgaggcagacgccgcggcccccgagcacgacaaggcctacgaccggcagctcgacagcggagacaacccgtaccccaagtacaaccacgccgacgcggagtttcaggagcgccttaaagaagatacgtcttttgggggcaacctcggacgagcagtattccaggcgaaaaagagggttcttgaacctctgggcctggttgaggagcctgttaagacggctccgggaaaaaagaggccggtagagcactctcctgtggagccagactcctcctcgggaaccggaaaagcgggccagcagcctgcgagaaagagattgaattttggtcagactggagacgcagactccgtacctgacccccagcctctcggacagccaccagcagcccccacaagtttgggatctactacaatggctacaggcagtggcgcaccaatggcagacaataacgagggtgccgatggagtgggtaattcctcaggaaattggcattgcgattcccaatggtcgggcgacagagtcatcaccaccagcacccgaacctgggccctgcccacctacaacaaccacctctacaagcaaatctccagccaatcaggagccagcaacgacaaccactactttggctacagcaccccctgggggtattttgacttcaacagattccactgccacttttcaccacgtgactggcaaagactcatcaacaacaactggggattccgacccaagagactcaacttcaagctctttaacattcaagtcaaagaggtcacgcagaatgacggtacgacgacgattgccaataaccttaccagcacggttcaggtgtttactgactcggagtaccagctcccgtacgtcctcggctcggcgcatcaaggatgcctcccgccgtttccagcggacgtcttcatggtcccacagtatggatacctcaccctgaacaacgggagtcaggcggtaggacgctcttccttttactgcctggagtactttccttctcagatgcttcgtaccggaaacaactttaccttcagttacacctttgaagacgttcctttccacagcagctacgctcacagtcaaagtctggaccggctgatgaatcctcttatcgaccagtacctgtattatctaaacaaaacacaatcaaatagtggaactcttcagcagtctcggctactgtttagtcaagctggacctaccagcatgtctcttcaagctaaaaactggctgcctggaccttgctacagacaacagcgtctgtcaaagcaggcaaacgacaacaacaacagcaactttccctggactgcggctacaaagtatcatctaaatggccgggactcgttggttaatccaggaccagctatggccagccacaaagacgatgaagaaaagtttttccccatgcatggaaccctgatatttggcaaacaaggaacaaatgctaacgacgcggatttggacaatgtcatgattacagatgaagaagaaatccgtaccaccaatcccgtggctacggagcagtacgggactgtgtcaaataatttgcaaaactcaaatactggtccaactactggaactgtcaatcaccaaggagcgttacctggtatggtgtggcaggatcgagacgtgtaccttcagggacccatttgggccaagattcctcacaccgatggacactttcacccttctccgctgatgggaggttttggactcaaacacccgcctcctcagatcatgatcaaaaacactcccgttccagccaatcctcccacaaacttcagttctgccaagtttgcttctttcatcacacagtattccacgggacaggttagcgtggagatcgagtgggagctgcagaaggagaacagcaaacgctggaaccccgagatccagtacacttccaactacaacaagtctgttaatgtggactttactgtggacactaatggtgtgtattcagagcctcgccccattggcaccagatacctgactcgtaatctgtaa

SEQ ID NO: 3666 - DNA, 2208 bp, synthetic construct
  misc_feature 1..2208: note = source = /note="Description of Artificial Sequence: Synthetic polynucleotide"
  source 1..2208: mol_type = other DNA
atggctgccgatggttatcttccagattggctcgaggacactctctctgaaggaataagacagtggtggaagctcaaacctggcccaccaccgccaaagcccgcagagcggcataaggacgacagcaggggtcttgtgcttcctgggtataagtacctcggacccttcaacggactcgacaagggagagccggtcaacgaggcagacgccgcggccctcgagcacgacaaggcctacgaccggcagctcgacagcggagacaacccgtacctcaagtacaaccacgccgacgcggagtttcaggagcgccttaaagaagatacgtcttttgggggcaacctcggacgagcagtattccaggcgaaaaagagggttcttgaacctctgggcctggttgtggagcctgttaagacggctccgggaaaaaagaggccggtagagcactctcctgtggagccagactcctcctcgggaaccggaaaagcgggccagcagcctgcgagaaagagattgaattttggtcagactggagacgcagactccgtacctgacccccagcctctcggacagccaccagcagcccccacaagtttgggatctactacaatggctacaggcagtggcgcaccaatggcagacaataacgagggtgccgatggagtgggtaattcctcaggaaattggcattgcgattcccaatggtcgggcgacagagtcatcaccaccagcacccgaacctgggccctgcccacctacaacaaccacctctacaagcaaatctccagccgatcaggagccagcaacgacaaccactactttggctacagcaccccctgggggtattttgacttcaacggattccactgccacttttcaccacgtgactggcaaagactcatcaacaacaactggggattccgacccaagagactcaacttcaagctctttaacattcaagtcaaagaggtcacgcagaatgacggtacgacgacgattgccaataaccttaccagcacggttcaggtgtttactgactcggagtaccagctcccgcacgtcctcggctcggcgcatcaaggatgcctcccgccgtttccagcggacgtcttcatggtcccacagtatggatacctcaccctgaacaacgggagtcaggcggtaggacgctcttccttttactgcccggagtactttccttctcagatgcttcgtaccggaaacaactttaccttcagttacacctttgaagacgttcctttccacagcagctacgctcacagtcaaagtctggaccggctgatgaatcctcttatcgaccagtacctgtattatctaaacaaaacacaatcaaatagtggaactcttcagcagtctcggctactgtttagtcaagctggacctaccagcatgtctcttcaagctaaaaactggctgcctggaccttgctacagacaacagcgtctgtcaaagcaggcaaacggcaacaacaacagcaactttccctggactgcggctacaaagtatcatctaaatggccgggactcgttggttaatccaggaccagctatggccagccacaaagacgatgaagaaaagtttttccccatgcatggaaccctgatatttggcaaacaaggaacaaatgctaacgacgcggatttggacaatgtcatgattacagatgaagaagaaatccgtaccaccaatcccgtggctacggagcagtacgggactgtgtcaaataatttgcaaaactcaaatactggtccaactactggaactgtcaatcaccaaggagcgttacctggtatggtgtggcaggatcgagacgtgtaccttcagggacccatttgggccaagattcctcacaccgatggacactttcacccttctccgctgatgggaggttttggactcaaacacccgcctcctcagatcatgatcaaaaacactcccgttccagccaatcctcccacaaacttcagttctgccaagtttgcttctttcatcacacagtattccacgggacaggttagcgtggagatcgagtgggagctgcagaaggagaacagcaaacgctggaaccccgagatccagtacacttccaactacaacaagtctgttaatgtggactttactgtggacactaatggtgtgtattcagagcctcgccccattggcaccagatacctgactcgtaatctgtaa

SEQ ID NO: 3667 - DNA, 2208 bp, synthetic construct
  misc_feature 1..2208: note = source = /note="Description of Artificial Sequence: Synthetic polynucleotide"
  source 1..2208: mol_type = other DNA
atggctgccgatggttatcttccagattggctcgaggacactctctctgaaggaataagacagtggtggaagctcaaacctggcccaccgccgccaaagcccgcagagcggcataaggacgacagcaggggtcttgtgcttcctgggtacaagtacctcggacccttcaacggactcgacaagggagagccggtcaacgaggcagacgccgcggccctcgagcacgacaaggcctacgaccggcagctcgacagcggagacaacccgtacctcaagtacaaccacgccgacgcggagtttcaggagcgccttaaagaagatacgtcttttgggggcaacctcggacgagcagtattccaggcgaaaaagagggttcttgaacctctgggcctggttgaggagcctgttaagacggttccgggaaaaaagaggccggtagagcactctcctgtggagccagactcctcctcgggaaccggaaaagcgggccagcagcctgcgagaaagagattgaattttggtcagactggagacgcagactccgtacctgacccccagcctctcggacagccaccagcagcccccacaagtttgggatctactacaatggctacaggcagtggcgcaccaatggcagacaataacgagggtgccgatggagtgggtaattcctcaggaaattggcattgcgattcccaatggtcgggcgacagagtcatcaccaccagcacccgaacctgggccctgcccacctacaacaaccacccctacaagcaaatctccagccaatcaggagccagcaacgacaaccactactttggctacagcaccccctgggggtattttgacttcaacagattccactgccacttttcaccacgtgactggcaaagactcatcaacaacaactggggattccgacccaagagactcaacttcaagctctttaacattcaagtcaaagaggtcacgcagaatgacggtacgacgacgattgccaataaccttaccagcacggttcaggtgtttactgactcggagtaccagctcccgtacgtcctcggctcggcgcatcaaggacgcctcccgccgtttccagcggacgtcttcatggtcccacagtatggatacctcaccctgaacaacgggagtcaggcggtaggacgctcttccttttactgcctggagtactttccttctcagatgcttcgtaccggaaacaactttaccttcagttacacctttgaagacgttcctttccacagcagctacgctcacagtcaaagtctggaccggctgatgaatcctcttatcgaccagtacctgtattatctaaacaaaacacaatcaaatagtggaactcttcagcagtctcggctactgtttagtcaagctggacctactagcatgtctcttcaagctaaaaactggctgcctggaccttgctacagacaacagcgtctgtcaaagcaggcagacgacaacaacaacagcaactttccctggactgcggctacaaagtatcatctaaatggccgggactcgttggttaatccaggaccagctatggccagccacaaagacgatgaagaaaagtttttccccatgcatggaaccctgatatttggcaaacaaggaacaaatgctaacgacgcggatttggacaatgtcatgattacagatgaagaagaaatccgtaccaccaatcccgtggctacggagcagtacgggactgtgtcaaataatttgcaaaactcaaatactggtccaactactggaactgtcaatcaccaaggagcgttacctggtatggtgtggcaggatcgagacgtgtaccttcagggacccatttgggccaagattcctcacaccgatggacactttcacccttctccgctgatgggaggttttggactcaaacacccgcctcctcagatcatgatcaaaaacactcccgttccagccaatccccccacaaacttcagttctgccaagtttgcttctttcatcacacagtattccacgggacaggttagcgtggagatcgagtgggagctgcagaaggagaacagcaaacgctggaaccccgagatccagtacacttccaactacaacaagtctgttaatgtggactttactgtggacgctaatggtgtgtattcagagcctcgccccattggcaccagatacctgactcgtaatctgtaa

SEQ ID NO: 3668 - DNA, 2208 bp, synthetic construct
  misc_feature 1..2208: note = source = /note="Description of Artificial Sequence: Synthetic polynucleotide"
  source 1..2208: mol_type = other DNA
atggctgccgatggttatcttccagattggctcgaggacactctctctgaaggaataagacagtggtggaagctcaaacctggcccaccaccgccaaagcccgcagagcggcataaggacgacagcaggggtcttgtgctttctgggtacaagtacctcggacccttcaacggactcgacaagggagagccggtcaacgaggcagacgccgcggccctcgagcacgacaaggcctacgaccggcagctcgacagcggagacaacccgtacctcaagtacaaccacgccgacgcggagtttcaggagcgccttaaagaagatacgtcttttgggggcaacctcggacgagcagtattccaggcgaaaaagagggttcttgaacctctgggcctggttgaggagcctgttaagacggctccgggaaaaaagaggccggtagagcactctcctgtggagccagactcctcctcgggaaccggaaaagcgggccagcagcctgcgagaaagagattgaattttggtcagactggagacgcagactccgtacctgacccccagcctctcggacagccaccagcagcccccacaagtttgggatctactacaatggctacaggcagtggcgcaccaatggcagacaataacgagggtgccgatggagtgggtaattcctcaggaaattggcattgcgattcccaatggtcgggcgacagagtcatcaccaccagcacccgaacctgggccctgcccacctacaacaaccacctctacaagcaaatctccagccaatcaggagccagcaacgacaaccactactttggctacagcaccccctgggggtattttgacttcaacagattccactgccacttttcaccacgtgactggcaaagactcatcaacaacaactggggattccgacccaagagactcaacttcaagctctttaacattcaagtcaaagaggtcacgcagaatgacggtacgacgacgattgccaataaccttaccagcacggttcaggtgtttactgactcggagtaccagctcccgtacgtcctcggctcggcgcatcaaggatgcctcccgccgtttccagcggacgtcttcatggtcccacagtatggatacctcaccctgaacaacgggagtcaggcggtaggacgctcttccttttactgcctggagtactttccttctcagatgcttcgtaccggaaacaactttaccttcagttacacctttgaagacgttcctttccacagcagctacgctcacagtcaaagtctggaccggctgatgaatcctcttatcgaccagtacctgtattatctaaacaaaacacaatcaaatagtggaactcttcagcagtctcggctactgtttagtcaagctggacctaccagcatgtctcttcaagctaaaaactggctgcctggaccttgctacagacaacagcgtctgtcaaagcaggcaaacgacaacaacaacagcaactttccctggactgcggctacaaagtatcatctaaatggccgggactcgttggttaatccaggaccagctatggccagccacaaagacgatgaagaaaagtttttccccatgcatggaaccctgatatttggcaaacaaggaacaaatgctaacgacgcggatttggacaatgtcatgattacagatgaagaagaaatccgtaccaccaatcccgtggctacggagcagtacgggactgtgtcaaataatttgcaaaactcaaatactggtccaactactggaactgtcaatcaccaaggagcgttacctggtatggtgtggcaggatcgagacgtgtaccttcagggacccatttgggccaagattcctcacaccgatggacactttcacccttctccgctgatgggaggttttggactcaaacacccgcctcctcagatcatgatcaaaaacactcccgttccagccaatccccccacaaacttcagttctgccaagtttgcttctttcatcacacagtattccacgggacaggttagcgtggagatcgagtgggagctgcagaaggagaacagcaaacgctggaaccccgagatccagtacacttccaactacaacaagtctgttaatgtggactttactgtggacactaatggtgtgtattcagagcctcgccccattggcaccagatacctgactcgtaatctgtaa

SEQ ID NO: 3669 - DNA, 2208 bp, synthetic construct
  misc_feature 1..2208: note = source = /note="Description of Artificial Sequence: Synthetic polynucleotide"
  source 1..2208: mol_type = other DNA
atggctgccgatggttatcttccagattggctcgaggacactctctctgaaggaataagacagtggtggaagctcaaacctggcccaccaccgccaaagcccgcagagcggcataaggacgacagcaggggtcttgtgcttcctgggtacaagtacctcggacccttcaacggactcgacaagggagagccggtcaacgaggcagacgccgcggccctcgagcacgacaaggcctacgaccggcagctcgacagcggagacaacccgtacctcaagtacaaccacgccgacgcggagtttcaggagcgccttaaagaagatacgtcttttgggggcaacctcggacgagcagtattccaggcgaaaaagagggttcttgaacctctgggcctggttgaggagcctgttaagacggctccgggaaaaaagaggccggtagagcactctcctgtggagccagactcctcctcgggaaccggaaaagcgggccagcagcctgcgagaaagagattgaattttggtcagactggagacgcagactccgtacctgacccccagcctctcggacagccaccagcagcccccacaagtttgggatctactacaatggctacaggcagtggcgcaccaatggcagacaataacgagggtgccgatggagtgggtaattcctcaggaaattggcattgcgattcccaatggtcgggcgacagagtcatcaccaccagcacccgaacctgggccctgcccacctacaacaaccacctctacaagcaaatctccagccaatcaggagccagcaacgacaaccactactttggctacagcaccccctgggggtattttgacttcaacagattccactgccacttttcaccacgtgactggcaaagactcatcaacaacaactggggattccgacccaagagactcaacttcaagctctttaacattcaagtcaaagaggtcacgcagaatgacggtacgacgacgattgccaataaccttaccagcacggttcaggtgtttactgactcggagtaccagctcccgtacgtcctcggctcggcgcatcaaggatgcctcccgccgtttccagcggacgtcttcatggtcccacagtatggatacctcaccctgaacaacgggagtcaggcggtaggacgctcctccttttactgcctggagtactttccttctcagatgcttcgtaccggaaacaactttaccttcagttacacctttgaagacgttcctttccacagcagctgcgctcacagtcaaagtctggaccggctgatgaatcctcttatcgaccagtacctgtattatctaaacaaaacacaatcaaatagtggaactcttcagcagtctcggctactgtttagtcaagctggacctaccagcatgtctcttcaagctaaaaactggctgcctggaccttgctacagacaacagcgtctgtcaaagcaggcaaacgacaacaacaacagcaactttccctggactgcggctacaaagtatcatctaaatggccgggactcgttggttaatccaggaccagctatggccagccacaaagacgatgaagaaaagtttttccccatgcatggaaccctgatatttggcaaacaaggaacaaatgctaacgacgcggatttggacaatgtcatgattacagatgaagaagaaatccgtaccaccaatcccgtggctacggagcagtacgggactgtgtcaaataatttgcaaaactcaaatactggtccaactactggaactgtcaatcaccaaggagcgttacctggtatggtgtggcaggatcgagacgtgtaccttcagggacccatttgggccaagattcctcacaccgatggacactttcacccttctccgctgatgggaggttttggactcaaacacccgcctcctcagatcatgatcaaaaacactcccgttccagccaatcctcccacaaacttcagttctgccaagtttgcttctttcatcacacagtattccacgggacaggttagcgtggagatcgagtgggagctgcagaaggagaacagcaaacgctggaaccccgagatccagtacacttccaactacaacaagtctgttaatgtggactttactgtggacactaatggtgtgtattcagagcctcgccccattggcaccagatacctgactcgtaatctgtaa

SEQ ID NO: 3670 - DNA, 2208 bp, synthetic construct
  misc_feature 1..2208: note = source = /note="Description of Artificial Sequence: Synthetic polynucleotide"
  source 1..2208: mol_type = other DNA
atggctgccgatggttatcttccagattggctcgaggacactctctctgaaggaataagacagtggtggaagctcaaacctggcccaccaccgccaaagcccgcagagcggcataaggacgacagcaggggtcttgtgcttcctgggtacaagtacctcggacccttcaacggactcgacaagggagagccggtcaacgaggcagacgccgcggccctcgagcacgacaaggcctacgaccggcagctcgacagcggagacaacccgtacctcaagtacaaccacgccgacgcggagtttcaggagcgccttaaagaagatacgtcttttgggggcaacctcggacgagcagtattccaggcgaaaaagagggttcttgaacctctgggcctggttgaggagcctgttaagacggctccgggaaaaaagaggccggtagagcactctcctgtggagccagactcctcctcgggaaccggaaaagcgggccagcagcctgcgagaaagagattgaattttggtcagactggagacgcagactccgtacctgacccccagcctctcggacagccaccagcagcccccacaagtttgggatctactacaatggctacaggcagtggcgcaccaatggcagacaataacgagggtgccgatggagtgggtaattcctcaggaaattggcattgcgattcccaatggtcgggcgacagagtcatcaccaccagcacccgaacctgggccctgcccacctacaacaaccacctctacaagcaaatctccagccaatcaggagccagcaacgacaaccactactttggctacagcaccccctgggggtattttgacttcaacagattccactgccacttttcaccacgtgactggcaaagactcatcaacaacaactggggattccgacccaagagactcaacttcaagctctttaacattcaagtcaaagaggtcacgcagaatgacggtacgacgacgattgccaataaccttaccagcacggttccggtgtttactgactcggagtaccagctcccgtacgtcctcggctcggcgcatcaaggatgcctcccgccgtttccagcggacgtcttcatggtcccacagtatggatacctcaccctgaacaacgggagtcaggcggtaggacgctcttccttttactgcctggagtactttccttctcagatgcttcgtaccggaaacaactttaccttcagttacacctttgaagacgttcctttccacagcagctacgctcacagtcaaagtctggaccggctgatgaatcctcttatcgaccagtacctgtattatctaaacaaaacacaatcaaatagtggaactcttcagcagtctcggctactgtttagtcaagctggacctaccagcatgtctctccaagctaaaaactggctgcctggaccttactacagacaacagcgtctgtcaaagcaggcaaacgacaacaacaacagcaactttccctggactgcggctacaaagtatcatccaaatggccgggactcgttggttgatccaggaccagctatggccagccacaaagacgatgaagaaaagtttttccccatgcatggaaccctgatatttggcaaacaagggacaaatgctaacgacgcggatttggacaatgtcatgattacagatgaagaagaaatccgtaccaccaatcccgtggctacggggcagtacgggactgtgtcaaataatttgcaaaactcaaatactggtccaactactggaactgtcaatcaccaaggagcgttacctggtatggtgtggcaggatcgagacgtgtaccttcagggacccatttgggccaagattcctcacaccgatggacactttcacccttctccgctgatgggaggttttggactcaaacacccgcctcctcagatcatggtcaaaaacactcccgttccagccaatcctcccacaaacttcagttctgccaagtttgcttctttcatcacacggtattccacgggacaggttagcgtggagatcgagtgggagctgcagaaggagaacagcaaacgctggaaccccgagatccagtacacttccaactacaacaagtctgttaatgtggactttactgtggacactaatggtgtgtattcagagcctcgccccattggcaccagatacctgactcgtaatctgtaa

SEQ ID NO: 3671 - DNA, 2208 bp, synthetic construct
  misc_feature 1..2208: note = source = /note="Description of Artificial Sequence: Synthetic polynucleotide"
  source 1..2208: mol_type = other DNA
atggctgccgatggttatcttccagattggctcgaggacactctctctgaaggaataagacagtggtggaagctcaaacctggcccaccaccgccaaagcccgcagagcggcataaggacgacagcaggggtcttgtgcttcctgggtacaagtacctcggacccttcaacggacccgacaagggagagccggtcaacgaggcagacgccgcggccctcgagcacgacaaggcctacgaccggcagctcgacagcggagacaacccgtacctcaagtacaaccacgccgacgcggagtttcaggagcgccttaaagaagatacgtcttttgggggcaacctcggacgagcagtattccaggcgaaaaagagggttcttgaacctctgggcctggttgaggagcctgttaagacggctccgggaaaaaagaggccggtagagcactctcctgtggagccagactcctcctcgggaaccggaaaagcgggccagcagcctgcgagaaagagattgaattttggtcagactggagacgcagactccgtacctgacccccagcctctcggacagccaccagcagcccccacaagtttgggatctactacaatggctacaggcagtggcgcaccaatggcagacaataacgagggtgccgatggagtgggtaattcctcaggaaattggcattgcgattcccaatggtcgggcgacagagtcatcaccaccagcacccgaacctgggccctgcccacctacaacaaccacctctacaagcaaatctccagccaatcaggagccagcaacgacaaccactactttggctacagcaccccctgggggtattttgacttcaacagattccactgccacttttcaccacgtgactggcaaagactcatcaacaacaactggggattccgacccaagagactcaacttcaggctctttaacattcaagtcaaagaggtcacgcagaatgacggtacgacgacgattgccaataaccttaccagcacggttcaggtgtttactgactcggagtaccagctcccgtacgtcctcggctcggcgcatcaaggatgcctcccgccgtttccagcggacgtcttcatggtcccacagtatggatacctcaccctgaacaacgggagtcaggcggtaggacgctcttccttttactgcctggagtactttccttctcagatgcttcgtaccggaaacaactttaccttcagttacacctttgaagacgttcctttccacagcagctacgctcacagtcaaagtctggaccggctgatgaatcctcttatcgaccagtacctgtattatctaaacaaaacacaatcaaatagtggaactcttcagcagtctcggctactgtttagtcaagctggacctaccagcatgtctcttcaagctaaaaactggctgcctggaccttgctacagacaacagcgtctgtcaaagcaggcaaacgacaacaacaacagcaactttccctggactgcggctacaaagtatcatctaaatggccgggactcgttggttaatccaggaccagctatggccagccacaaagacgatgaagaaaagtttttccccatgcatggaaccctgatatttggcaaacaaggaacaaatgctaacgacgcggatttggacaatgtcatgattacagatgaagaagaaatccgtaccaccaatcccgtggctacggagcagtacgggactgtgtcaaataatttgcaaaactcaaatactggtccaactactggaactgtcaatcaccaaggagcgttacctggtatggtgtggcaggatcgagacgtgtaccttcagggacccatttgggccaagattcctcacaccgatggacactttcacccttctccgctgatgggaggttttggactcaaacacccgcctcctcagatcatgatcaaaaacactcccgttccagccaatccccccacaaacttcagttctgccaagtttgcttctttcatcacacagtattccacgggacaggttagcgtggagatcgagtgggagctgcagaaggagaacagcaaacgctggaaccccgagatccagtacacttccaactacaacaagtctgttaatgtggactttactgtggacactaatggtgtgtattcagagcctcgccccattggcaccagatacctgactcgtaatctgtaa

SEQ ID NO: 3672 - DNA, 2208 bp, synthetic construct
  misc_feature 1..2208: note = source = /note="Description of Artificial Sequence: Synthetic polynucleotide"
  source 1..2208: mol_type = other DNA
atggctgccgatggttatcttccagattggctcgaggacactctctctgaaggaataagacagtggtggaagctcaaacctggcccaccaccgccaaagcccgcagagcggcataaggacgacagcaggggtcttgtgcttcctgggtacaagtacctcggacccttcaacggacccgacaagggagagccggtcaacgaggcagacgccgcggccctcgagcacgacaaggcctacgaccggcagctcgacagcggagacaacccgtacctcaagtacaaccacgccgacgcggagtttcaggagcgccttaaagaagatacgtcttttgggggcaacctcggacgagcagtattccaggcgaaaaagagggttcttgaacctctgggcctggttgaggagcctgttaagacggctccgggaaaaaagaggccggtagagcactctcctgtggagccagactcctcctcgggaaccggaaaagcgggccagcagcctgcgagaaagagattgaattttggtcagactggagacgcagactccgtacctgacccccagcctctcggacagccaccagcagcccccacaagtttgggatctactacaatggctacaggcagtggcgcaccaatggcagacaataacgagggtgccgatggagtgggtaattcctcaggaaattggcattgcgattcccaatggtcgggcgacagagtcatcaccaccagcacccgaacctgggccctgcccacctacaacaaccacctctacaagcaaatctccagccaatcaggagccagcaacgacaaccactactttggctacagcaccccctgggggtattttgacttcaacagattccactgccacttttcaccacgtgactggcaaagactcatcaacaacaactggggattccgacccaagagactcaacttcaggctctttaacattcaagtcaaagaggtcacgcagaatgacggtacgacgacgattgccaataaccttaccagcacggttcaggtgtttactgactcggagtaccagctcccgtacgtcctcggctcggcgcatcaaggatgcctcccgccgtttccagcggacgtcttcatggtcccacagtatggatacctcaccctgaacaacgggggtcaggcggtaggacgctcttccttttactgcctggagtactttccttctcagatgcttcgtaccggagacaactttaccttcagttacacctttgaagacgttcctttccacagcagctacgctcacagtcaaagtctggaccggctgatgaatcctcttatcgaccagtacctgtattatctaaacaaaacacaatcaaatagtggaactcttcagcagtctcggctactgtttagtcaagctggacctaccagcatgtctcttcaagctaaaaactggctgcctggaccttgctacagacaacagcgtctgtcaaagcaggcaaacgacaacaacaacagcaactttccctggactgcggctacaaagtatcatctaaatggccgggactcgttggttaatccaggaccagctatggccagccacaaagacgatgaagaaaagtttttccccatgcatggaaccctgatatttggcaaacaaggaacaaatgctaacgacgcggatttggacaatgtcatgattacagatgaagaagaaatccgtaccaccaatcccgtggctacggagcagtacgggactgtgtcaaataatttgcaaaactcaaatactggtccaactactggaactgtcaatcaccaaggagcgttacctggtatggtgtggcaggatcgagacgtgtaccttcagggacccatttgggccaagattcctcacaccgatggacactttcacccttctccgctgatgggaggttttggactcaaacacccgcctcctcagatcatgatcaaaaacactcccgttccagccaatcctcccacaaacttcagttctgccaagtttgcttctttcatcacacagtattccacgggacaggttagcgtggagatcgagtgggagctgcagaaggagaacagcaaacgctggaaccccgagatccagtacacttccaactacaacaagtctgttaatgtggactttactgtggacactaatggtgtgtattcagagcctcgccccattggcaccagatacctgactcgtaatctgtaa

SEQ ID NO: 3673 - DNA, 2208 bp, synthetic construct
  misc_feature 1..2208: note = source = /note="Description of Artificial Sequence: Synthetic polynucleotide"
  source 1..2208: mol_type = other DNA
atggctgccgatggttatcttccagattggctcgaggacactctctctgaaggaataagacagtggtggaagctcaaacctggcccaccaccgccaaagcccgcagagcggcataaggacgacagcaggggtcttgtgcttcctgggtacaagtacctcggacccttcaacggactcgacaagggagagccggtcaacgaggcagacgccgcggccctcgagcacgacaaggcctacgaccggcagctcgacagcggagacaacccgtacctcaagtacaaccacgccgacgcggagtttcaggagcgccttaaagaagatacgtcttttgggggcaacctcggacgagcagtattccaggcgaaaaagagggttcttgaacctctgggcctggttgaggagcctgttaagacggctccgggaaaaaagaggccggtagagcactctcctgtggagccagactcctcctcgggaaccggaaaagcgggccagcagcctgcgagaaagagattgaattttggtcagactggagacgcagactccgtacctgacccccagcctctcggacagccaccagcagcccccacaagtttgggatctactacaatggctacaggcagtggcgcaccaatggcagacaataacgagggtgccgatggagtgggtaattcctcaggaaattggcattgcgattcccaatggtcgggcgacagagtcatcaccaccagcacccgaacctgggccctgcccacctacaacaaccacctctacaagcaaatctccagccaatcaggagccagcaacgacaaccactactttggctacagcaccccctgggggtattttgacttcaacagattccactgccacttttcaccacgtgactggcaaagactcatcaacaacaactggggattccgacccaagagactcaacttcaagctctttaacattcaagtcaaagaggtcacgcagaatgacggtacgacgacgattgccaataaccttaccagcacggttcaggtgtttactgactcggagtaccagctcccgtacgtcctcggctcggcgcatcaaggatgcctcccgccgtttccagcggacgtcttcatggtcccacagtatggatacctcaccctgaacaacgggagtcaggcggtaggacgctcttccttttactgcctggagtactttccttctcagatgcttcgtaccggaaacaactttaccttcagttacacctttgaagacgttcctttccacagcagttacgctcacagtcaaagtctggaccggctgatgaatcctcttatcgaccagtacctgtattatctaaacaaaacacaatcaaatagtggaactcttcagcagtctcggctactgtttagtcaagctggacctaccagcatgtctcttcaagctaaaaactggctgcctggaccttgctacagacaacagcgtctgtcaaagcaggcaaacgacaacaacaacagcaactttccctggactgcggctacaaagtatcatctaaatggccgggactcgttggttaatccaggaccagctatggccagccacaaagacgatgaagaaaagtttttccccatgcatggaaccctgatatttggcaaacaaggaacaaatgctaacgacgcggatttggacaatgccatgattacagatgaagaagaaatccgtaccaccaatcccgtggctacggagcagtacgggactgtgtcaaataatttgcaaaactcaaatactggtccaactactggaactgtcaatcaccaaggagcgttacctggtatggtgtggcaggatcgagacgtgtaccttcagggacccatttgggccaagattcctcacaccgatggacactttcacccttctccgctgatgggaggttttggactcaaacacccgcctcctcagatcatgatcaaaaacactcccgttccagccaatcctcccacaaacttcagttctgccaagtttgcttctttcatcacacagtattccacgggacaggttagcgtggagatcgagtgggagctgcagaaggagaacagcaaacgctggaaccccgagatccagtacacttccaactacaacaagtctgttaatgtggactttactgtggacactaatggtgtgtattcagagcctcgccccattggcaccagatacctgactcgtaatctgtaa

SEQ ID NO: 3674 - DNA, 2208 bp, synthetic construct
  misc_feature 1..2208: note = source = /note="Description of Artificial Sequence: Synthetic polynucleotide"
  source 1..2208: mol_type = other DNA
atggctgccgatggttatcttccagattggctcgaggacactctctctgaaggaataagacagtggtggaagctcaaacctggcccaccaccgccaaagcccgcagagcggcataaggacgacagcaggggtcttgtgcttcctgggtacaagtacctcggacccttcaacggactcgacaagggagagccggtcaacgaggcaaacgccgcggccctcgagcacgacaaggcctacgaccggcagctcgacagcggagacaacccgtacctcaagtacaaccacgccgacgcggagtttcaggagcgccttaaagaagatacgtcttttgggggcaacctcggacgagcagtattccaggcgaaaaagagggttcttgaacctctgggcctggttgaggagcctgttaagacggctccgggaaaaaagaggccggtagagcactctcctgtggagccagactcctcctcgggaaccggaaaagcgggccagcagcctgcgagaaagagattgaattttggtcagactggagacgcagactccgtacctgacccccagcctctcggacagccaccagcagcccccacaagtttgggatctactacaatggctacaggcagtggcgcaccaatggcagacaataacgagggtgccgatggagtgggtaattcctcaggaaattggcattgcgattcccaatggtcgggcgacagagtcatcaccaccagcacccgaacctgggccctgcccacctacaacaaccacctctacaagcaaatctccagccaatcaggagccagcaacgacaaccactactttggctacagcaccccctgggggtattttgacttcaacagattccactgccacttttcaccacgtgactggcaaagactcatcaacaacaactggggattccgacccaagagactcaacttcaagctctttaacattcaagtcaaagaggtcacgcagaatgacggtacgacgacgattgccaataaccttaccagcacggttcaggtgtttactgactcggagtaccagctcccgtacgtcctcggctcggcgcatcaaggatgcctcccgccgtttccagcggacgtcttcatggtcccacagtatggatacctcaccctgaacaacgggagtcaggcggtaggacgctcttccttttactgcctggagtactttccttctcagatgcttcgtaccggaaacaactttaccttcagttacacctttgaagacgttcctttccacagcagctacgctcacagtcaaagtctggaccggctgatgaatcctcttatcgaccagtacctgtattatctaaacaaaacacaatcaaatagtggaactcttcagcagtctcggctactgtttagtcaagctggacctaccagcatgtctcttcaagctaaaaactggctgcctggaccttgctacagacaacagcgtctgtcaaagcaggcaaacgacaacaacaacagcaactttccctggactgcggctacaaagtatcatctaaatggccgggactcgttggttaatccaggaccagctatggccagccacaaagacgatgaagaaaagtttttccccatgcatggaaccctgatatttggcaaacaaggaacaaatgctaacgacgcggatttggacaatgtcatgattacagatgaagaagaaatccgtaccaccaatcccgtggctacggagcagtacgggactgtgtcaaataatttgcaaaactcaaatactggtccaactactggaactgtcaatcaccaaggagcgttacctggtatggtgtggcaggatcgagacgtgtaccttcagggacccatttgggccaagattcctcacaccgatggacactttcacccttctccgctgatgggaggttttggactcaaacacccgcctcctcagatcatgatcaaaaacactcccgttccagccaatcctcccacaaacttcagttctgccaagtttgcttctttcatcacacagtattccacgggacaggttagcgtggagatcgagtgggagctgcagaaggagaacagcaaacgctggaaccccgagacccagtacacttccaactacaacaagtctgttaatgtggactttactgtggacactaatggtgtgtattcagagcctcgccccattggcaccagatacctgactcgtaatctgtaa

SEQ ID NO: 3675 - DNA, 2208 bp, synthetic construct
  misc_feature 1..2208: note = source = /note="Description of Artificial Sequence: Synthetic polynucleotide"
  source 1..2208: mol_type = other DNA
atggctgccgatggttatcttccagattggctcgaggacactctctctgaaggaataagacagtggtggaagctcaaacctggcccaccaccgccaaagcccgcagagcggcataaggacgacagcaggggtcttgtgcttcctgggtacaagtacctcggacccttcaacggacccgacaagggagagccggtcaacgaggcagacgccgcggccctcgagcacgacaaggcctacgaccggcagctcgacagcggagacaacccgtacctcaagtacaaccacgccgacgcggagtttcaggagcgccttaaagaagatacgtcttttgggggcaacctcggacgagcagtattccaggcgaaaaagagggttcttgaacctctgggcctggttgaggagcctgttaagacggctccgggaaaaaagaggccggtagagcactctcctgtggagccagactcctcctcgggaaccggaaaagcgggccagcagcctgcgagaaagagattgaattttggtcagactggagacgcagactccgtacctgacccccagcctctcggacagccaccagcagcccccacaagtttgggatctactacaatggctacaggcagtggcgcaccaatggcagacaataacgagggtgccgatggagtgggtaattcctcaggaaattggcattgcgattcccaatggtcgggcgacagagtcatcaccaccagcacccgaacctgggccctgcccacctacaacaaccacctctacaagcaaatctccagccaatcaggagccagcaacgacaaccactactttggctacagcaccccctgggggtattttgacttcaacagattccactgccacttttcaccacgtgactggcaaagactcatcaacaacaactggggattccgacccaagagactcaacttcaggctctttaacattcaagtcaaagaggtcacgcagaatgacggtacgacgacgattgccaataaccttaccagcacggttcaggtgtttactgactcggagtaccagctcccgtacgtcctcggctcggcgcatcaaggatgcctcccgccgtttccagcggacgtcttcatggtcccacagtatggatacctcaccctgaacaacgggagtcaggcggtaggacgctcttccttttactgcctggagtactttccttctcagatgcttcgtaccggagacaactttaccttcagttacacctttgaagacgttcctttccacagcagctacgctcacagtcaaagtctggaccggctgatgaatcctcttatcgaccagtacctgtattatctaaacaaaacacaatcaaatagtggaactcttcagcagtctcggctactgtttagtcaagctggacctaccagcatgtctcttcaagctaaaaactggctgcctggaccttgctacagacaacagcgtctgtcaaagcaggcaaacgacaacaacaacagcaactttccctggactgcggctacaaagtatcatctaaatggccgggactcgttggttaatccaggaccagctatggccagccacaaagacgatgaagaaaagtttttccccatgcatggaaccctgatatttggcaaacaaggaacaaatgctaacgacgcggatttggacaatgtcatgattacagatgaagaagaaatccgtaccaccaatcccgtggctacggagcagtacgggactgtgtcaaataatttgcaaaactcaaatactggtccaactactggaactgtcaatcaccaaggagcgttacctggtatggtgtggcaggatcgagacgtgtaccttcagggacccatttgggccaagattcctcacaccgatggacactttcacccttctccgctgatgggaggttttggactcaaacacccgcctcctcagatcatgatcaaaaacactcccgttccagccaatcctcccacaaacttcagttctgccaagtttgcttctttcatcacacagtattccacgggacaggttagcgtggagatcgagtgggagctgcagaaggagaacagcaaacgctggaaccccgagatccagtacacttccaactacaacaagtctgttaatgtggactttactgtggacactaatggtgtgtattcagagcctcgccccattggcaccagatacctgactcgtaatctgtaa

SEQ ID NO: 3676 - DNA, 2208 bp, synthetic construct
  misc_feature 1..2208: note = source = /note="Description of Artificial Sequence: Synthetic polynucleotide"
  source 1..2208: mol_type = other DNA
atggctgccgatggttatcttccagattggctcgaggacactctctctgaaggaataagacagtggtggaagctcaaacctggcccaccaccgccaaagcccgcagagcggcataaggacgacagcaggggccttgtgcttcctgggtacaagtacctcggacccttcaacggactcgacaagggagagccggtcaacgaggcagacgccgcggccctcgagcacgacaaggcctacgaccggcagctcgacagcggagacaacccgtacctcaagtacaaccacgccgacgcggagtttcaggagcgccttaaagaagatacgtcttttgggggcaacctcggacgagcagtattccaggcgaaaaagagggttcttgaacctctgggcctggttgaggagcctgttaagacggctccgggaaaaaagaggccggtagagcactctcctgtggagccagactcctcctcgggaaccggaaaagcgggccagcagcctgcgagaaagggattgaattttggtcagactggagacgcagactccgtacctgacccccggcctctcggacagccaccagcagcccccgcaagtttgggatctactacaatggctacaggcagtggcgcaccaatggcagacaataacgagggtgccgatggagtgggtaattcctcaggaaattggcattgcgattcccaatggttgggcgacagagtcatcaccaccagcacccgaacctgggccctgcccacctacaacaaccacctctacaagcaaatctccagccaatcaggagccagcaacgacaaccactactttggctacagcaccccctgggggtattttgacttcaacagattccactgccacttttcaccacgtgactggcaaagactcatcaacaacaactggggattccgacccaagagactcaacttcaagctctttaacattcaagtcaaagaggtcacgcagaatgacggtacgacgacgattgccaataaccttaccagcacggttccggtgtttactgactcggagtaccagctcccgtacgtcctcggctcggcgcatcaaggatgcctcccgccgtttccagcggacgtcttcatggtcccacagtatggatacctcaccctgaacaacgggagtcaggcggtaggacgctcttccttttactgcctggagtactttccttctcagatgcttcgtaccggaaacaactttaccttcagttacacctttgaagacgttcctttccacagcagctacgctcacagtcaaagtctggaccggctgatgaatcctcttatcgaccagtacctgtattatctaaacaaaacacaatcaaatagtggaactcttcagcagtctcggctactgtttagtcaagctggacctaccagcatgtctctccaagctaaaaactggctgcctggaccttactacagacaacagcgtctgtcaaagcaggcaaacgacaacaacaacagcaactttccctggactgcggctacaaagtatcatccaaatggccgggactcgttggttgatccaggaccagctatggccagccacaaagacgatgaagaaaagtttttccccatgcatggaaccctgatatttggcaaacaagggacaaatgctaacgacgcggatttggacaatgtcatgattacagatgaagaagaaatccgtaccaccaatcccgtggctacggggcagtacgggactgtgtcaaataatttgcaaaactcaaatactggtccaactactggaactgtcaatcaccaaggagcgttacctggtatggtgtggcaggatcgagacgtgtaccttcagggacccatttgggccaagattcctcacaccgatggacactttcacccttctccgctgatgggaggttttggactcaaacacccgcctcctcagatcatggtcaaaaacactcccgttccagccaatcctcccacaaacttcagttctgccaagtttgcttctttcatcacacggtattccacgggacaggttagcgtggagatcgagtgggagctgcagaaggagaacagcaaacgctggaaccccgagatccagtacacttccaactacaacaagtctgttaatgtggactttactgtggacactaatggtgtgtattcagagcctcgccccattggcaccagatacctgactcgtaatctgtaa

SEQ ID NO: 3677 - DNA, 2208 bp, synthetic construct
  misc_feature 1..2208: note = source = /note="Description of Artificial Sequence: Synthetic polynucleotide"
  source 1..2208: mol_type = other DNA
atggctgccgatggttatcttccagattggctcgaggacactctctctgaaggaataagacagtggtggaagctcaaacctggcccaccgccgccaaagcccgcagagcggcataaggacgacagcaggggtcttgtgcttcctgggtacaagtacctcggacccttcaacggactcgacaagggagagccggtcaacgaggcagacgccgcggccctcgagcacgacaaggcctacgaccggcagctcgacagcggagacaacccgtacctcaagtacaaccacgccgacgcggagtttcaggagcgccttaaagaagatacgtcttttgggggcaacctcggacgagcagtattccaggcgaaaaagagggttcttgaacctctgggcctggttgaggagcctgttaagacggttccgggaaaaaagaggccggtagagcactctcctgtggagccagactcctcctcgggaaccggaaaagcgggccagcagcctgcgagaaagagattgaattttggtcagactggagacgcagactccgtacctgacccccagcctctcggacagccaccagcagcccccacaagtttgggatctactacaatggctacaggcagtggcgcaccaatggcagacaataacgagggtgccgatggagtgggtaattcctcaggaaattggcattgcgattcccaatggtcgggcgacagagtcatcaccaccagcacccgaacctgggccctgcccacctacaacaaccacccctacaagcaaatctccagccaatcaggagccagcaacgacaaccactactttggctacagcaccccctgggggtattttgacttcaacagattccactgccacttttcaccacgtgactggcaaagactcatcaacaacaactggggattccgacccaagagactcaacttcaagctctttaacattcaagtcaaagaggtcacgcagaatgacggtacgacgacgattgccaataaccttaccagcacggttcaggtgtttactgactcggagtaccagctcccgtacgtcctcggctcggcgcatcaaggacgcctcccgccgtttccagcggacgtcttcatggtcccacagtatggatacctcaccctgaacaacgggagtcaggcggtaggacgctcttccttttactgcctggagtactttccttctcagatgcttcgtaccggaaacaactttaccttcagttacacctttgaagacgttcctttccacagcagctacgctcacagtcaaagtctggaccggctgatgaatcctcttatcgaccagtacctgtattatctaaacaaaacacaatcaaatagtggaactcttcagcagtctcggctactgtttagtcaagctggacctaccagcatgtctcttcaagctaaaaactggctgcctggaccttgctacagacaacagcgtctgtcaaagcaggcagacgacaacaacaacagcaactttccctggactgcggctacaaagtatcatctaaatggccgggactcgttggttaatccaggaccagctatggccagccacaaagacgatgaagaaaagtttttccccatgcatggaaccctgatatttggcaaacaaggaacaaatgctaacgacgcggatttggacaatgtcatgattacagatgaagaagaaatccgtaccaccaatcccgtggctacggagcagtacgggactgtgtcaaataatttgcaaaactcaaatactggtccaactactggaactgtcaatcaccaaggagcgttacctggtatggtgtggcaggatcgagacgtgtaccttcagggacccatttgggccaagattcctcacaccgatggacactttcacccttctccgctgatgggaggttttggactcaaacacccgcctcctcagatcatgatcaaaaacactcccgttccagccaatccccccacaaacttcagttctgccaagtttgcttctttcatcacacagtattccacgggacaggttagcgtggagatcgagtgggagctgcagaaggagaacagcaaacgctggaaccccgagatccagtacacttccaactacaacaagtctgttaatgtggactttactgtggacactaatggtgtgtattcagagcctcgccccattggcaccagatacctgactcgtaatctgtaa

SEQ ID NO: 3678 - DNA, 2208 bp, synthetic construct
  misc_feature 1..2208: note = source = /note="Description of Artificial Sequence: Synthetic polynucleotide"
  source 1..2208: mol_type = other DNA
atggctgccgatggttatcttccagattggctcgaggacactctctctgaaggaataagacagtggtggaagctcaaacctggcccaccaccaccaaagcccgcagagcggcataaggacgacagcaggggtcttgtgcttcctgggtacaagtacctcggacccttcaacggactcgacaaaggagagccggtcaacgaggcagacgccgcggccctcgagcacgacaaggcctacgaccggcagctcgacagcggagacaacccgtacctcaagtacaaccacgccgacgcggagtttcaggagcgtcttaaagaagatacgtcttttgggggcaacctcggacgagcagtcttccaggcaaaaaagagggttcttgaacctctgggcctggttgaggaacctgttaagacggctccgggaaaaaagaggccggtagagcaatctcctgcggagccagactcctcctcgggaaccggaaaggcgggcaaccagcctgcaagaaagagattgaattttggtcagactggagacgcagactccgtacctgacccccagcctctcggacagccaccagcagccccctctggtctgggatctactacaatggctacaggcagtggcgcaccaatggcagacaataacgagggtgccgatggagtgggtaattcctcaggaaattggcattgcgattcccaatggttgggcgacagagtcatcaccaccagcacccgaacctgggccctgcccacctacaacaatcacctctacaagcaaatctccagccaatcaggagccagcaacgacaaccactactttggctacagcaccccctgggggtattttgacttcaacagattccactgccacttttcaccacgtgactggcaaagactcatcaacaacaactggggattccgacccaaaagactcaacttcaagctctttaacattcaagtcaaagaggtcacgcagaatgacggtacgacgacgattgccaataaccttaccagcacggttcaggtgtttactgactcggagtaccagctcccgtacgtcctcggctcggcgcatcaaggatgcctcccgccgtttccagcggacgtcttcatggtcccacagtatggatacctcaccctgaacaacgggagtcaggcggtaggacgctcttccttttactgcctggagtactttccttctcagatgcttcgtaccggaaacaactttaccttcagttacacctttgaagacgttcctttccacagcagctacgctcacagtcaaagtctggaccggctgatgaatcctctgatagaccagtacctgtattatctaaacaaaacacaatcaaatagtggaactcttcagcagtctcggctactgtttagtcaagctggacccaccagcatgtctcttcaagctaaaaactggctgcctggaccttgctacagacaacagcgtctgtcaaagcaggcaaacgacaacaacaacagcaactttccctggactgcggctacaaagtatcatctaaatggccgggactcgttggttaatccaggaccagctatggccagccacaaagacgatgaagaaaagtttttccccatgcatggaaccctgatatttggtaaacaaggaacaaatgctaacgacgcggatttggacaatgtcatgattacagatgaagaagaaatccgcaccaccaatcccgtggctacggagcagtacgggactgtgtcaaataatttgcaaaactcaaatactggtccaactactggaactgtcaatcaccaaggagcgttacctggtatggtgtggcaggatcgagacgtgtaccttcagggacccatttgggccaagattcctcacaccgatggacactttcatccttctccactgatgggaggttttggactcaaacacccgcctcctcagatcatgatcaaaaacactcccgttccagccaatcctcctacaaacttcagttctgccaagtttgcttctttcatcacacagtattccacggggcaggtcagcgtggagatagagtgggagctgcagaaggagaacagcaaacgctggaaccccgagatccagtatacttccaactacaacaagtctgttaatgtggactttactgtggacactaatggtgtgtattcagagcctcgccccattggcaccagatacctgactcgtaatctgtaa

SEQ ID NO: 3679 - DNA, 2205 bp, synthetic construct
  misc_feature 1..2205: note = source = /note="Description of Artificial Sequence: Synthetic polynucleotide"
  source 1..2205: mol_type = other DNA
atggctgccgatggttatcttccagattggctcgaggacactctctctgaaggaataagacagtggtggaagctcaaacctggcccaccaccaaagcccgcagagcggcataaggacgacagcaggggtcttgtgcttcctgggtacaagtacctcggacccttcaacggactcgacaaaggagagccggtcaacgaggcagacgccgcggccctcgagcacgacaaggcctacgaccggcagctcgacagcggagacaacccgtacctcaagtacaaccacgccgacgcggagtttcaggagcgtcttaaagaagatacgtcttttgggggcaacctcggacgagcagtcttccaggcaaaaaagagggttcttgaacctctgggcctggttgaggaacctgttaagacggctccgggaaaaaagaggccggtagagcaatctcctgcggagccagactcctcctcgggaaccggaaaggcgggcaaccagcctgcaagaaagagattgaattttggtcagactggagacgcagactccgtacctgacccccagcctctcggacagccaccagcagccccctctggtctgggatctactacaatggctacaggcagtggcgcaccaatggcagacaataacgagggtgccgatggagtgggtaattcctcaggaaattggcattgcgattcccaatggttgggcgacagagtcatcaccaccagcacccgaacctgggccctgcccacctacaacaatcacctctacaagcaaatctccagccaatcaggagccagcaacgacaaccactactttggctacagcaccccctgggggtattttgacttcaacagattccactgccacttttcaccacgtgactggcaaagactcatcaacaacaactggggattccgacccaaaagactcaacttcaagctctttaacattcaagtcaaagaggtcacgcagaatgacggtacgacgacgattgccaataaccttaccagcacggttcaggtgtttactgactcggagtaccagctcccgtacgtcctcggctcggcgcatcaaggatgcctcccgccgtttccagcggacgtcttcatggtcccacagtatggatacctcaccctgaacaacgggagtcaggcggtaggacgctcttccttttactgcctggagtactttccttctcagatgcttcgtaccggaaacaactttaccttcagttacacctttgaagacgttcctttccacagcagctacgctcacagtcaaagtctggaccggctgatgaatcctctgatagaccagtacctgtattatctaaacaaaacacaatcaaatagtggaactcttcagcagtctcggctactgtttagtcaagctggacccaccagcatgtctcttcaagctaaaaactggctgcctggaccttgctacagacaacagcgtctgtcaaagcaggcaaacgacaacaacaacagcaactttccctggactgcggctacaaagtatcatctaaatggccgggactcgttggttaatccaggaccagctatggccagccacaaagacgatgaagaaaagtttttccccatgcatggaaccctgatatttggtaaacaaggaacaaatgctaacgacgcggatttggacaatgtcatgattacagatgaagaagaaatccgcaccaccaatcccgtggctacggagcagtacgggactgtgtcaaataatttgcaaaactcaaatactggtccaactactggaactgtcaatcaccaaggagcgttacctggtatggtgtggcaggatcgagacgtgtaccttcagggacccatttgggccaagattcctcacaccgatggacactttcatccttctccactgatgggaggttttggactcaaacacccgcctcctcagatcatgatcaaaaacactcccgttccagccaatcctcctacaaacttcagttctgccaagtttgcttctttcatcacacagtattccacggggcaggtcagcgtggagatagagtgggagctgcagaaggagaacagcaaacgctggaaccccgagatccagtatacttccaactacaacaagtctgttaatgtggactttactgtggacactaatggtgtgtattcagagcctcgccccattggcaccagatacctgactcgtaatctgtaa

SEQ ID NO: 3680 - DNA, 2208 bp, synthetic construct
  misc_feature 1..2208: note = source = /note="Description of Artificial Sequence: Synthetic polynucleotide"
  source 1..2208: mol_type = other DNA
atggctgccgatggttatcttccagattggctcgaggacactctctctgaaggaataagacagtggtggaagctcaaacctggcccaccaccaccaaagcccgcagagcggcataaggacgacagcaggggtcttgtgcttcctgggtacaagtacctcggacccttcaacggactcgacaaaggagagccggtcaacgaggcagacgccgcggccctcgagcacgacaaggcctacgaccggcagctcgacagcggagacaacccgtacctcaagtacaaccacgccgacgcggagtttcaggagcgtcttaaagaagatacgtcttttgggggcaacctcggacgagcagtcttccaggcaaaaaagagggttcttgaacctctgggcctggttgaggaacctgttaagacggctccgggaaaaaagaggccggtagagcaatctcctgcggagccagactcctcctcgggaaccggaaaggcgggcaaccagcctgcaagaaagagattgaattttggtcagactggagacgcagactccgtacctgacccccagcctctcggacagccaccagcagccccctctggtctgggatctactacaatggctacaggcagtggcgcaccaatggcagacaataacgagggtgccgatggagtgggtaattcctcaggaaattggcattgcgattcccaatggttgggcgacagagtcatcaccaccagcacccgaacctgggccctgcccacctacaacaatcacctctacaagcaaatctccagccaatcaggagccagcaacgacaaccactactttggctacagcaccccctgggggtattttgacttcaacagattccaccgccacttttcaccacgtgactggcaaagactcatcaacaacaactggggattccgacccaaaagactcaacttcaagctctttaacattcaagtcaaagaggtcacgcagaatgacggtacgacgacgattgccaataaccttaccagcacggttcaggtgtttactgactcggagtaccagctcccgtacgtcctcggctcggcgcatcaaggatgcctcccgccgtttccagcggacgtcttcatggtcccacagtatggatacctcaccctgaacaacgggagtcaggcggtaggacgctcttccttttactgcctggagtactttccttctcagatgcttcgtaccggaaacaactttaccttcagttacacctttgaagacgttcctttccacagcagctacgctcacagtcaaagtctggaccggctgatgaatcctctgatagaccagtacctgtattatctaaacaaaacacaatcaaatagtggaactcttcagcagtctcggctactgtttagtcaagctggacccaccagcatgtctcttcaagctaaaaactggctgcctggaccttgctacagacaacagcgtctgtcaaagcaggcaaacgacaacaacaacagcaactttccctggactgcggctacaaagtatcatctaaatggccgggactcgttggttaatccaggaccagctatggccagccacaaagacgatgaagaaaagtttttccccatgcatggaaccctgatatttggtaaacaaggaacaaatgctaacgacgcggatttggacaatgtcatgattacagatgaagaagaaatccgcaccaccaatcccgtggctacggagcagtacgggactgtgtcaaataatttgcaaaactcaaatactggtccaactactggaactgtcaatcaccaaggagcgttacctggtatggtgtggcaggatcgagacgtgtaccttcagggacccatttgggccaagattcctcacaccgatggacactttcatccttctccactgatgggaggttttggactcaaacacccgcctcctcagatcatgatcaaaaacactcccgttccagccaatcctcctacaaacttcagttctgccaagtttgcttctttcatcacacagtattccacggggcaggtcagcgtggagatagagtgggagctgcagaaggagaacagcaaacgctggaaccccgagatccagtatacttccaactacaacaagtctgttaatgtggactttactgtggacactaatggtgtgtattcagagcctcgccccattggcaccagatacctgactcgtaatctgtaa

SEQ ID NO: 3681 - DNA, 2205 bp, synthetic construct
  misc_feature 1..2205: note = source = /note="Description of Artificial Sequence: Synthetic polynucleotide"
  source 1..2205: mol_type = other DNA
atggctgccgatggttatcttccagattggctcgaggacactctctctgaaggaataagacagtggtggaagctcaaacctggcccaccaccaccaaagcccgcagagcggcataaggacgacagcaggggtcttgtgcttcctgggtacaagtacctcggacccttcaacggactcgacaaaggagagccggtcaacgaggcagacgccgcggccctcgagcacgacaaggcctacgaccggcagctcgacagcggagacaacccgtacctcaagtacaaccacgccgacgcggagtttcaggagcgtcttaaagaagatacgtcttttgggggcaacctcggacgagcagtcttccaggcaaaaaagagggttcttgaacctctgggcctggttgaggaacctgttaagacggctccgggaaaaaagaggccggtagagcaatctcctgcggagccagactcctcctcgggaaccggaaaggcgggcaaccagcctgcaagaaagagattgaattttggtcagactggagacgcagactccgtacctgacccccagcctctcggacagccaccagcagccccctctggtctgggatctactacaatggctacaggcagtggcgcaccaatggcagacaataacgagggtgccgatggagtgggtaattcctcaggaaattggcattgcgattcccaatggttgggcgacagagtcatcaccaccagcacccgaacctgggccctgcccacctacaacaatcacctctacaagcaaatctccagccaatcaggagccagcaacgacaaccactactttggctacagcaccccctgggggtattttgacttcaacagattccactgccacttttcaccacgtgactggcaaagactcatcaacaacaactggggattccgacccaaaagactcaacttcaagctctttaacattcaagtcaaagaggtcacgcagaatgacggtacgacgacgattgccaataaccttaccagcacggttcaggtgtttactgactcggagtaccagctcccgtacgtcctcggctcggcgcatcaaggatgcctcccgccgtttccagcggacgtcttcatggtcccacagtatggatacctcaccctgaacaacgggagtcaggcggtaggacgctcttccttttactgcctggagtactttccttctcagatgcttcgtaccggaaacaactttaccttcagttacacctttgaagacgttcctttccacagcagctacgctcacagtcaaagtctggaccggctgatgaatcctctgatagaccagtacctgtattatctaaacaaaacacaatcaaatagtggaactcttcagcagtctcggctactgtttagtcaagctggacccaccagcatgtctcttcaagctaaaaactggctgcctggaccttgctacagacaacagcgtctgtcaaagcaggcaaacgacaacaacagcaactttccctggactgcggctacaaagtatcatctaaatggccgggactcgttggttaatccaggaccagctatggccagccacaaagacgatgaagaaaagtttttccccatgcatggaaccctgatatttggtaaacaaggaacaaatgctaacgacgcggatttggacaatgtcatgattacagatgaagaagaaatccgcaccaccaatcccgtggctacggagcagtacgggactgtgtcaaataatttgcaaaactcaaatactggtccaactactggaactgtcaatcaccaaggagcgttacctggtatggtgtggcaggatcgagacgtgtaccttcagggacccatttgggccaagattcctcacaccgatggacactttcatccttctccactgatgggaggttttggactcaaacacccgcctcctcagatcatgatcaaaaacactcccgttccagccaatcctcctacaaacttcagttctgccaagtttgcttctttcatcacacagtattccacggggcaggtcagcgtggagatagagtgggagctgcagaaggagaacagcaaacgctggaaccccgagatccagtatacttccaactacaacaagtctgttaatgtggactttactgtggacactaatggtgtgtattcagagcctcgccccattggcaccagatacctgactcgtaatctgtaa

SEQ ID NO: 3682 - DNA, 2208 bp, synthetic construct
  misc_feature 1..2208: note = source = /note="Description of Artificial Sequence: Synthetic polynucleotide"
  source 1..2208: mol_type = other DNA
atggctgccgatggttatcttccagattggctcgaggacactctctctgaaggaataagacagtggtggaagctcaaacctggcccaccaccaccaaggcccgcagagcggcatcaggacgacagcaggggtcttgtgcttcctgggtacaagtacctcggacccttcaacggactcgacaaaggagagccggtcaacgaggcagacgctgcggccctcgagcacgacaaggcctacgaccggcagctcgacagcggagacaacccgtacctcaagtacaaccacgccgacgcggagtttcaggagcgtcttaaagaagatacgtcttttgggggcaacctcggacgagcagtcttccaggcgaaaaagagggttcttgaacctctgggcctggttgaggaacctgttaagacggctccgggaaaaaagaggccggtagagcactctcctgcggagccagactcctcctcgggaaccggaaaagcgggccagcagcctgcaagaaagagattgaatttcggtcagactggagacgcagactccgtacctgacccccagcctctcgggcagccaccagcagcccccacaagtttgggatctactacaatggctacaggcagtggcgcaccaatggcagacaataacgagggtgccgatggagtgggtaattcctcaggaaattggcattgcgattcccaatggctgggcgacagagtcatcaccaccagcacccgaacctgggccctgcccacctacaacaaccacctctacaagcaaatctccagccaatcaggagcatcgaacgacaaccactactttggctacagcaccccttgggggtattttgacttcaacagattccactgtcacttctccccacgtgaccggcaaagactcatcaacaacaactggggattccgacccaagagactcaacttcaagctctttaacattcaagtcaaagaggtcacgcagaatgacggtacgacgacgattgccaataaccttaccagcacggttcaggtgtttactgactcggagtaccagctcccgtacgtcctcggctcggcgcatcaaggatgcctcccgccgtttccagcggacgtcttcatggtcccacagtatggatacctcaccctgaacaacgggagtcaggcggtaggacgctcttccttttactgcctggagtactttccttctcagatgctgcgtaccggaaacaactttaccttcagctacacctttgaggacgtgcccttccacagcagctacgctcacagccagagtttggaccggctgatgaatcctctgatcgaccagtatctgtattatctgaacaggacacaatcaaatagtggaactcttcagcagtctaggctactgtttagccaagctggacctaccagcatgtcccttcaagctaaaaactggctgcctggaccttgctacagacagcagcgtctgtcaaagcaggcaaacgacaacaacaacagcaactttccctggactgcggctacaaagtatcatctaaatggtcgggactcgttggttaatccaggaccagctatggccagccacaaagacgatgaagaaaagtttttccccatgcatggaaccctgatatttggtaaacaaggaacaaatgctaacgacgcggatttggaacatgtcatgattacagatgaagaagaaatcaggaccaccaatcccgtggctacagagcagtacggaaacgtgtcaaataatttgcaaaactcaaatactggtccaactacagaaaatgtcaatcaccagggagcgttacctggtatggtgtggcaggatcgagacgtgtacctgcagggacccatttgggccaagattcctcacaccgacggacactttcacccttctccactgatgggaggttttggactcaaacacccgcctcctcaaatcatgatcaaaaacactcctgttccagccaatcctcctacaaacttcagcgcggcaaagtttgcttccttcatcacacagtattccacgggacaggtcagcgtggagatcgagtgggagctgcagaaggagaacagcaaacgctggaaccccgagatccagtacacttccaactacaacaaatctgttaatgtggactttactgtggacgctaatggtgtgtattcagagcctcgccccattggcaccagatacctgactcgtaatctgtaa

SEQ ID NO: 3683 - DNA, 2208 bp, synthetic construct
  misc_feature 1..2208: note = source = /note="Description of Artificial Sequence: Synthetic polynucleotide"
  source 1..2208: mol_type = other DNA
atggctgccgatggttatcttccagattggctcgaggacactctctctgaaggaataagacagtggtggaagctcaaacctggcccaccaccaccaaggcccgcagagcggcatcaggacgacagcaggggtcttgtgcttcctgggtacaagtacctcggacccttcaacggactcgacaaaggagagccggtcaacgaggcagacgctgcggccctcgagcacgacaaggcctacgaccggcagctcgacagcggagacaacccgtacctcaagtacaaccacgccgacgcggagtttcaggagcgtcttaaagaagatacgtcttttgggggcaacctcggacgagcagtcttccaggcgaaaaagagggttcttgaacctctgggcctggttgaggaacctgttaagacggctccgggaaaaaagaggccggtagagcactctcctgcggagccagactcctcctcgggaaccggaaaagcgggccagcagcctgcaagaaagagattgaatttcggtcagactggagacgcagactccgtacctgacccccagcctctcggacagccaccagcagcccccacaagtttgggatctactacaatggctacaggcagtggcgcaccaatggcagacaataacgagggtgccgatggagtgggtaattcctcaggaaattggcattgcgattcccaatggctgggcgacagagtcatcaccaccagcacccgaacctgggccctgcccacctacaacaaccacctctacaagcaaatctccagccaatcaggagcatcgaacgacaaccactactttggctacagcaccccttgggggtattttgacttcaacagattccactgtcacttctccccacgtgactggcaaagactcatcaacaacaactggggattccgacccaagagactcaacttcaagctctttaacattcaagtcaaagaggtcacgcagaatgacggtacgacgacgattgccaataaccttaccagcacggttcaggtgtttactgactcggagtaccagctcccgtacgtcctcggctcggcgcatcaaggatgcctcccgccgtttccagcggacgtcttcatggtcccacagtatggatacctcaccctgaacaacgggagtcaggcggtaggacgctcttccttttactgcctggagtactttccttctcagatgctgcgtaccggaaacaactttaccttcagctacacctttgaggacgtgcccttccacagcagctacgctcacagccagagtttggaccggctgatgaatcctctgatcgaccagtatctgtattatctgaacaggacacaatcaaatagtggaactcttcagcagtctaggctactgtttagccaagctggacccaccagcatgtcccttcaagctaaaaactggctgcctggaccttgctacagacagcagcgtctgtcaaagcaggcaaacgacaacaacaacagcaactttccctggactgcggctacaaagtatcgtctaaatggtcgggactcgttggttaatccaggaccagctatggccagccacaaagacgatgaagaaaagtttttccccatgcatggaaccctgatatttggtaaacaaggaacaaatgctaacgacgcggatttggaacatgtcatgattacagatgaagaagaaatcaggaccaccaatcccgtggctacagagcagtacggaaacgtgtcaaataatttgcaaaactcaaatactggtccaactacagaaaatgtcaatcaccagggagcgttacctggtatggtgtggcaggatcgagacgtgtacctgcagggacccatttgggccaagattcctcacaccgacggacactttcacccttctccactgatgggaggttttggactcaaacacccgcctcctcaaatcatgatcaaaaacactcctgttccagccaatcctcctacaaacttcagcgcggcaaagtttgcttccttcatcacacagtattccacgggacaggtcagcgtggagatcgagtgggagctgcagaaggagaacagcaaacgctggaaccccgagatccagtacacttccaactacaacaaatctgttaatgtggactttactgtggacgctaatggtgtgtattcagagcctcgccccattggcaccagatacctgactcgtaatctgtaa

SEQ ID NO: 3684 - DNA, 2208 bp, synthetic construct
  misc_feature 1..2208: note = source = /note="Description of Artificial Sequence: Synthetic polynucleotide"
  source 1..2208: mol_type = other DNA
atggctgccgatggttatcttccagattggctcgaggacactctctctgaaggaataagacagtggtggaagctcaaacctggcccaccaccaccaaggcccgcagagcggcatcaggacgacagcaggggtcttgtgcttcctgggtacaagtacctcggacccttcaacggactcgacaaaggagagccggtcaacgaggcagacgctgcggccctcgagcacgacaaggcctacgaccggcagctcgacagcggagacaacccgtacctcaagtacaaccacgccgacgcggagtttcaggagcgtcttaaagaagatacgtcttttgggggcaacctcggacgagcagtcttccaggcgaaaaagagggttcttgaacctctgggcctggttgaggaacctgttaagacggctccgggaaaaaagaggccggtagagcactctcctgcggagccagactcctcctcgggaaccggaaaagcgggccagcagcctgcaagaaagagattgaatttcggtcagactggagacgcagactccgtacctgacccccagcctctcgggcagccaccagcagcccccacaagtttgggatctactacaatggctacaggcagtggcgcaccaatggcagacaataacgagggtgccgatggagtgggtaattcctcaggaaattggcattgcgattcccaatggctgggcgtcagagtcatcaccaccagcacccgaacctgggccctgcccacctacaacaaccacctctacaagcaaatctccagccaatcaggagcatcgaacgacaatcactactttggctacagcaccccttgggggtattttgacttcaacagattccactgtcacttctccccacgtgaccggcaaagactcatcaacaacaactggggattccgacccaagagactcaacttcaagctctttaacattcaagtcaaagaggtcacgcagaatgacggtacgacgacgattgccaataaccttaccagcacggttcaggtgtttactgactcggagtaccagctcccgtacgtcctcggctcggcgcatcaaggatgcctcccgccgtttccagcggacgtcttcatggtcccacagtatggatacctcaccctgaacaacgggagtcaggcggtaggacgctcttccttttactgcctggagtactttccttctcagatgctgcgtaccggaaacaactttaccttcagctacacctttgaggacgtgcccttccacagcagctacgctcacagccagagtttggaccggctgatgaatcctctgatcgaccagtatctgtattatctgaacaggacacaatcaaatagtggaactcttcagcagtctaggctactgtttagccaagctggacctaccagcatgtcccttcaagctaaaaactggctgcctggaccttgctacagacagcagcgtctgtcaaagcaggcaaacgacaacaacaacagcaactttccctggactgcggctacaaagtatcatctaaatggtcgggactcgttggttaatccaggaccagctatggccagccacaaagacgatgaagaaaagtttttccccatgcatggaaccctgatatttggtaaacaaggaacaaatgctaacgacgcggatttggaacatgtcatgattacagatgaagaagaaatcaggaccaccaatcccgtggctacagagcagtacggaaacgtgtcaaataatttgcaaaactcaaatactggtccaactacagaaaatgtcaatcaccagggagcgttacctggtatggtgtggcaggatcgagacgtgtacctgcagggacccatttgggccaagattcctcacaccgacggacactttcacccttctccactgatgggaggttttggactcaaacacccgcctcctcaaatcatgatcaaaaacactcctgttccagccaatcctcctacaaacttcagcgcggcaaagtttgcttccttcatcacacagtattccacgggacaggtcagcgtggagatcgagtgggagctgcagaaggagaacagcaaacgctggaaccccgagatccagtacacttccaactacaacaaatctgttaatgtggactttactgtggacgctaatggtgtgtattcagagcctcgccccattggcaccagatacctgactcgtaatctgtaa

SEQ ID NO: 3685 - DNA, 2208 bp, synthetic construct
  misc_feature 1..2208: note = source = /note="Description of Artificial Sequence: Synthetic polynucleotide"
  source 1..2208: mol_type = other DNA
atggctgccgatggttatcttccagattggctcgaggacactctctctgaaggaataagacagtggtggaagctcaaacctggcccaccaccaccaaggcccgcagagcggcatcaggacgacagcaggggtcttgtgcttcctgggtacaagtacctcggacccttcaacggactcgacaaaggagagccggtcaacgaggcagacgctgcggccctcgagcacgacaaggcctacgaccggcagctcgacagcggagacaacccgtacctcaagtacaaccacgccgacgcggagtttcaggagcgtcttaaagaagatacgtcttttgggggcaacctcggacgagcagtcttccaggcgaaaaagagggttcttgaacctctgggcctggttgaggaacctgttaagacggctccgggaaaaaagaggccggtagagcactctcctgcggagccagactcctcctcgggaaccggaaaagcgggccagcagcctgcaagaaagagattgaatttcggtcagactggagacgcagactccgtacctgacccccagcctctcggacagccaccagcagcccccacaagtttgggatctactacaatggctataggcagtggcgcaccaatggcagacaataacgagggtgccgatggagtgggtaattcctcaggaaattggcattgcgattcccaatggctgggcgacagagtcatcaccaccagcacccgaacctgggccctgcccacctacaacaaccacctctacaagcaaatctccagccaatcaggagcatcgaacgacaaccactactttggctacagcaccccttgggggtattttgacttcaacagattccactgtcacttctccccacgtgactggcaaagactcatcaacaacaactggggattccgacccaagagactcaacttcaagctctttaacattcaagtcaaagaggtcacgcagaatgacggtacgacgacgattgccaataaccttaccagcacggttcaggtgtttactgactcggagtaccagctcccgtacgtcctcggctcggcgcatcaaggatgcctcccgccgtttccagcggacgtcttcatggtcccacagtatggatacctcaccctgaacaacgggagtcaggcggtaggacgctcttccttttactgcctggagtactttccttctcagatgctgcgtaccggaaacaactttaccttcagctacacctttgaggacgtgcccttccacagcagctacgctcacagccagagtttggaccggctgatgaatcctctgatcgaccagtatctgtattatctgaacaggacacaatcaaatagtggaactcttcagcagtctaggctactgtttagccaagctggacccaccagcatgtcccttcaagctaaaaactggctgcctggaccttgctacagacagcagcgtctgtcaaagcaggcaaacgacaacaacaacagcaactttccctggactgctgctacaaagtatcatctaaatggtcgggactcgttggttaatccaggaccagctatggccagccacaaagacgatgaagaaaagtttttccccatgcatggaaccctgatatttggtaaacaaggaacaaatgctaacgacgcggatttggaacatgtcatgattacagatgaagaagaaatcaggaccaccaatcccgtggctacagagcagtacggaaacgtgtcaaataatttgcaaaactcaaatactggtccaactacagaaaatgtcaatcaccagggagcgttacctggtatggtgtggcaggatcgagacgtgtacctgcagggacccatttgggccaagattcctcacaccgacggacactttcacccttctccactgatgggaggttttggactcaaacacccgcctcctcaaatcatgatcaaaaacactcctgttccagccaatcctcctacaaacttcagcgcggcaaagtttgcttccttcatcacacagtattccacgggacaggtcagcgtggagatcgagtgggagctgcagaaggagaacagcaaacgctggaaccccgagatccagtacacttccaactacaacaaatctgttaatgtggactttactgtggacgctaatggtgtgtattcagagcctcgccccattggcaccagatacctgactcgtaatctgtaa

SEQ ID NO: 3686 - DNA, 2208 bp, synthetic construct
  misc_feature 1..2208: note = source = /note="Description of Artificial Sequence: Synthetic polynucleotide"
  source 1..2208: mol_type = other DNA
atggctgccgatggttatcttccagattggctcgaggacactctctctgaaggaataagacagtggtggaagctcaaacctggcccaccaccaccaaggcccgcagagcggcatcaggacgacagcaggggtcttgtgcttcctgggtacaagtacctcggacccttcaacggactcgacaaaggagagccggtcaacgaggcagacgctgcggccctcgagcacgacaaggcctacgaccggcagctcgacagcggagacaacccgtacctcaagtacaaccacgccgacgcggagtttcaggagcgtcttaaagaagatacgtcttttgggggcaacctcggacgagcagtcttccaggcgaaaaagagggttcttgaacctctgggcctggttgaggaacctgttaagacggctccgggaaaaaagaggccggtagagcactctcctgcggagccagactcctcctcgggaaccggaaaagcgggccagcagcctgcaagaaagagattgaatttcggtcagactggagacgcagactccgtacctgacccccagcctctcggacagccaccagcagcccccacaagtttgggatctactacaatggctacaggcagtggcgcaccaatggcagacaataacgagggtgccgatggagtgggtaattcctcaggaaattggcattgcgattcccaatggctgggcgacagagtcatcaccaccagcacccgaacctgggccctgcctacctacaacaaccacctctacaagcaaatctccagccaatcaggagcatcgaacgacaaccactactttggctacagcaccccttgggggtatcttgacttcaacagattccactgtcacttctccccacgtgactggcaaagactcatcaacaacaactggggattccgacccaagagactcaacttcaagctctttaacattcaagtcaaagaggtcacgcagaatgacggtacgacgacgattgccaacaaccttaccagcacggttcaggtgtttactgactcggagtaccagctcccgtacgtcctcggctcggcgcatcaaggatgcctcccgccgtttccagcggacgtcttcatggtcccacagtatggatacctcaccctgaacaacgggagtcaggcggtaggacgctcttccttttactgcctggagtactttccttctcagatgctgcgtaccggaaacaactttaccttcagctacacctttgaggacgtgcccttccacagcagctacgctcacagccagagtttggaccggctgatgaatcctctgatcgaccagtatctgtattatctgaacaggacacaatcaaatagtggaactcttcagcagtctaggctactgtttagccaagctggacccaccagcatgtcccttcaagctaaaaactggctgcctggaccttgctacagacagcagcgtctgtcaaagcaggcaaacgacaacaacaacagcaactttccctggactgcggctacaaagtatcatctaaatggtcgggactcgttggttaatccaggaccagctatggccagccacaaagacgatgaagaaaagtttttccccatgcatggaaccctgatatttggtaaacaaggaacaaatgctaacgacgcggatttggaacatgtcatgattacagatgaagaagaaatcaggaccaccaatcccgtggctacagagcagtacggaaacgtgtcaaataatttgcaaaactcaaatactggtccaactacagaaaatgtcaatcaccagggagcgttacctggtatggtgtggcaggatcgagacgtgtacctgcagggacccatttgggccaagattcctcacaccgacggacactttcacccttctccactgatgggaggttttggactcaaacacccgcctcctcaaatcatgatcaaaaacactcctgttccagccaatcctcctacaaacttcagcgcggcaaagtttgcttccttcatcacacagtattccacgggacaggtcagcgtggagatcgagtgggagctgcagaaggagaacagcaaacgctggaaccccgagatccagtacacttccaactacaacaaatctgttaatgtggactttactgtggacgctaatggtgtgtattcagagcctcgccccattggcaccagatacctgactcgtaatctgtaa

SEQ ID NO: 3687 - DNA, 2208 bp, synthetic construct
  misc_feature 1..2208: note = source = /note="Description of Artificial Sequence: Synthetic polynucleotide"
  source 1..2208: mol_type = other DNA
atggctgccgatggttatcttccagattggctcgaggacactctctctgaaggaataagacagtggtggaagctcaaacctggcccaccaccgccaaagcccgcagagcggcataaggacgacagcaggggtcttgtgcttcctgggtacaagtacctcggacccttcaacggactcgacaagggagagccggtcaacgaggcagacgccgcggccctcgagcacgacaaggcctacgaccggcagctcgacagcggagacaacccgtacctcaagtacaaccacgccgacgcggagtttcaggagcgccttaaagaagatacgtcttttgggggcaacctcggacgagcagtattccaggcgaaaaagagggttcttgaacctctgggcctggttgaggagcctgttaagacggctccgggaaaaaagaggccggtagagcactctcctgtggagccagactcctcctcgggaaccggaaaagcgggccagcagcctgcgagaaagagattgaattttggtcagactggagacgcagactccgtacctgacccccagcctctcggacagccaccagcagcccccacaagtttgggatctactacaatggctacaggcagtggcgcaccaatggcagacaataacgagggtgccgatggagtgggtaattcctcaggaaattggcattgcgattcccaatggttgggcgacagagtcatcaccaccagcacccgaacctgggccctgcccacctacaacaaccacctctacaagcaaatctccagccaatcaggagcagcgaacgacaaccactactttggctacagcaccccctgggggtattttgacttcaacagattccactgccacttttcaccacgtgactggcaaagactcatcaacaacaactggggattccgacccaagagactcaacttcaagctctttaacattcaagtcaaagaggtcacgcagaatgacggtacgacgacgattgccaataaccttaccagcacggttcaggtgtttactgactcggagtaccagctcccgtacgtcctcggctcggcgcatcaaggatgcctcccgccgtttccagcggacgtcttcatggtcccacagtatggatacctcaccctgaacaacgggagtcaggcggtaggacgctcttccttttactgcctggagtactttccttctcagatgcttcgtaccggaaacaactttaccttcagttacacctttgaagacgttcctttccacagcagctacgctcacagtcaaagtctggaccggctgatgaatcctcttatcgaccagtacctgtattatctaaacaaaacacaatcaaatagtggaactcttcagcagtctcggctactgtttagtcaagctggacctaccagcatgtctcttcaagctaaaaactggctgcctggaccttgctacagacaacagcgtctgtcaaagcaggcaaacgacaacaacaacagcaactttccctggactgcggctacaaagtatcatctaaatggccgggactcgttggttaatccaggaccagctatggccagccacaaagacgatgaagaaaagtttttccccatgcatggaaccctgatatttggcaaacaaggaacaaatgctaacgacgcggatttggacaatgtcatgattacagatgaagaagaaatccgtaccaccaatcccgtggctacggagcagtacgggactgtgtcaaataatttgcaaaactcaaatactggtccaactactggaactgtcaatcaccaaggagcgttacctggtatggtgtggcaggatcgagacgtgtaccttcagggacccatttgggccaagattcctcacaccgatggacactttcacccttctccgctgatgggaggttttggactcaaacacccgcctcctcagatcatgatcaaaaacactcccgttccagccaatcctcccacaaacttcagttctgccaagtttgcttctttcatcacacagtattccacgggacaggttagcgtggagatcgagtgggagctgcagaaggagaacagcaaacgctggaaccccgagatccagtacacttccaactacaacaagtctgttaatgtggactttactgtggacactaatggtgtgtattcagagcctcgccccattggcaccagatacctgactcgtaatctgtaa

SEQ ID NO: 3688 - DNA, 2208 bp, synthetic construct
  misc_feature 1..2208: note = source = /note="Description of Artificial Sequence: Synthetic polynucleotide"
  source 1..2208: mol_type = other DNA
atggctgccgatggttatcttccagattggctcgaggacactctctctgaaggaataagacagtggtggaagctcaaacctggcccaccaccaccaaggcccgcagagcggcatcaggacgacagcaggggtcttgtgcttcctgggtacaagtacctcggacccttcaacggactcgacaaaggagagccggtcaacgaggcagacgctgcggccctcgagcacgacaaggcctacgaccggcagctcgacagcggagacaacccgtacctcaagtacaaccacgccgacgcggagtttcaggagcgtcttaaagaagatacgtcttttgggggcaacctcggacgagcagtcttccaggcgaaaaagagggttcttgaacctctgggcctggttgaggaacctgttaagacggctccgggaaaaaagaggccggtagagcactctcctgcggagccagactcctcctcgggaaccggaaaagcgggccagcagcctgcaagaaagagattgaatttcggtcagactggagacgcagactccgtacctgacccccagcctctcggacagccaccagcagcccccacaagtttgggatctactacaatggctacaggcagtggcgcaccaatggcagacaataacgagggtgccgatggagtgggtaattcctcaggaaattggcattgcgattcccaatggctgggcgacagagtcatcaccaccagcacccgaacctgggccctgcccacctacaacaaccacctctacaagcaaatctccagccaatcaggagcatcgaacgacaaccactactttggctacagcaccccttgggggtattttgacttcaacagattccactgtcacttctccccacgtgactggcaaagactcatcaacaacaactggggattccgacccaagagactcaacttcaagctctttaacattcaagtcaaagaggtcacgcagaatgacggtacgacgacgattgccaataaccttaccagcacggttcaggtgtttactgactcggagtaccagctcccgtacgtcctcggctcggcgcatcaaggatgcctcccgccgtttccagcggacgtcttcatggtcccacagtatgggtacctcaccctgaacaacgggagtcaggcggtaggacgctcttccttttactgcctggagtactttccttctcagatgctgcgtaccggaaacaactttaccttcagctacacctttgaggacgtgcccttccacagcagctacgctcacagccagagtttggaccggctgatgaatcctctgatcgaccagtatctgtattatctgaacaggacacaatcaaatagtggaactcttcagcagtctaggctactgtttagccaagctggacccaccagcatgtcccttcaagctaaagactggctgcctggaccttgctacagacagcagcgtctgtcaaagcaggcaaacgacaacaacaacagcaactttccctggactgcggctacaaagtatcatctaaatggtcgggactcgttggttaatccaggaccagctatggccagccacaaagacgatgaagaaaagtttttccccatgcatggaaccctgatatttggtaaacaaggaacaaatgctaacgacgcggatttggaacatgtcatgattacagatgaagaagaaatcaggaccaccaatcccgtggctacagagcagtacggaaacgtgtcaaataatttgcaaaactcaaatactggtccaactacagaaaatgtcaatcaccagggagcgttacctggtatggtgtggcaggatcgagacgtgtacctgcagggacccatttgggccaagattcctcacaccgacggacactttcacccttctccaccgatgggaggttttggactcaaacacccgcctcctcaaatcatgatcaaaaacactcctgttccagccaatcctcctacaaacttcagcgcggcaaagtttgcttccttcatcacacagtattccacgggactggtcagcgtggagatcgagtgggagctgcagaaggagaacagcaaacgctggaaccccgagatccagtacacttccaactacaacaaatctgttaatgtggactttactgtggacgctaatggtgtgtattcagagcctcgccccattggcaccagatacctgactcgtaatctgtaa

SEQ ID NO: 3689 - DNA, 2208 bp, synthetic construct
  misc_feature 1..2208: note = source = /note="Description of Artificial Sequence: Synthetic polynucleotide"
  source 1..2208: mol_type = other DNA
atggctgccgatggttatcttccagattggctcgaggacactctctctgaaggaataagacagtggtggaagctcaaacctggcccaccaccgccaaagcccgcagagcggcataaggacgacagcaggggtcttgtgcttcctgggtacaagtacctcggacccttcaacggactcgacaagggggagccggtcaacgaggcagacgccgcggccctcgagcacgacaaggcctacgaccggcagctcgacagcggagacaacccgtacctcaagtacaaccacgccgacgcggagtttcaggagcgtcttaaagaagatacgtcttttgggggcaacctcggacgagcagtcttccaggcgaaaaagagggttcttgaacctctgggcctggttgaggaacctgttaagacggctccgggaaaaaagaggccggtagagcactctcctgtggagccagactcctcctcgggaaccggaaaggcgggccagcagcctgcaagaaaaagattgaatttcggtcagactggagacgcagactccgtacctgacccccagcctctcggacagccaccagcagccccctctggtctgggaactaatacgatggctacaggcagtggcgcaccaatggcagacaataacgagggcgccgacggagtgggtaattcctcgggaaattggcattgcgattccacatggatgggcgacagagtcatcaccaccagcacccgcacctgggctctgcccacctacaacaaccatctgtacaagcaaatttccagccaatcaggagcatcgaacgacaaccactactttggctacagcaccccctgggggtattttgacttcaacagattccactgccacttttcgccacgtgactggcaaagactcatcaacaacaactggggattccggcccaagagactcagcttcaagctctttaacattcaagtcaaggaggtcacgcagaatgacggtacgacgacgattgccaataaccttaccagcacggttcaggtctttactgactcggagtaccagctcccgtacgtcctcggctcggcgcatcaaggatgcctcccgccgttcccagcagacgtcttcatggtgccacagtatggatacctcaccctgaacaacgggagtcaggcggtaggacgctcttcattttactgcctggagtacttcccttctcagatgcttcgcacgggaaacaactttaccttcagctacacctttgaggacgtgccttttcacagcagctacgctcacagccaaagtctggaccgtctcatgaatcctctcatcgaccaatacctgtattacttgagcaaaacaaacgctccaagcggaactcaccagatgtccaggcttcagttttctcaggccggagcgagtgacatgtcgggaccagctagaaactggcttcctggaccctgttaccgccagcagcgagtatcaaagcaggctgcggacaacaacaacagtgacttaccgtggactggagctaccaagtaccacctcaatggaagagactctctggtgaacccgggcccagctatggccagccacaaggatgatgaagaaaaatttttcctcatgagcggggttctcatcttcgggaaacaaggctcaaatgaaaacaatgtggacattgaaaaggttatgattacagacgaagaggaaatcaggaccaccaatcccgtggctacggagcagtatggttctgtatctaccaaccttcaaagcgcaaacacaagtccagctacctcagatgtcaatcaccaaggcgttcttcctggcatggtctggcaggacagagatgtgtacctgcaggggcccatctgggcaaagattcctcacacggacggacactttcacccttctcccctcatgggcggatttggattgaagcaccctcccccacagattctcatcaagaataccccggtacctgcgaatccttcgaccaccttcagtgcggcaaagtttgcttccttcatcacacagtattccacgggacaggtcagcgtggagatagagtgggagctgcagaaggagaacagcaaacgctggaaccccgagatccagtatacttccaactacaacaaatctgttaatgtggactttactgtggacactaatggtgtgtattcagagcctcgccccattggcaccagatacctgactcgtaatctgtaa

SEQ ID NO: 3690 - DNA, 2208 bp, synthetic construct
  misc_feature 1..2208: note = source = /note="Description of Artificial Sequence: Synthetic polynucleotide"
  source 1..2208: mol_type = other DNA
atggctgccgatggttatcttccagattggctcgaggacactctctctgaaggaataagacagtggtggaagctcaaacctggcccaccaccaccaaggcccgcagagcggcatcaggacgacagcaggggtcttgtgcttcctgggtacaagtacctcggacccttcaacggactcgacaaaggagagccggtcaacgaggcagacgctgcggccctcgagcacgacaaggcctacgaccggcagctcgacagcggagacaacccgtacctcaagtacaaccacgccgacgcggagtttcaggagcgtcttaaagaagatacgtcttttgggggcaacctcggacgagcagtcttccaggcgaaaaagagggttcttgaacctctgggcctggttgaggaacctgttaagacggctccgggaaaaaagaggccggtagagcactctcctgcggagccagactcctcctcgggaaccggaaaagcgggccagcagcctgcaagaaagagattgaatttcggtcagactggagacgcagactccgtacctgacccccagcctctcggacagccaccagcagcccccacaagtttgggatctactacaatggctacaggcagtggcgcaccaatggcagacaataacgagggtgccgatggagtgggtaattcctcaggaaattggcattgcgattcccaatggctgggcgacagagtcatcaccaccagcacccgaacctgggccctgcccacctacaacaaccacctctacaagcaaatctccagccaatcaggagcatcgaacgacaaccactactttggctacagcaccccttgggggtattttgacttcaacagattccactgtcacttctccccacgtgactggcaaagactcatcaacaacaactggggattccgacccaagagactcaacttcaagctctttaacattcaagtcaaagaggtcacgcagaatgacggtacgacgacgattgccaataaccttaccagcacggttcaggtgtttactgactcggagtaccagctcccgtacgtcctcggctcggcgcatcaaggatgcctcccgccgtttccagcggacgtcttcatggtcccacagtatgggtacctcaccctgaacaacgggagtcaggcggtaggacgctcttccttttactgcctggagtactttccttctcagatgctgcgtaccggaaacaactttaccttcagctacacctttgaggacgtgtccttccacagcagctacgctcacagccagagtttggaccggctgatgaatcctctgatcgaccagtatctgtattatctgaacaggacacaatcaaatagtggaactcttcagcagtctaggctactgtttagccaagctggacccaccagcatgtcccttcaagctaaaaactggctgcctggaccttgctacagacagcagcgtctgtcaaagcaggcaaacgacaacaacaacagcaactttccctggactgcggctacaaagtatcatctaaatggtcgggactcgttggttaatccaggaccagctatggccagccacaaagacgatgaagaaaagtttttccccatgcatggaaccctgatatttggtaaacaaggaacaaatgctaacgacgcggatttggaacatgtcatgattacagatgaagaagaaatcaggaccaccaatcccgtggctacagagcagtacggaaacgtgtcaaataatttgcaaaactcaaatactggtccaactacagaaaatgtcaatcaccagggagcgttacctggtatggtgtggcaggatcgagacgtgtacctgcagggacccatttgggccaagattcctcacaccgacggacactttcacccttctccactgatgggaggttttggactcaaacacccgcctcctcaaatcatgatcaaaaacactcctgttccagccaatcctcctacaaacttcagcgcggcaaagtttgcttccttcatcacacagtattccacgggacaggtcagcgtggagatcgagtgggagctgcagaaggagaacagcaaacgctggaaccccgagatccagtacacttccaactacaacaaatctgttaatgtggactttactgtggacgctaatggtgtgtattcagagcctcgccccattggcaccagatacctgactcgtaatctgtaa

SEQ ID NO: 3691 - DNA, 2208 bp, synthetic construct
  misc_feature 1..2208: note = source = /note="Description of Artificial Sequence: Synthetic polynucleotide"
  source 1..2208: mol_type = other DNA
atggctgccgatggttatcttccagattggctcgaggacactctctctgaaggaataagacagtggtggaagctcaaacctggcccaccaccaccaaggcccgcagagcggcatcaggacgacagcaggggtcttgtgcttcctgggtacaagtacctcggacccttcaacggactcgacaaaggagagccggtcaacgaggcagacgctgcggccctcgagcacgacaaggcctacgaccggcagctcgacagcggagacaacccgtacctcaagtacaaccacgccgacgcggagtttcaggagcgtcttaaagaagatacgtcttttgggggcaacctcggacgagcagtcttccaggcgaaaaagagggttcttgaacctctgggcctggttgaggaacctgttaagacggctccgggaaaaaagaggccggtagagcactctcctgcggagccagactcctcctcgggaaccggaaaagcgggccagcagcctgcaagaaagagattgaatttcggtcagactggagacgcagactccgtacctgacccccagcctctcggacagccaccagcagcccccacaagtttgggatctactacaatggctacaggcagtggcgcaccaatggcagacaataacgagggtgccgatggagtgggtaattcctcaggaaattggcattgcgattcccaatggctgggcgacagagtcatcaccaccagcacccgaacctgggccctgcccacctacaacaaccacctctacaagcaaatctccagccaatcaggagcatcgaacgacaaccactactttggctacagcaccccttgggggtattttgacttcaacagattccactgtcacttctccccacgtgactggcaaagactcatcaacaacaactggggattccgacccaagagactcaacttcaagctctttaacattcaagtcaaagaggtcacgcagaatgacggtacgacgacgattgccaataaccttaccagcacggttcaggtgtttactgactcggagtaccagctcccgtacgtcctcggctcggcgcatcaaggatgcctcccgccgtttccagcggacgtcttcatggtcccacagtatggatacctcaccctgaacaacgggagtcaggcggtaggacgctcttccttttactgcctggagtactttccttctcagatgctgcgtaccggaaacaactttaccttcagctacacctttgaggacgtgcccttccacagcagctacgctcacagccagagtttggaccggctgatgaatcctctgatcgaccagtatctgtattatctgaacaggacacaatcaaatagtggaactcttcagcagtctaggctactgtttagccaagctggacccaccagcatgtcccttcaagctaaaaactggctgcctggaccttgctacagacagcagcgtctgtcaaagcaggcaaacgacaacaacaacagcaactttccctggactgcggctacaaagtatcatctaaatggtcgggactcgttggttaatccaggaccagctatggccagccacaaagacgatgaagaaaagtttttccccatgcatggaaccctgatatttggtaaacaaggaacaaatgctaacgacgcggatttggaacatgtcatgattacagatgaagaagaaatcaggaccaccaatcccgtggctacagagcagtacggaaacgtgtcaaataatttgcaaaactcaaatactggcccaactacagaaaatgtcaatcaccagggagcgttacttggtatggtgtggcaggatcgagacgtgtacctgcagggacccatttgggccaagattcctcacaccgacggacactttcacccttctccactgatgggaggttttggactcaaacacccgcctcctcaaatcatgatcaaaaacactcctgttccagccaatcctcctacaaacttcagcgcggcaaagtttgcttccttcatcacacagtattccacgggacaggtcagcgtggagatcgagtgggagctgcagaaggagaacagcaaacgctggaaccccgagatccagtacacttccaactacaacaaatctgttaatgtggactttactgtggacgctaatggtgtgtattcagagcctcgccccattggcaccagatacctgactcgtaatctgtaa

SEQ ID NO: 3692 - DNA, 2208 bp, synthetic construct
  misc_feature 1..2208: note = source = /note="Description of Artificial Sequence: Synthetic polynucleotide"
  source 1..2208: mol_type = other DNA
atggctgccgatggttatcttccagattggctcgaggacactctctctgaaggaataagacagtggtggaagctcaaacctggcccaccaccaccaaggcccgcagagcggcatcaggacgacagcaggggtcttgtgcttcctgggtacaagtacctcggacccttcaacggactcgacaaaggagagccggtcaacgaggcagacgctgcggccctcgagcacgacaaggcctacgaccggcagctcgacagcggagacaacccgtacctcaagtacaaccacgccgacgcggagtttcaggagcgtcttaaagaagatacgtcttttgggggcaacctcggacgagcagtcttccaggcgaaaaagagggttcttgaacctctgggcctggttgaggaacctgttaagacggctccgggaaaaaagaggccggtagagcactctcctgcggagccagactcctcctcgggaaccggaaaagcgggccagcagcctgcaagaaagagattgaatttcggtcagactggagacgcagactccgtacctgacccccagcctctcggacagccaccagcagcccccacaagtttgggatctactacaatggctacaggcagtggcgcaccaatggcagacaataacgagggtgccgatggagtgggtaattcctcaggaaattggcattgcgattcccaatggctgggcgacagagtcatcaccaccagcacccgaacctgggccctgcccacctacaacaaccacctctacaagcaaatctccagccaatcaggagcatcgaacgacaaccactactttggctacagcaccccttgggggtattttgacttcaacagattccactgtcacttctccccacgtgactggcaaagactcatcaacaacaactggggattccgacccaagagactcaacttcaagctctttaacattcaagtcaaagaggtcacgcagaatgacggtacggcgacgattgccaataaccttaccagcacggttcaggtgtttactgactcggagtaccagctcccgtacgtcctcggctcggcgcatcaaggatgcctcccgccgtttccagcggacgtcttcatggtcccacagtatggatacctcaccctgaacaacgggagtcaggcggtaggacgctcttccttttactgcctggagtactttccttctcagatgctgcgtaccggaaacaactttaccttcagctacacctttgaggacgtgcccttccacagcagctacgctcacagccagagtttggaccggctgatgaatcctctgatcgaccagtatctgtattatctgaacaggacacaatcaaatagtggaactcttcagcagtctaggctactgtttagccaagctggacccaccagcatgtcccttcaagctaaaaactggctgcctggaccttgctacagacagcagcgtctgtcaaagcaggcaaacgacaacaacaacagcaactttccctggactgcggctacaaagtatcatctaaatggtcgggactcgttggttaatccaggaccagctatggccagccacaaagacgatgaagaaaagtttttccccatgcatggaaccctgatatttggtaaacaaggaacaaatgctaacgacgcggatttggaacatgtcatgattacagatgaagaagaaatcaggaccaccaatcccgtggctacagagcagtacggaaacgtgtcaaataatttgcaaaactcaaatactggtccaactacagaaaatgtcaatcaccagggagcgttacctggtatggtgtggcaggatcgagacgtgtacctgcagggacccatttgggccaagattcctcacaccgacggacactttcacccttctccactgatgggaggttttggactcaaacacccgcctcctcaaatcatgatcaaaaacactcctgttccagccaatcctcctacaaacttcagcgcggcaaagtttgcttccttcatcacacagtattccacgggacaggtcagcgtggagatcgagtgggagctgcagaaggagaacagcaaacgctggaaccccgagatccagtacacttccaactacaacaaatctgttaatgtggactttactgtggacgctaatggtgtgtattcagagcctcgccccattggcaccagatacctgactcgtaatctgtaa

SEQ ID NO: 3693 - DNA, 2208 bp, synthetic construct
  misc_feature 1..2208: note = source = /note="Description of Artificial Sequence: Synthetic polynucleotide"
  source 1..2208: mol_type = other DNA
atggctgccgatggttatcttccagattggctcgaggacactctctctgaaggaataagacagtggtggaagctcaaacctggcccaccaccgccaaagcccgcagagcggcataaggacgacagcaggggtcttgtgcttcctgggtacaagtacctcggacccttcaacggactcgacaagggagagccggtcaacgaggcagacgccgcggccctcgagcacgacaaggcctacgaccggcagctcgacagcggagacaacccgtacctcaagtacaaccacgccgacgcggagtttcaggagcgccttaaagaagatacgtcttttgggggcaacctcggacgagcagtattccaggcgaaaaagagggttcttgaacctctgggcctggttgaggagcctgttaagacggctccgggaaaaaagaggccggtagagcactctcctgtggagccagactcctcctcgggaaccggaaaagcgggccagcagcctgcgagaaagagattgaattttggtcagactggagacgcagactccgtacctgacccccagcctctcggacagccaccagcagcccccacaagtttgggatctactacaatggctacaggcagtggcgcaccaatggcagacaataacgagggtgccgatggagtgggtaattcctcaggaaattggcattgcgattcccaatggttgggcgacagagtcatcaccaccagcacccgaacctgggccctgcccacctacaacaaccacctctacaagcaaatctccagccaatcaggagccagcaacgacaaccactactttggctacagcaccccctgggggtattttgacttcaacagattccactgccacttttcaccacgtgactggcaaagactcatcaacaacaactggggattccgacccaagagactcaacttcaagctctttaacattcaagtcaaagaggtcacgcagaatgacggtacgacgacgattgccaataaccttaccagcacggttcaggtgtttactgactcggagtaccagctcccgtacgtcctcggctcggcgcatcaaggatgcctcccgccgtttccagcggacgtcttcatggtcccacagtatggatacctcaccctgaacaacgggagtcaggcggtaggacgctcttccttttactgcctggagtactttccttctcagatgcttcgtaccggaaacaactttaccttcagttacacctttgaagacgttcctttccacagcagctacgctcacagtcaaagtctggaccggctgatgaatcctcttatcgaccagtacctgtattatctaaacaaaacacaatcaaatagtggaactcttcagcagtctcggctactgtttagtcaagctggacctaccagcatgtctcttcaagctaaaaactggctgcctggaccttgctacagacaacagcgtctgtcaaagcaggcaaacgacaacaacaacagcaactttccctggactgcggctacaaagtatcatctaaatggccgggactcgttggttaatccaggaccagctatggccagccacaaagacgatgaagaaaagtttttccccatgcatggaaccctgatatttggcaaacaaggaacaaatgctaacgacgcggatttggacaatgtcatgattacagatgaagaagaaatccgtaccaccaatcccgtggctacggagcagtacgggactgtgtcaaataatttgcaaaactcaaatactggtccaactactggaactgtcaatcaccaaggagcgttacctggtatggtgtggcaggatcgagacgtgtaccttcagggacccatttgggccaagattcctcacaccgatggacactttcacccttctccgctgatgggaggttttggactcaaacacccgcctcctcagatcatgatcaaaaacactcccgttccagccaatcctcccacaaacttcagttctgccaagtttgcttctttcatcacacagtattccacgggacaggttagcgtggagatcgagtgggagctgcagaaggagaacagcaaacgctggaaccccgagatccagtacacttccaactacaacaagtctgttaatgtggactttactgtggacactaatggtgtgtattcagagcctcgccccattggcaccagatacctgactcgtaatctgtaa

SEQ ID NO: 3694 - DNA, 2208 bp, synthetic construct
  misc_feature 1..2208: note = source = /note="Description of Artificial Sequence: Synthetic polynucleotide"
  source 1..2208: mol_type = other DNA
atggctgccgatggttatcttccagattggctcgaggacactctctctgaaggaataagacagtggtggaagctcaaacctggcccaccaccgccaaagcccgcagagcggcataaggacgacagcaggggtcttgtgcttcctgggtacaagtacctcggacccttcaacggactcgacaagggagagccggtcaacgaggcagacgccgcggccctcgagcacgacaaggcctacgaccggcagctcgacagcggagacaacccgtacctcaagtacaaccacgccgacgcggagtttcaggagcgccttaaagaagatacgtcttttgggggcaacctcggacgagcagtattccaggcgaaaaagagggttcttgaacctctgggcctggttgaggagcctgttaagacggctccgggaaaaaagaggccggtagagcactctcctgtggagccagactcctcctcgggaaccggaaaagcgggccagcagcctgcgagaaagagattgaattttggtcagactggagacgcagactccgtacctgacccccagcctctcggacagccaccagcagcccccacaagtttgggatctactacaatggctacaggcagtggcgcaccaatggcagacaataacgagggtgccgatggagtgggtaattcctcaggaaattggcattgcgattcccaatggttgggcgacagagtcatcaccaccagcacccgaacctgggccctgcccacctacaacaaccacctctacaagcaaatctccagccaatcaggagccagcaacgacaaccactactttggctacagcaccccctgggggtattttgacttcaacagattccactgccacttttcaccacgtgactggcaaagactcatcaacaacaactggggattccgacccaagagactcaacttcaagctctttaacattcaagtcaaagaggtcacgcagaatgacggtacgacgacgattgccaataaccttaccagcacggttcaggtgtttactgactcggagtaccagctcccgtacgtcctcggctcggcgcatcaaggatgcctcccgccgtttccagcggacgtcttcatggtcccacagtatggatacctcaccctgaacaacgggagtcaggcggtaggacgctcttccttttactgcctggagtactttccttctcagatgcttcgtaccggaaacaactttaccttcagttacacctttgaagacgttcctttccacagcagctacgctcacagtcaaagtctggaccggctgatgaatcctcttatcgaccagtacctgtattatctaaacaaaacacaatcaaatagtggaactcttcagcagtctcggctactgtttagtcaagctggacctaccagcatgtctcttcaagctaaaaactggctgcctggaccttgctacagacaacagcgtctgtcaaagcaggcaaacgacaacaacaacagcaactttccctgggctgcggctacaaagtatcatctaaatggccgggactcgttggttaatccaggaccagctatggccagccacaaagacgatgaagaaaagtttttccccatgcatggaaccctgatatttggcaaacaaggaacaaatgctaacgacgcggatttggacaatgtcatgattacagatgaagaagaaatccgtaccaccaatcccgtggctacggagcagtacgggactgtgtcaaataatttgcaaaactcaaatactggtccaactactggaactgtcaatcaccaaggagcgttacctggtatggtgtggcaggatcgagacgtgtaccttcagggacccatttgggccaagattcctcacaccgatggacactttcacccttctccgctgatgggaggttttggactcaaacacccgcctcctcagatcatgatcaaaaacactcccgttccagccaatcctcccacaaacttcagttctgccaagtttgcttctttcatcacacagtattccacgggacaggttagcgtggagatcgagtgggagctgcagaaggagaacagcaaacgctggaaccccgagatccagtacacttccaactacaacaagtctgttaatgtggactttactgtggacactaatggtgtgtattcagagcctcgccccattggcaccagatacctgactcgtaatctgtaa

SEQ ID NO: 3695 - DNA, 2208 bp, synthetic construct
  misc_feature 1..2208: note = source = /note="Description of Artificial Sequence: Synthetic polynucleotide"
  source 1..2208: mol_type = other DNA
atggctgccgatggttatcttccagattggctcgaggacactctctctgaaggaataagacagtggtggaagctcaaacctggcccaccaccgccaaagcccgcagagcggcataaggacgacagcaggggtcttgtgcttcctgggtacaagtacctcggacccttcaacggactcgacaagggagagccggtcaacgaggcagacgccgcggccctcgagcacgacaaggcctacgaccggcagctcgacagcggagacaacccgtacctcaagtacaaccacgccgacgcggagtttcaggagcgccttaaagaagatacgtcttttgggggcaacctcggacgagcagtattccaggcgaaaaagagggttcttgaacctctgggcctggttgaggagcctgttaagacggctccgggaaaaaagaggccggtagagcactctcctgtggagccagactcctcctcgggaaccggaaaagcgggccagcagcctgcgagaaagagattgaattttggtcagactggagacgcagactccgtacctgacccccagcctctcggacagccaccagcagcccccacaagtttgggatctactacaatggctacaggcagtggcgcaccaatggcagacaataacgagggtgccgatggagtgggtaattcctcaggaaattggcattgcgattcccaatggttgggcgacagagtcatcaccaccagcacccgaacctgggccctgcccacctacaacaaccacctctacaagcaaatctccagccaatcaggagccagcaacgacaaccactactttggctacagcaccccctgggggtattttgacttcaacagattccactgccacttttcaccacgtgactggcaaagactcatcaacaacaactggggattccgacccaagagactcaacttcaagctctttaacattcaagtcaaagaggtcacgcagaatgacggtacgacgacgattgccaataaccttaccagcacggttcaggtgtttactgactcggagtaccagctcccgtacgtcctcggctcggcgcatcaaggatgcctcccgccgtttccagcggacgtcttcatggtcccacagtatggatacctcaccctgaacaacgggagtcaggcggtaggacgctcttccttttactgcctggagtactttccttctcagatgcttcgtaccggaaacaactttaccctcagttacacctttgaagacgttcctttccacagcagctacgctcacagtcaaagtctggaccggctgatgaatcctcttatcgaccagtacctgtattatctaaacaaaacacaatcaaatagtggaactcttcagcagtctcggctactgtttagtcaagctggacctaccagcatgtctcttcaagctaaaaactggctgcctggaccttgctacagacaacagcgtctgtcaaagcaggcaaacgacaacaacaacagcaactttccctggactgcggctacaaagtatcatctaaatggccgggactcgttggttaatccaggaccagctatggccagccacaaagacgatgaagaaaagtttttccccatgcatggaaccctgatatttggcaaacaaggaacaaatgctaacgacgcggatttggacaatgtcatgattacagatgaagaagaaatccgtaccaccaatcccgtggctacggagcagtacgggactgtgtcaaataatttgcaaaactcaaatactggtccaactactggaactgtcaatcaccaaggagcgttacctggtatggtgtggcaggatcgagacgtgtaccttcagggacccatttgggccaagattcctcacaccgatggacactttcacccttctccgctgatgggaggttttggactcaaacacccgcctcctcagatcatgatcaaaaacactcccgttccagccaatcctcccacaaacttcagttctgccaagtttgcttctttcatcacacagtattccacgggacaggttagcgtggagatcgagtgggagctgcagaaggagaacagcaaacgctggaaccccgagatccagtacacttccaactacaacaagtctgttaatgtggactttactgtggacactaatggtgtgtattcagagcctcgccccattggcaccagatacctgactcgtaatctgtaa

SEQ ID NO: 3696 - DNA, 2208 bp, synthetic construct
  misc_feature 1..2208: note = source = /note="Description of Artificial Sequence: Synthetic polynucleotide"
  source 1..2208: mol_type = other DNA
atggctgccgatggttatcttccagattggctcgaggacactctctctgaaggaataagacagtggtggaagctcaaacctggcccaccaccgccaaagcccgcagagcggcataaggacgacagcaggggtcttgtgcttcctgggtacaagtacctcggacccttcaacggactcgacaagggagagccggtcaacgaggcagacgccgcggccctcgagcacgacaaggcctacgaccggcagctcgacagcggagacaacccgtacctcaagtacaaccacgccgacgcggagtttcaggagcgccttaaagaagatacgtcttttgggggcaacctcggacgagcagtattccaggcgaaaaggagggttcttgaacctctgggcctggttgaggagcctgttaagacggctccgggaaaaaagaggccggtagagcactctcctgtggagccagactcctcctcgggaaccggaaaagcgggccagcagcctgcgagaaagagattgaattttggtcagactggagacgcagactccgtacctgacccccagcctctcggacagccaccagcagcccccacaagtttgggatctactacaatggctacaggcagtggcgcaccaatggcagacaataacgagggtgccgatggagtgggtaattcctcaggaaattggcattgcgattcccaatggttgggcgacagagtcatcaccaccagcacccgaacctgggccctgcccacctacaacaaccacctctacaagcaaatctccagccaatcaggagccagcaacgacaaccactactttggctacagcaccccctgggggtattttgacttcaacagattccactgccacttttcaccacgtgactggcaaagactcatcaacaacaactggggattccgacccaagagactcaacttcaagctctttaacattcaagtcaaagaggtcacgcagaatgacggtacgacgacgattgccaataaccttaccagcacggttcaggtgtttactgactcggagtaccagctcccgtacgtcctcggctcggcgcatcaaggatgcctcccgccgtttccagcggacgtcttcatggtcccacagtatggatacctcaccctgaacaacgggagtcaggcggtaggacgctcttccttttactgcctggagtactttccttctcagatgcttcgtaccggaaacaactttaccttcagttacacctttgaagacgttcctttccacagcagctacgctcacagtcaaagtctggaccggctgatgaatcctcttatcgaccagtacctgtattatctaaacaaaacacaatcaaatagtggaactcttcagcagtctcggctactgtttagtcaagctggacctaccagcatgtctcttcaagctaaaaactggctgcctggaccttgctacagacaacagcgtctgtcaaagcaggcaaacgacaacaacaacagcaactttccctggactgcggctacaaagtatcatctaaatggccgggactcgttggttaatccaggaccagctatggccagccacaaagacgatgaagaaaagtttttccccatgcatggaaccctgatatttggcaaacaaggaacaaatgctaacgacgcggatttggacaatgtcatgattacagatgaagaagaaatccgtaccaccaatcccgtggctacggagcagtacgggactgtgtcaaataatttgcaaaactcaaatactggtccaactactggaactgtcaatcaccaaggagcgttacctggtatggtgtggcaggatcgagacgtgtaccttcagggacccatttgggccaagattcctcacaccgatggacactttcacccttctccgctgatgggaggttttggactcaaacacccgcctcctcagatcatgatcaaaaacactcccgttccagccaatcctcccacaaacttcagttctgccaagtttgcttctttcatcacacagtattccacgggacaggttagcgtggagatcgagtgggagctgcagaaggagaacagcaaacgctggaaccccgagatccagtacacttccaactacaacaagtctgttaatgtggactttactgtggacactaatggtgtgtattcagagcctcgccccattggcaccagatacctgactcgtaatctgtaa

SEQ ID NO: 3697 - DNA, 2208 bp, synthetic construct
  misc_feature 1..2208: note = source = /note="Description of Artificial Sequence: Synthetic polynucleotide"
  source 1..2208: mol_type = other DNA
atggctgccgatggttatcttccagattggctcgaggacactctctctgaaggaataagacagtggtggaagctcaaacctggcccaccaccgccaaagcccgcagagcggcataaggacgacagcaggggtcttgtgcttcctgggtacaagtacctcggacccttcaacggactcgacaagggagagccggtcaacgaggcagacgccgcggccctcgagcacgacaaggcctacgaccggcagctcgacagcggagacaacccgtacctcaagtacaaccacgccgacgcggagtttcaggagcgccttaaagaagatacgtcttttgggggcaacctcggacgagcagtattccaggcgaaaaagagggttcttgaacctctgggcctggttgaggagcctgttaagacggctccgggaaaaaagaggccggtagagcactctcctgtggagccagactcctcctcgggaaccggaaaagcgggccagcagcctgcgagaaagagattgaattttggtcagactggagacgcagactccgtacctgacccccagcctctcggacagccaccagcagcccccacaagtttgggatctactacaatggctacaggcagtggcgcaccaatggcagacaataacgagggtgccgatggagtgggtaattcctcaggaaattggcattgcgattcccaatggttgggcggcagagtcatcaccaccagcacccgaacctgggccctgcccacctacaacaaccacctctacaagcaaatctccagccaatcaggagccagcaacgacaaccactactttggctacagcaccccctgggggtattttgacttcaacagattccactgccacttttcaccacgtgactggcaaagactcatcaacaacaactggggattccgacccaagagactcaacttcaagctctttaacattcaagtcaaagaggtcacgcagaatgacggtacgacgacgattgccaataaccttaccagcacggttcaggtgtttactgactcggagtaccagctcccgtacgtcctcggctcggcgcatcaaggatgcctcccgccgtttccagcggacgtcttcatggtcccacagtatggatacctcaccctgaacaacgggagtcaggcggtaggacgctcttccttttactgcctggagtactttccttctcagatgcttcgtaccggaaacaactttaccttcagttacacctttgaagacgttcctttccacagcagctacgctcacagtcaaagtctggaccggctgatgaatcctcttatcgaccagtacctgtattatctaaacaaaacacaatcaaatagtggaactcttcagcagtctcggctactgtttagtcaagctggacctaccagcatgtctcttcaagctaaaaactggctgcctggaccttgctacagacaacagcgtctgtcaaagcaggcaaacgacaacaacaacagcaactttccctggactgcggctacaaagtatcatctaaatggccgggactcgttggttaatccaggaccagctatggccagccacaaagacgatgaagaaaagtttttccccatgcatggaaccctgatatttggcaaacaaggaacaaatgctaacgacgcggatttggacaatgtcatgattacagatgaagaagaaatccgtaccaccaatcccgtggctacggagcagtacgggactgtgtcaaataatttgcaaaactcaaatactggtccaactactggaactgtcaatcaccaaggagcgttacctggtatggtgtggcaggatcgagacgtgtaccttcagggacccatttgggccaagattcctcacaccgatggacactttcacccttctccgctgatgggaggttttggactcaaacacccgcctcctcagatcatgatcaaaaacactcccgttccagccaatcctcccacaaacttcagttctgccaagtttgcttctttcatcacacagtattccacgggacaggttagcgtggagatcgagtgggagctgcagaaggagaacagcaaacgctggaaccccgagatccagtacacttccaactacaacaagtctgttaatgtggactttactgtggacactaatggtgtgtattcagagcctcgccccattggcaccagatacctgactcgtaatctgtaa

SEQ ID NO: 3698 - DNA, 2205 bp, synthetic construct
  misc_feature 1..2205: note = source = /note="Description of Artificial Sequence: Synthetic polynucleotide"
  source 1..2205: mol_type = other DNA
atggctgccgatggttatcttccagattggctcgaggacactctctctgaaggaataagacagtggtggaagctcaaacctggcccaccaccgccaaagcccgcagagcggcataaggacgacagcaggggtcttgtgcttcctgggtacaagtacctcggacccttcaacggactcgacaagggagagccggtcaacgaggcagacgccgcggccctcgagcacgacaaggcctacgaccggcagctcgacagcggagacaacccgtacctcaagtacaaccacgccgacgcggagtttcaggagcgccttaaagaagatacgtcttttgggggcaacctcggacgagcagtattccaggcgaaaaagagggttcttgaacctctgggcctggttgaggagcctgttaagacggctccgggaaaaaagaggccggtagagcactctcctgtggagccagactcctcctcgggaaccggaaaagcgggccagcagcctgcgagaaagagattgaattttggtcagactggagacgcagactccgtacctgacccccagcctctcggacagccaccagcagcccccacaagtttgggatctactacaatggctacaggcagtggcgcaccaatggcagacaataacgagggtgccgatggagtgggtaattcctcaggaaattggcattgcgattcccaatggttgggcgacagagtcatcaccaccagcacccgaacctgggccctgcccacctacaacaaccacctctacaagcaaatctccagccaatcaggagccagcaacgacaaccactactttggctacagcaccccctgggggtattttgacttcaacagattccactgccacttttcaccacgtgactggcaaagactcatcaacaacaactggggattccgacccaagagactcaacttcaagctctttaacattcaagtcaaagaggtcacgcagaatgacggtacgacgacgattgccaataaccttaccagcacggttcaggtgtttactgactcggagtaccagctcccgtacgtcctcggctcggcgcatcaaggatgcctcccgccgtttccagcggacgtcttcatggtcccacagtatggatacctcaccctgaacaacgggagtcaggcggtaggacgctcttccttttactgcctggagtactttccttctcagatgcttcgtaccggaaacaactttaccttcagttacacctttgaagacgttcctttccacagcagctacgctcacagtcaaagtctggaccggctgatgaatcctcttatcgaccagtacctgtattatctaaacaaaacacaatcaaatagtggaactcttcagcagtctcggctactgtttagtcaagctggacctaccagcatgtctcttcaagctaaaaactggctgcctggaccttgctacagacaacagcgtctgtcaaagcaggcaaacgacaacaacagcaactttccctggactgcggctacaaagtatcatctaaatggccgggactcgttggttaatccaggaccagctatggccagccacaaagacgatgaagaaaagtttttccccatgcatggaaccctgatatttggcaaacaaggaacaaatgctaacgacgcggatttggacaatgtcatgattacagatgaagaagaaatccgtaccaccaatcccgtggctacggagcagtacgggactgtgtcaaataatttgcaaaactcaaatactggtccaactactggaactgtcaatcaccaaggagcgttacctggtatggtgtggcaggatcgagacgtgtaccttcagggacccatttgggccaagattcctcacaccgatggacactttcacccttctccgctgatgggaggttttggactcaaacacccgcctcctcagatcatgatcaaaaacactcccgttccagccaatcctcccacaaacttcagttctgccaagtttgcttctttcatcacacagtattccacgggacaggttagcgtggagatcgagtgggagctgcagaaggagaacagcaaacgctggaaccccgagatccagtacacttccaactacaacaagtctgttaatgtggactttactgtggacactaatggtgtgtattcagagcctcgccccattggcaccagatacctgactcgtaatctgtaa

SEQ ID NO: 3699 - DNA, 2208 bp, synthetic construct
  misc_feature 1..2208: note = source = /note="Description of Artificial Sequence: Synthetic polynucleotide"
  source 1..2208: mol_type = other DNA
atggctgccgatggttatcttccagattggctcgaggacactctctctgaaggaataagacagtggtggaagctcaaacctggcccaccaccgccaaagcccgcagagcggcataaggacgacagcaggggtcttgtgcttcctgggtacaagtacctcggacccttcaacggactcgacaagggagagccggtcaacgaggcagacgccgcggccctcgagcacgacaaggcctacgaccggcagctcgacagcggagacaacccgtacctcaagtacaaccacgccgacgcggagtttcaggagcgccttaaagaagatacgtcttttgggggcaacctcggacgagcagtattccaggcgaaaaagagggttcttgaacctctgggcctggttgaggagcctgttaagacggctccgggaaaaaagaggccggtagagcactctcctgtggagccagactcctcctcgggaaccggaaaagcgggccagcagcctgcgagaaagagattgaattttggtcagactggagacgcagactccgtacctgacccccagcctctcggacagccaccagcagcccccacaagtttgggatctactacaatggctacaggcagtggcgcaccaatggcagacaataacgagggtgccgatggagtgggtaattcctcaggaaattggcattgcgattcccaatggttgggcgacagagtcatcaccaccagcacccgaacctgggccctgcccacctacaacaaccacctctacaagcaaatctccagccaatcaggagccagcaacgacaaccactactttggctacagcaccccctgggggtattttgacttcaacagattccactgccacttttcaccacgtgactggcaaagactcatcaacaacaactggggattccgacccaagagactcaacttcaagctctttaacattcaagtcaaagaggtcacgcagaatgacggtacgacgacgattgccaataaccttaccagcacggttcaggtgtttactgactcggagtaccagctcccgtacgtcctcggctcggcgcatcaaggatgcctcccgccgtttccagcggacgtcttcatggtcccacagtatggatacctcaccctgaacaacgggagtcaggcggtaggacgctcttccttttactgcctggagtactttccttctcagatgcttcgtaccggaaacaactttaccttcagttacacctttgaagacgttcctttccacagcagctacgctcacagtcaaagtctggaccggctgatgaatcctcttatcgaccagtacctgtattatctaaacaaaacacaatcaaatagtggaactcttcagcagcctcggctactgtttagtcaagctggacctaccagcatgtctcttcaagctaaaaactggctgcctggaccttgctacagacaacagcgtctgtcaaagcaggcaaacgacaacaacaacagcaactttccctggactgcggctacaaagtatcatctaaatggccgggactcgttggttaatccaggaccagctatggccagccacaaagacgatgaagaaaagtttttccccatgcatggaaccctgatatttggcaaacaaggaacaaatgctaacgacgcggatttggacaatgtcatgattacagatgaagaagaaatccgtaccaccaatcccgtggctacggagcagtacgggactgtgtcaaataatttgcaaaactcaaatactggtccaactactggaactgtcaatcaccaaggagcgttacctggtatggtgtggcaggatcgagacgtgtaccttcagggacccatttgggccaagattcctcacaccgatggacactttcacccttctccgctgatgggaggttttggactcaaacacccgcctcctcagatcatgatcaaaaacactcccgttccagccaatcctcccacaaacttcagttctgccaagtttgcttctttcatcacacagtattccacgggacaggttagcgtggagatcgagtgggagctgcagaaggagaacagcaaacgctggaaccccgagatccagtacacttccaactacaacaagtctgttaatgtggactttactgtggacactaatggtgtgtattcagagcctcgccccattggcaccagatacctgactcgtaatctgtaa

SEQ ID NO: 3700 - DNA, 2205 bp, synthetic construct
  misc_feature 1..2205: note = source = /note="Description of Artificial Sequence: Synthetic polynucleotide"
  source 1..2205: mol_type = other DNA
atggctgccgatggttatcttccagattggctcgaggacactctctctgaaggaataagacagtggtggaagctcaaacctggcccaccaccgccaaagcccgcagagcggcataaggacgacagcaggggtcttgtgcttcctgggtacaagtacctcggacccttcaacggactcgacaagggagagccggtcaacgaggcagacgccgcggccctcgagcacgacaaggcctacgaccggcagctcgacagcggagacaacccgtacctcaagtacaaccacgccgacgcggagtttcaggagcgccttaaagaagatacgtcttttgggggcaacctcggacgagcagtattccaggcgaaaaagagggttcttgaacctctgggcctggttgaggagcctgttaagacggctccgggaaaaaagaggccggtagagcactctcctgtggagccagactcctcctcgggaaccggaaaagcgggccagcagcctgcgagaaagagattgaattttggtcagactggagacgcagactccgtacctgacccccagcctctcggacagccaccagcagcccccacaagtttgggatctactacaatggctacaggcagtggcgcaccaatggcagacaataacgagggtgccgatggagtgggtaattcctcaggaaattggcattgcgattcccaatggttgggcgacagagtcatcaccaccagcacccgaacctgggccctgcccacctacaacaaccacctctacaagcaaatctccagccaatcaggagccagcaacgacaaccactactttggctacagcaccccctgggggtattttgacttcaacagattccactgccacttttcaccacgtgactggcaaagactcatcaacaacaactggggattccgacccaagagactcaacttcaagctctttaacattcaagtcaaagaggtcacgcagaatgacggtacgacgacgattgccaataaccttaccagcacggttcaggtgtttactgactcggagtaccagctcccgtacgtcctcggctcggcgcatcaaggatgcctcccgccgtttccagcggacgtcttcatggtcccacagtatggatacctcaccctgaacaacgggagtcaggcggtaggacgctcttccttttactgcctggagtactttccttctcagatgcttcgtaccggaaacaactttaccttcagttgcacctttgaagacgttcctttccacagcagctacgctcacagtcaaagtctggaccggctgatgaatcctcttatcgaccagtacctgtattatctaaacaaaacacaatcaaatagtggaactcttcagcagtctcggctactgtttagtcaagctggacctaccagcatgtctcttcaagctaaaaactggctgcctggaccttgctacagacaacagcgtctgtcaaagcaggcaaacgacaacaacagcaactttccctggactgcggctacaaagtatcatctaaatggccgggactcgttggttaatccaggaccagctatggccagccacaaagacgatgaagaaaagtttttccccatgcatggaaccctgatatttggcaaacaaggaacaaatgctaacgacgcggatttggacaatgtcatgattacagatgaagaagaaatccgtaccaccaatcccgtggctacggagcagtacgggactgtgtcaaataatttgcaaaactcaaatactggtccaactactggaactgtcaatcaccaaggagcgttacctggtatggtgtggcaggatcgagacgtgtaccttcagggacccatttgggccaagattcctcacaccgatggacactttcacccttctccgctgatgggaggttttggactcaaacacccgcctcctcagatcatgatcaaaaacactcccgttccagccaatcctcccacaaacttcagttctgccaagtttgcttctttcatcacacagtattccacgggacaggttagcgtggagatcgagtgggagctgcagaaggagaacagcaaacgctggaaccccgagatccagtacacttccaactacaacaagtctgttaatgtggactttactgtggacactaatggtgtgtattcagagcctcgccccattggcaccagatacctgactcgtaatctgtaa

SEQ ID NO: 3701 - DNA, 2208 bp, synthetic construct
  misc_feature 1..2208: note = source = /note="Description of Artificial Sequence: Synthetic polynucleotide"
  source 1..2208: mol_type = other DNA
atggctgccgatggttatcttccagattggctcgaggacactctctctgaaggaataagacagtggtggaagctcaaacctggcccaccaccgccaaagcccgcagagcggcataaggacgacagcaggggtcttgtgcttcctgggtacaagtacctcggacccttcaacggactcgacaagggagagccggtcaacgaggcagacgccgcggccctcgagcacgacaaggcctacgaccggcagctcgacagcggagacaacccgtacctcaagtacaaccacgccgacgcggagtttcaggagcgccttaaagaagatacgtcttttgggggcaacctcggacgagcagtattccaggcgaaaaagagggttcttgaacctctgggcctggttgaggagcctgttaagacggctccgggaaaaaagaggccggtagagcactctcctgtggagccagactcctcctcgggaaccggaaaagcgggccagcagcctgcgagaaagagattgaattttggtcagactggagacgcagactccgtacctgacccccagcctctcggacagccaccagcagcccccacaagtttgggatctactacaatggctacaggcagtggcgcaccaatggcagacaataacgagggtgccgatggagtgggtaattcctcaggaaattggcattgcgattcccaatggttgggcgacagagtcatcaccaccagcacccgaacctgggccctgcccacctacaacaaccacctctacaagcaaatctccagccaatcaggagccagcaacgacaaccactactttggctacagcaccccctgggggtattttgacttcaacagattccactgccacttttcaccacgtgactggcaaagactcatcaacaacaactggggattccgacccaagagactcaacttcaagctctttaacattcaagtcaaagaggtcacgcagaatgacggtacgacgacgattgccaataaccttaccagcacggttcaggtgtttactgactcggagtaccagctcccgtacgtcctcggctcggcgcatcaaggatgcctcccgccgtttccagcggacgtcttcatggtcccacagtatggatacctcaccctgaacaacgggagtcaggcggtaggacgctcttccttttactgcctggagtactttccttctcagatgcttcgtaccggaaacaactttaccttcagttgcacctttgaagacgttcctttccacagcagctacgctcacagtcaaagtctggaccggctgatgaatcctcttatcgaccagtacctgtattatctaaacaaaacacaatcaaatagtggaactcttcagcagtctcggctactgtttagtcaagctggacctaccagcatgtctcttcaagctaaaaactggctgcctggaccttgctacagacaacagcgtctgtcaaagcaggcaaacgacaacaacaacagcaactttccctggactgcggctacaaagtatcatctaaatggccgggactcgttggttaatccaggaccagctatggccagccacaaagacgatgaagaaaagtttttccccatgcatggaaccctgatatttggcaaacaaggaacaaatgctaacgacgcggatttggacaatgtcatgattacagatgaagaagaaatccgtaccaccaatcccgtggctacggagcagtacgggactgtgtcaaataatttgcaaaactcaaatactggtccaactactggaactgtcaatcaccaaggagcgttacctggtatggtgtggcaggatcgagacgtgtaccttcagggacccatttgggccaagattcctcacaccgatggacactttcacccttctccgctgatgggaggttttggactcaaacacccgcctcctcagatcatgatcaaaaacactcccgttccagccaatcctcccacaaacttcagttctgccaagtttgcttctttcatcacacagtattccacgggacaggttagcgtggagatcgagtgggagctgcagaaggagaacagcaaacgctggaaccccgagatccagtacacttccaactacaacaagtctgttaatgtggactttagtgtggacactaatggtgtgtattcagagcctcgccccattggcaccagatacctgactcgtaatctgtaa

SEQ ID NO: 3702 - DNA, 2208 bp, synthetic construct
  misc_feature 1..2208: note = source = /note="Description of Artificial Sequence: Synthetic polynucleotide"
  source 1..2208: mol_type = other DNA
atggctgccgatggttatcttccagattggctcgaggacactctctctgaaggaataagacagtggtggaagctcaaacctggcccaccaccgccaaagcccgcagagcggcataaggacgacagcaggggtcttgtgcttcctgggtacaagtacctcggacccttcaacggactcgacaagggagagccggtcaacgaggcagacgccgcggccctcgagcacgacaaggcctacgaccggcagctcgacagcggagacaacccgtacctcaagtacaaccacgccgacgcggagtttcaggagcgccttaaagaagatacgtcttttgggggcaacctcggacgagcagtattccaggcgaaaaagagggttcttgaacctctgggcctggttgaggagcctgttaagacggctccgggaaaaaagaggccggtagagcactctcctgtggagccagactcctcctcgggaaccggaaaagcgggccagcagcctgcgagaaagagattgaattttggtcagactggagacgcagactccgtacctgacccccagcctctcggacagccaccagcagcccccacaagtttgggatctactacaatggctacaggcagtggcgcaccaatggcagacaataacgagggtgccgatggagtgggtaattcctcaggaaattggcattgcgattcccaatggttgggcgacagagtcatcaccaccagcacccgaacctgggccctgcccacctacaacaaccacctctacaagcaaatctccagccaatcaggagccagcaacgacaaccactactttggctacagcaccccctgggggtattttgacttcaacagattccactgccacttttcaccacgtgactggcaaagactcatcaacaacaactggggattccgacccaagagactcaacttcaagctctttaacattcaagtcaaagaggtcacgcagaatgacggtacgacgacgattgccaataaccttaccagcacggttcaggtgtttactgactcggagtaccagctcccgtacgtcctcggctcggcgcatcaaggatgcctcccgccgtttccagcggacgtcttcatggtcccacagtatggatacctcaccctgaacaacgggagtcaggcggtaggacgctcttccttttactgcctggagtactttccttctcagatgcttcgtaccggaaacaactttaccttcagttgcacctttgaagacgttcctttccacagcagctacgctcacagtcaaagtctggaccggctgatgaatcctcttatcgaccagtacctgtattatctaaacaaaacacaatcaaatagtggaactcttcagcagtctcggctactgtttagtcaagctggacctaccagcatgtctcttcaagctaaaaactggctgcctggaccttgctacagacaacagcgtctgtcaaagcaggcaaacgacaacaacaacagcaactttccctggactgcggctacaaagtatcatctaaatggccgggactcgttggttaatccaggaccagctatggccagccacaaagacgatgaagaaaagtttttccccatgcatggaaccctgatatttggcaaacaaggaacaaatgctaacgacgcggatttggacaatgtcatgattacagatgaagaagaaatccgtaccaccaatcccgtggctacggagcagtacgggactgtgtcaaataatttgcaaaactcaaatactggtccaactactggaactgtcaatcaccaaggagcgttacctggtatggtgtggcaggatcgagacgtgtaccttcagggacccatttgggccaagattcctcacaccgatggacactttcacccttctccgctgatgggaggttttggactcaaacacccgcctcctcagatcatgatcaaaaacactcccgttccagccaatcctcccacaaacttcagttctgccaagtttgcttctttcatcacacagtattccacgggacaggttagcgtggagatcgagtgggagctgcagaaggagaacagcaaacgctggaaccccgagatccagtacacttccaactacaacaagtctgttaatgtggactttactgtggacactaatggtgtgtattcagagcctcgccccattggcaccagatacctgactcgtaatctgtaa

SEQ ID NO: 3703 - DNA, 2208 bp, synthetic construct
  misc_feature 1..2208: note = source = /note="Description of Artificial Sequence: Synthetic polynucleotide"
  source 1..2208: mol_type = other DNA
atggctgccgatggttatcttccagattggctcgaggacactctctctgaaggaataagacagtggtggaagctcaaacctggcccaccaccgccaaagcccgcagagcggcataaggacgacagcaggggtcttgtgcttcctgggtacaagtacctcggacccttcaacggactcgacaagggagagccggtcaacgaggcagacgccgcggccctcgagcacgacaaggcctacgaccggcagctcgacagcggagacaacccgtacctcaagtacaaccacgccgacgcggagtttcaggagcgccttaaagaagatacgtcttttgggggcaacctcggacgagcagtattccaggcgaaaaagagggttcttgaacctctgggcctggttgaggagcctgttaagacggctccgggaaaaaagaggccggtagagcactctcctgtggagccagactcctcctcgggaaccggaaaagcgggccagcagcctgcgagaaagagattgaattttggtcagactggagacgcagactccgtacctgacccccagcctctcggacagccaccagcagcccccacaagtttgggatctactacaatggctacaggcagtggcgcaccaatggcagacaataacgagggtgccgatggagtgggtaattcctcaggaaattggcattgcgattcccaatggttgggcgacagagtcatcaccaccagcacccgaacctgggccctgcccacctacaacaaccacctctacaagcaaatctccagccaatcaggagccagcaacgacaaccactactttggctacagcaccccctgggggtattttgacttcaacagattccactgccacttttcaccacgtgactggcaaagactcatcaacaacaactggggattccgacccaagagactcaacttcaagctctttaacattcaagtcaaagaggtcacgcagaatgacggtacgacgacgattgccaataaccttaccagcacggttcaggtgtttactgactcggagtaccagctcccgtacgtcctcggctcggcgcatcaaggatgcctcccgccgtttccagcggacgtcttcatggtcccacagtatggatacctcaccctgaacaacgggagtcaggcggtaggacgctcttccttttactgcctggagtactttccttctcagatgcttcgtaccggaaacaactttaccttcagttacacctttgaagacgttcctttccacagcagctacgctcacagtcaaagtctggaccggctgatgaatcctcttatcgaccagtacctgtattatctaaacaaaacacaatcaaatagtggaactcttcagcagtctcggctactgtttagtcaagctggacctaccagcatgtctcttcaagctaaaaactggctgcctggaccttgctacagacaacagcgtctgtcaaagcaggcaaacgacaacaacaacagcaactttccctggactgcggctacaaagtatcatctaaatggccgggactcgttggttaatccaggaccagctatggccagccacaaagacgatgaagaaaagtttttccccatgcatggaaccctgatatttggcaaacaaggaacaaatgctaacgacgcggatttggacaatgtcatgattacagatgaagaagaaatccgtaccaccaatcccgtggctacggagcagtacgggactgtgtcaaataatttgcaaaactcaaatactggtccaactactggaactgtcaatcaccaaggagcgttacctggtatggtgtggcaggatcgagacgtgtaccttcagggacccatttgggccaagattcctcacaccgatggacactttcacccttctccgctgatgggaggttttggactcaaacacccgcctcctcagatcatgatcaaaaacactcccgttccagccaatcctcccacaaacttcagttctgccaagtttgcttctttcatcacacagtattccacgggacaggttagcgtggagatcgagtgggagctgcagaaggagaacagcaaacgctggaaccccgagatccagtacacttccaactacaacaagtctgttaatgtggactttagtgtggacactaatggtgtgtattcagagcctcgccccattggcaccagatacctgactcgtaatctgtaa

SEQ ID NO: 3704 - DNA, 2208 bp, synthetic construct
  misc_feature 1..2208: note = source = /note="Description of Artificial Sequence: Synthetic polynucleotide"
  source 1..2208: mol_type = other DNA
atggctgccgatggttatcttccagattggctcgaggacactctctctgaaggaataagacagtggtggaagctcaaacctggcccaccaccgccaaagcccgcagagcggcataaggacgacagcaggggtcttgtgcttcctgggtacaagtacctcggacccttcaacggactcgacaagggagagccggtcaacgaggcagacgccgcggccctcgagcacgacaaggcctacgaccggcagctcgacagcggagacaacccgtacctcaagtacaaccacgccgacgcggagtttcaggagcgccttaaagaagatacgtcttttgggggcaacctcggacgagcagtattccaggcgaaaaagagggttcttgaacctctgggcctggttgaggagcctgttaagacggctccgggaaaaaagaggccggtagagcactctcctgtggagccagactcctcctcgggaaccggaaaagcgggccagcagcctgcgagaaagagattgaattttggtcagactggagacgcagactccgtacctgacccccagcctctcggacagccaccagcagcccccacaagtttgggatctactacaatggctacaggcagtggcgcaccaatggcagacaataacgagggtgccgatggagtgggtaattcctcaggaaattggcattgcgattcccaatggttgggcgacagagtcatcaccaccagcacccgaacctgggccctgcccacctacaacaaccacctctacaagcaaatctccagccaatcaggagccagcaacgacaaccactactttggctacagcaccccctgggggtattttgacttcaacagattccactgccacttttcaccacgtgactggcaaagactcatcaacaacaactggggattccgacccaagagactcaacttcaagctctttaacattcaagtcaaagaggtcacgcagaatgacggtacgacgacgattgccaataaccttaccagcacggttcaggtgtttactgactcggagtaccagctcccgtacgtccccggctcggcgcatcaaggatgcctcccgccgtttccagcggacgtcttcatggtcccacagtatggatacctcaccctgaacaacgggagtcaggcggtaggacgctcttccttttactgcctggagtactttccttctcagatgcttcgtaccggaaacaactttaccttcagttgcacctttgaagacgttcctttccacagcagctacgctcacagtcaaagtctggaccggctgatgaatcctcttatcgaccagtacctgtattatctaaacaaaacacaatcaaatagtggaactcttcagcagcctcggctactgtttagtcaagctggacctaccagcatgtctcttcaagctaaaaactggctgcctggaccttgctacagacaacagcgtctgtcaaagcaggcaaacgacaacaacaacagcaactttccctggactgcggctacaaagtatcatctaaatggccgggactcgttggttaatccaggaccagctatggccagccacaaagacgatgaagaaaagtttttccccatgcatggaaccctgatatttggcaaacaaggaacaaatgctaacgacgcggatttggacaatgtcatgattacagatgaagaagaaatccgtaccaccaatcccgtggctacggagcagtacgggactgtgtcaaataatttgcaaaactcaaatactggtccaactactggaactgtcaatcaccaaggagcgttacctggtatggtgtggcaggatcgagacgtgtaccttcagggacccatttgggccaagattcctcacaccgatggacactttcacccttctccgctgatgggaggttttggactcaaacacccgcctcctcagatcatgatcaaaaacactcccgttccagccaatcctcccacaaacttcagttctgccaagtttgcttctttcatcacacagtattccacgggacaggttagcgtggagatcgagtgggagctgcagaaggagaacagcaaacgctggaaccccgagatccagtacacttccaactacaacaagtctgttaatgtggactttactgtggacactaatggtgtgtattcagagcctcgccccattggcaccagatacctgactcgtaatctgtaa

SEQ ID NO: 3705 - DNA, 2208 bp, synthetic construct
  misc_feature 1..2208: note = source = /note="Description of Artificial Sequence: Synthetic polynucleotide"
  source 1..2208: mol_type = other DNA
atggctgccgatggttatcttccagattggctcgaggacactctctctgaaggaataagacagtggtggaagctcaaacctggcccaccaccgccaaagcccgcagagcggcataaggacgacagcaggggtcttgtgcttcctgggtacaagtacctcggacccttcaacggactcgacaagggagagccggtcaacgaggcagacgccgcggccctcgagcacgacaaggcctacgaccggcagctcgacagcggagacaacccgtacctcaagtacaaccacgccgacgcggagtttcaggagcgccttaaagaagatacgtcttttgggggcaacctcggacgagcagtattccaggcgaaaaagagggttcttgaacctctgggcctggttgaggagcctgttaagacggctccgggaaaaaagaggccggtagagcactctcctgtggagccagactcctcctcgggaaccggaaaagcgggccagcagcctgcgagaaagagattgaattttggtcagactggagacgcagactccgtacctgacccccagcctctcggacagccaccagcagcccccacaagtttgggatctactacaatggctacaggcagtggcgcaccaatggcagacaataacgagggtgccgatggagtgggtaattcctcaggaaattggcattgcgattcccaatggttgggcgacagagtcatcaccaccagcacccgaacctgggccctgcccacctacaacaaccacctctacaagcaaatctccagccaatcaggagccagcaacgacaaccactactttggctacagcaccccctgggggtattttgacttcaacagattccactgccacttttcaccacgtgactggcaaagactcatcgacaacaactggggattccgacccaagagactcaacttcaagctctttaacattcaagtcaaagaggtcacgcagaatgacggtacgacgacgattgccaataaccttaccagcacggttcaggtgtttactgactcggagtaccagctcccgtacgtcctcggctcggcgcatcaaggatgcctcccgccgttttcagcggacgtcttcatggtcccacagtatggatacctcaccctgaacaacgggagtcaggcggtaggacgctcttccttttactgcctggagtactttccttctcagatgcttcgtaccggaaacaactttaccttcagttacacctttgaagacgttcctttccacagcagctacgctcacagtcaaagtctggaccggctgatgaatcctcttatcgaccagtacctgtattatctaaacaaaacacaatcaaatagtggaactcttcagcagtctcggctactgtttagtcaagctggacctaccagcatgtctcttcaagctaaaaactggctgcctggaccttgctacagacaacagcgtctgtcaaagcaggcaaacgacaacaacaacagcaactttccctggactgcggctacaaagtatcatctaaatggccgggactcgttggttaatccaggaccagctatggccagccacaaagacgatgaagaaaagtttttccccatgcatggaaccctgatatttggcaaacaaggaacaaatgctaacgacgcggatttggacaatgtcatgattacagatgaagaagaaatccgtaccaccaatcccgtggctacggagcagtacgggactgtgtcaaataatttgcaaaactcaaatactggtccaactactggaactgtcaatcaccaaggagcgttacctggtatggtgtggcaggatcgagacgtgtaccttcagggacccatttgggccaagattcctcacaccgatggacactttcacccttctccgctgatgggaggttttggactcaaacacccgcctcctcagatcatgatcaaaaacactcccgttccagccaatcctcccgcaaacttcagttctgccaagtttgcttctttcatcacacagtattccacgggacaggttagcgtggagatcgagtgggagctgcagaaggagaacagcaaacgctggaaccccgagatccagtacacttccaactacaacaagtctgttaatgtggactttactgtggacactaatggtgtgtattcagagcctcgccccattggcaccagatacctgactcgtaatctgtaa

SEQ ID NO: 3706 - DNA, 2208 bp, synthetic construct
  misc_feature 1..2208: note = source = /note="Description of Artificial Sequence: Synthetic polynucleotide"
  source 1..2208: mol_type = other DNA
atggctgccgatggttatcttccagattggctcgaggacactctctctgaaggaataagacagtggtggaagctcaaacctggcccaccaccgccaaagcccgcagagcggcataaggacgacagcaggggtcttgtgcttcctgggtacaagtacctcggacccttcaacggactcgacaagggagagccggtcaacgaggcagacgccgcggccctcgagcacgacaaggcctacgaccggcagctcgacagcggagacaacccgtacctcaagtacaaccacgccgacgcggagtttcaggagcgccttaaagaagatacgtcttttgggggcaacctcggacgagcagtattccaggcgaaaaagagggttcttgaacctctgggcctggttgaggagcctgttaagacggctccgggaaaaaagaggccggtagagcactctcctgtggagccagactcctcctcgggaaccggaaaagcgggccagcagcctgcgagaaagagattgaattttggtcagactggagacgcagactccgtacctgacccccagcctctcggacagccaccagcagcccccacaagtttgggatctactacaatggctacaggcagtggcgcaccaatggcagacaataacgagggtgccgatggagtgggtaattcctcaggaaattggcattgcgattcccaatggttgggcgacagagtcatcaccaccagcacccgaacctgggccctgcccacctacaacaaccacctctacaagcaaatctccagccaatcaggagccagcaacgacaaccactactttggctacagcaccccctgggggtattttgacttcaacagattccactgccacttttcaccacgtgactggcaaagactcatcaacaacaactggggattccgacccaagagactcaacttcaagctctttaacattcaagtcaaagaggtcacgcagaatgacggtacgacgacgattgccaataaccttaccggcacggttcaggtgtttactgactcggagtaccagctcccgtacgtcctcggctcggcgcatcaaggatgcctcccgccgtttccagcggacgtcttcatggtcccacagtatggatacctcaccctgaacaacgggagtcaggcggtaggacgctcttccttttactgcctggagtactttccttctcagatgcttcgtaccggaaacaactttaccttcagttacacctttgaagacgttcctttccacagcagctacgctcacagtcaaagtctggaccggctgatgaatcctcttatcgaccagtacctgtattatctaaacaaaacacaatcaaatagtggaactcttcagcagtctcggctactgtttagtcaagctggacctaccagcatgtctcttcaagctaaaaactggctgcctggaccttgctacagacaacagcgtctgtcaaagcaggcaaacgacaacaacaacagcaactttccctggactgcggctacaaagtatcatctaaatggccgggactcgttggttaatccaggaccagctatggccagccacaaagacgatgaagaaaagtttttccccatgcatggaaccctgatatttggcaaacaaggaacaaatgctaacgacgcggatttggacaatgtcatgattacagatgaagaagaaatccgtaccaccaatcccgtggctacggagcagtacgggactgtgtcaaataatttgcaaaactcaaatactggtccaactactggaactgtcaatcaccaaggagcgttacctggtatggtgtggcaggatcgagacgtgtaccttcagggacccatttgggccaagattcctcacaccgatggacactttcacccttctccgctgatgggaggttttggactcaaacacccgcctcctcagatcatgatcaaaaacactcccgttccagccaatcctcccacaaacttcagttctgccaagtttgcttctttcatcacacagtattccacgggacaggttagcgtggagatcgagtgggagctgcagaaggagaacagcaaacgctggaaccccgagatccagtacacttccaactacaacaagtctgttaatgtggactttactgtggacactaatggtgtgtattcagagcctcgccccattggcaccagatacctgactcgtaatctgtaa

SEQ ID NO: 3707 - DNA, 2208 bp, synthetic construct
  misc_feature 1..2208: note = source = /note="Description of Artificial Sequence: Synthetic polynucleotide"
  source 1..2208: mol_type = other DNA
atggctgccgatggttatcttccagattggctcgaggacactctctctgaaggaataagacagtggtggaagctcaaacctggcccaccaccgccaaagcccgcagagcggcataaggacgacagcaggggtcttgtgcttcctgggtacaagtacctcggacccttcaacggactcgacaagggagagccggtcaacgaggcagacgccgcggccctcgagcacgacaaggcctacgaccggcagctcgacagcggagacaacccgtacctcaagtacaaccacgccgacgcggagtttcaggagcgccttaaagaagatacgtcttttgggggcaacctcggacgagcagtattccaggcgaaaaagagggttcttgaacctctgggcctggctgaggagcctgttaagacggctccgggaaaaaagaggccggtagagcactctcctgtggagccagactcctcctcgggaaccggaaaagcgggccagcagcctgcgagaaagagattgaattttggtcagactggagacgcagactccgtacctgacccccagcctctcggacagccaccagcagcccccacaagtttgggatctactacaatggctacaggcagtggcgcaccaatggcagacaataacgagggtgccgatggagtgggtaattcctcaggaaattggcattgcgattcccaatggttgggcgacagagtcatcaccaccagcacccgaacctgggccctgcccacctacaacaaccacctctacaagcaaatctccagccaatcaggagccagcaacgacaaccactactttggctacagcaccccctgggggtattttgacttcaacagattccactgccacttttcaccacgtgactggcaaagactcatcaacaacaactggggattccgacccaagagactcaacttcaagctctttaacattcaagtcaaagaggtcacgcagaatgacggtacgacgacgattgccaataaccttaccagcacggttcaggtgtttactgactcggagtaccagctcccgtacgtcctcggctcggcgcatcaaggatgcctcccgccgtttccagcggacgtcttcatggtcccacagtatggatacctcaccctgaacaacgggagtcaggcggtaggacgctcttccttttactgcctggagtactttccttctcagatgcttcgtaccggaaacaactttaccttcagttacacctttgaagacgttcctttccacagcagctacgctcacagtcaaagtctggaccggctgatgaatcctcttatcgaccagtacctgtattatctaaacaaaacacaatcaaatagtggaactcttcagcagtctcggctactgtttagtcaagctggacctaccagcatgtctcttcaagctaaaaactggctgcctggaccttgctacagacaacagcgtctgtcaaagcaggcaaacgacaacaacaacagcaactttccctggactgcggctacaaagtatcatctaaatggccgggactcgttggttaatccaggaccagctatggccagccacaaagacgatgaagaaaagtttttccccatgcatggaaccctgatatttggcaaacaaggaacaaatgctaacgacgcggatttggacaatgtcatgattacagatgaagaagaaatccgtaccaccaatcccgtggctacggagcagtacgggactgtgtcaaataatttgcaaaactcaaatactggtccaactactggaactgtcaatcaccaaggagcgttacctggtatggtgtggcaggatcgagacgtgtaccttcagggacccatttgggccaagattcctcacaccgatggacactttcacccttctccgctgatgggaggttttggactcaaacacccgcctcctcagatcatgatcaaaaacactcccgttccagccaatcctcccacaaacttcagttctgccaagtttgcttctttcatcacacagtattccacgggacaggttagcgtggagatcgagtgggagctgcagaaggagaacagcaaacgctggaaccccgagatccagtacacttccaactacaacaagtctgttaatgtggactttactgtggacactaatggtgtgtattcagagcctcgccccattggcaccagatacctgactcgtaatctgtaa

SEQ ID NO: 3708 - DNA, 2208 bp, synthetic construct; identical to SEQ ID NO: 3637
  misc_feature 1..2208: note = source = /note="Description of Artificial Sequence: Synthetic polynucleotide"
  source 1..2208: mol_type = other DNA

SEQ ID NO: 3709 - DNA, 2208 bp, synthetic construct
  misc_feature 1..2208: note = source = /note="Description of Artificial Sequence: Synthetic polynucleotide"
  source 1..2208: mol_type = other DNA
atggctgccgatggttatcttccagattggctcgaggacactctctctgaaggaataagacagtggtggaagctcaaacctggcccaccaccaccaaggcccgcagagcggcatcaggacgacagcaggggtcttgtgcttcctgggtacaagtacctcggacccttcaacggactcgacaaaggagagccggtcaacgaggcagacgctgcggccctcgagcacgacaaggcctacgaccggcagctcgacagcggagacaacccgtacctcaagtacaaccacgccgacgcggagtttcaggagcgtcttaaagaagatacgtcttttgggggcaacctcggacgagcagtcttccaggcgaaaaagagggttcttgaacctctgggcctggttgaggaacctgttaagacggctccgggaaaaaagaggccggtagagcactctcctgcggagccagactcctcctcgggaaccggaaaagcgggccagcagcctgcaagaaagagattgaatttcggtcagactggagacgcagactccgtacctgacccccagcctctcggacagccaccagcagcccccacaagtttgggatctactacaatggctacaggcagtggcgcaccaatggcagacaataacgagggtgccgatggagtgggtaattcctcaggaaattggcattgcgattcccaatggctgggcgacagagtcatcaccaccagcacccgaacctgggccctgcccacctacaacaaccacctctacaagcaaatctccagccaatcaggagcatcgaacgacaaccactactttggctacagcaccccttgggggtattttgacttcaacagattccactgtcacttctccccacgtgactggcaaagactcatcaacaacaactggggattccgacccaagagactcaacttcaagctctttaacattcaagtcaaagaggtcacgcagaatgacggtacgacgacgattgccaataaccttaccagcacggttcaggtgtttactgactcggagtaccagctcccgtacgtcctcggctcggcgcatcaaggatgcctcccgccgtttccagcggacgtcttcatggtcccacagtatggatacctcaccctgaacaacgggagtcaggcggtaggacgctcttccttttactgcctggagtactttccttctcagatgctgcgtaccggaaacaactttaccttcagctacacctttgaggacgtgcccttccacagcagctacgctcacagccagagtttggaccggctgatgaatcctctgatcgaccagtatctgtattatctgaacaggacacaatcaaatagtggaactcttcagcagtctaggctactgtttagccaagctggacccaccagcatgtcccttcaagctaaaaactggctgcctggaccttgctacagacagcagcgtctgtcaaagcaggcaaacgacaacaacaacagcaactttccctggactgcggctacaaagtatcatctaaatggtcgggactcgttggttaatccaggaccagctatggccagccacaaagacgatgaagaaaagtttttccccatgcatggaaccctgatatttggtaaacaaggaacaaatgctaacgacgcggatttggaacatgtcatgattacaggtgaagaagaaatcaggaccaccaatcccgtggctacagagcagtacggaaacgtgtcaaataatttgcaaaactcaaatactggtccaactacagaaaatgtcaatcaccagggagcgttacctggtatggtgtggcaggatcgagacgtgtacctgcagggacccatttgggccaagattcctcacaccgacggacactttcacccttctccactgatgggaggttttggactcaaacacccgcctcctcaaatcatgatcaaaaacactcctgttccagccaatcctcctacaaacttcagcgcggcaaagtttgcttccttcatcacacagtattccacgggacaggtcagcgtggagatcgagtgggagctgcagaaggagaacagcaaacgctggaaccccgagatccagtacacttccaactacaacaaatctgttaatgtggactttactgtggacgctaatggtgtgtattcagagcctcgccccattggcaccagatacctgactcgtaatctgtaa

SEQ ID NO: 3710 - DNA, 2208 bp, synthetic construct
  misc_feature 1..2208: note = source = /note="Description of Artificial Sequence: Synthetic polynucleotide"
  source 1..2208: mol_type = other DNA
atggctgccgatggttatcttccagattggctcgaggacactctctctgaaggaataagacagtggtggaagctcaaacctggcccaccaccaccaaggcccgcagagcggcatcaggacgacagcaggggtcttgtgcttcctgggtacaagtacctcggacccttcaacggactcgacaaaggagagccggtcaacgaggcagacgctgcggccctcgagcacgacaaggcctacgaccggcagctcgacagcggagacaacccgtacctcaagtacaaccacgccgacgcggagtttcaggagcgtcttaaagaagatacgtcttttgggggcaacctcggacgagcagtcttccaggcgaaaaagagggttcttgaacctctgggcctggttgaggaacctgttaagacggctccgggaaaaaagaggccggtagagcactctcctgcggagccagactcctcctcgggaaccggaaaagcgggccagcagcctgcaagaaagagattgaatttcggtcagactggagacgcagactccgtacctgacccccagcctctcggacagccaccagcagcccccacaagtttgggatctactacaatggctacaggcagtggcgcaccaatggcagacaataacgagggtgccgatggagtgggtaattcctcaggaaattggcattgcgattcccaatggctgggcgacagagtcatcaccaccagcacccgaacctgggccctgcccacctacaacaaccacctctacaagcaaatctccagccaatcaggagcatcgaacgacaaccactactttggctacagcaccccyttggggtattttgacttcaacagattccactgtcacttctccccacgtgactggcaaagactcatcaacaacaactggggattccgacccaagagactcaacttcaagctctttaacattcaagtcaaagaggtcacgcagaatgacggtacgacgacgattgccaataaccttaccagcacggttcaggtgtttactgactcggagtaccagctcccgtacgtcctcggctcggcgcatcaaggatgcctcccgccgtttccagcggacgtcttcatggtcccacagtatggatacctcaccctgaacaacgggagtcaggcggtaggacgctcttccttttactgcctggagtactttccttctcagatgctgcgtaccggaaacaactttaccttcagctacacctttgaggacgtgcccttccacagcagctacgctcacagccagagtttggaccggctgatgaatcctctgatcgaccagtatctgtattatctgaacaggacacaatcaaatagtggaactcttcagcagtctaggctactgtttagccaagctggacccaccagcatgtcccttcaagctaaaaactggctgcctggaccttgctacagacagcagcgtctgtcaaagcaggcaaacgacaacaacaacagcaactttccctggactgcggctacaaagtatcatctaaatggtcgggactcgttggttaatccaggaccagctatggccagccacaaagacgatgaagaaaagtttttccccatgcatggaaccctgatatttggtaaacaaggaacaaatgctaacgacacggatttggaacatgtcatgattacagatgaagaagaaatcaggaccaccaatcccgtggctacagagcagtacggaaacgtgtcaaataatttgcaaaactcaaatactggtccaactacagaaaatgtcaatcaccagggagcgttacctggtatggtgtggcaggatcgagacgtgtacctgcagggacccatttgggccaagattcctcacaccgacggacactttcacccttctccactgatgggaggttttggactcaaacacccgcctcctcaaatcatgatcaaaaacactcctgttccagccaatcctcctacaaacttcagcgcggcaaagtttgcttccttcatcacacagtattccacgggacaggtcagcgtggagatcgagtgggagctgcagaaggagaacagcaaacgctggaaccccgagatccagtacacttccaactacaacaaatctgttaatgtggactttactgtggacgctaatggtgtgtattcagagcctcgccccattggcaccagatacctgactcgtaatctgtaa

SEQ ID NO: 3711 - DNA, 2208 bp, synthetic construct
  misc_feature 1..2208: note = source = /note="Description of Artificial Sequence: Synthetic polynucleotide"
  source 1..2208: mol_type = other DNA
atggctgccgatggttatcttccagattggctcgaggacactctctctgaaggaataagacagtggtggaagctcaaacctggcccaccaccaccaaggcccgcagagcggcatcaggacgacagcaggggtcttgtgcttcctgggtacaagtacctcggacccttcaacggactcgacaaaggagagccggtcaacgaggcagacgctgcggccctcgagcacgacaaggcctacgaccggcagctcgacagcggagacaacccgtacctcaagtacaaccacgccgacgcggagtttcaggagcgtcttaaagaagatacgtcttttgggggcaacctcggacgagcagtcttccaggcgaaaaagagggttcttgaacctctgggcctggttgaggaacctgttaagacggctccgggaaaaaagaggccggtagagcactctcctgcggagccagactcctcctcgggaaccggaaaagcgggccagcagcctgcaagaaagagattgaatttcggtcagactggagacgcagactccgtacctgacccccagcctctcggacagccaccagcagcccccacaagtttgggatctactacaatggctacaggcagtggcgcaccaatggcagacaataacgagggtgccgatggagtgggtaattcctcaggaaattggcattgcgattcccaatggctgggcgacagagtcatcaccaccagcacccgaacctgggccctgcccacctacaacaaccacctctacaagcaaatctccagccaatcaggagcatcgaacgacaaccactactttggctacagcaccccttgggggtattttgacttcaacagattccactgtcacttctccccacgtgactggcaaagactcatcaacaacaactggggattccgacccaagagactcaacttcaagctctttaacattcaagtcaaagaggtcacgcagaatgacggtacgacgacgattgccaataaccttaccagcacggttcaggtgtttactgactcggagtaccagctcccgtacgtcctcggctcggcgcatcaaggatgcctcccgccgtttccagcggacgtcttcatggtcccacagtatggatacctcaccctgaacaacgggagtcaggcggtaggacgctcttccttttactgcctggagtactttccttctcagatgctgcgtaccggaaacaactttaccttcagctacacctttgaggacgtgcccttccacagcagctacgctcacagccagagtttggaccggctgatgaatcctctgatcgaccagtatctgtattatctgaacaggacacaatcaaatagtggaactcttcagcagtctaggctactgtttagccaagctggacccaccagcatgtcccttcaagctaaaaactggctgcctggaccttgctacagacagcagcgtctgtcaaagcaggcaaacgacaacaacaacagcaactttccctggactgcggctacaaagtatcatctaaatggtcgggactcgttggttaatccaggaccagctatggccagccacaaagacgatgaagaaaagtttttccccatgcatggaaccctgatatttggtaaacaaggaacaaatgctaacgacgcggatttggaacgtgtcatgattacagatgaagaagaaatcaggaccaccaatcccgtggctacagagcagtacggaaacgtgtcaaataatttgcaaaactcaaatactggtccaactacagaaaatgtcaatcaccagggagcgttacctggtatggtgtggcaggatcgagacgtgtacctgcagggacccatttgggccaagattcctcacgccgacggacactttcacccttctccactgatgggaggttttggactcaaacacccgcctcctcaaatcatgatcaaaaacactcctgttccagccaatcctcctacaaacttcagcgcggcaaagtttgcttccttcatcacacagtattccacgggacaggtcagcgtggagatcgagtgggagctgcagaaggagaacagcaaacgctggaaccccgagatccagtacacttccaactacaacaaatctgttaatgtggactttactgtggacgctaatggtgtgtattcagagcctcgccccattggcaccagatacctgactcgtaatctgtaa

SEQ ID NO: 3712 - DNA, 2208 bp, synthetic construct
  misc_feature 1..2208: note = source = /note="Description of Artificial Sequence: Synthetic polynucleotide"
  source 1..2208: mol_type = other DNA
atggctgccgatggttatcttccagattggctcgaggacactctctctgaaggaataagacagtggtggaagctcaaacctggcccaccaccaccaaggcccgcagagcggcatcaggacgacagcaggggtcttgtgcttcctgggtacaagtacctcggacccttcaacggactcgacaaaggagagccggtcaacgaggcagacgctgcggccctcgagcacgacaaggcctacgaccggcagctcgacagcggagacaacccgtacctcaagtacaaccacgccgacgcggagtttcaggagcgtcttaaagaagatacgtcttttgggggcaacctcggacgagcagtcttccaggcgaaaaagagggttcttgaacctctgggcctggttgaggaacctgttaagacggctccgggaaaaaagaggccggtagagcactctcctgcggagccagactcctcctcgggaaccggaaaagcgggccagcagcctgcaagaaagagattgaatttcggtcagactggagacgcagactccgtacctgacccccagcctctcggacagccaccagcagcccccacaagtttgggatctactacaatggcaacaggcagtggcgcaccaatggcagacaataacgagggtgccgatggagtgggtaattcctcaggaaattggcattgcgattcccaatggctgggcgacagagtcatcaccaccagcacccgaacctgggccctgcccacctacaacaaccacctctacaagcaaatctccagccaatcaggagcatcgaacgacaaccactactttggctacagcaccccttgggggtattttgacttcaacagattccactgtcacttctccccacgtgactggcaaagactcatcaacaacaactggggattccgacccaagagactcaacttcaagctctttaacattcaagtcaaagaggtcacgcagaatgacggtacgacgacgattgccaataaccttaccagcacggttcaggtgtttactgactcggagtaccagctcccgtacgtcctcggctcggcgcatcaaggatgcctcccgccgtttccagcggacgtcttcatggtcccacagtatggatacctcaccctgaacaacgggagtcaggcggtaggacgctcttccttttactgcctggagtactttccttctcagatgctgcgtaccggaaacaactttaccttcagctacacctttgaggacgtgcccttccacagcagctacgctcacagccagagtttggaccggctgatgaatcctctgatcgaccagtatctgtattatctgaacaggacacaatcaaatagtggaactcttcagcagtctaggctactgtttagccaagctggacccaccagcatgtcccttcaagctaaaaactggctgcctggaccttgctacagacagcagcgtctgtcaaagcaggcaaacgacaacaacaacagcaactttccctggactgcggctacaaagtatcatctaaatggtcgggactcgttggttaatccaggaccagctatggccagccacaaagacgatgaagaaaagtttttccccatgcatggaaccctgatatttggtaaacaaggaacaaatgctaacgacgcggatttggaacatgtcatgattacagatgaagaagaaatcaggaccaccaatcccgtggctacagagcagtacggaaacgtgtcaaataatttgcaaaactcaaatactggtccaactacagaaaatgtcaatcaccagggagcgttacctggtatggtgtggcaggatcgagacgtgtacctgcagggacccatttgggccaagattcctcacaccgacggacactttcacccttctccactgatgggaggttttggactcaaacacccgcctcctcaaatcatgatcaaaaacactcctgttccagccaatcctcctacaaacttcagcgcggcaaagtttgcttccttcatcacacggtattccacgggacaggtcagcgcggagatcgagtgggagctgcagaaggagaacagcaaacgctggaaccccgagatccagtacacttccaactacaacaaatctgttaatgtggactttactgtggacgctaatggtgtgtattcagagcctcgccccattggcaccagatacctgactcgtaatctgtaa

SEQ ID NO: 3713 - DNA, 2208 bp, synthetic construct
  misc_feature 1..2208: note = source = /note="Description of Artificial Sequence: Synthetic polynucleotide"
  source 1..2208: mol_type = other DNA
atggctgccgatggttatcttccagattggctcgaggacattctctctgaaggaataagacagtggtggaagctcaaacctggcccaccaccaccaaagcccgcagagcggcataaggacgacagcaggggtcttgtgcttcctgggtacaagtacctcggacccttcaacggactcgacaaaggagagccggtcaacgaggcagacgccgcggccctcgagcacgacaaggcctacgaccggcagctcgacagcggagacaacccgtacctcaagtacaaccacgccgacgcggagtttcaggagcgtcttaaagaagatacgtcttttgggggcaacctcggacgagcagtcttccaggcaaaaaagagggttcttgaacctctgggcctggttgaggaacctgttaagacggctccgggaaaaaagaggccggtagagcaatctcctgcggagccagactcctcctcgggaaccggaaaggcgggcaaccagcctgcaagaaagagattgaattttggtcagactggagacgcagactccgtacctgacccccagcctctcggacagccaccagcagccccctctggtctgggatctactacaatggctacaggcagtggcgcaccaatggcagacaataacgagggtgccgatggagtgggtaattcctcaggaaattggcattgcgattcccaatggttgggcgacagagtcatcaccaccagcacccgaacctgggccctgcccacctacaacaatcacctctacaagcaaatctccagccaatcaggagcagcgaacgacaaccactactttggctacagcaccccctgggggtattttgacttcaacagattccactgccacttttcaccacgtgactggcaaagactcatcaacaacaactggggattccgacccaaaagactcaacttcaagctctttaacattcaagtcaaagaggtcacgcagaatgacggtacgacgacgattgccaataaccttaccagcacggttcaggtgtttactgactcggagtaccagctcccgtacgtcctcggctcggcgcatcaaggatgcctcccgccgtttccagcggacgtcttcatggtcccacagtatggatacctcaccctgaacaacgggagtcaggcggtaggacgctcttccttttactgcctggagtactttccttctcagatgcttcgtaccggaaacaactttaccttcagttacacctttgaagacgttcctttccacagcagctacgctcacagtcaaagtctggaccggctgatgaatcctctgatagaccagtacctgcattatctaaacaaaacacaatcaaatagtggaactcttcagcagtctcggctactgtttagtcaagctggacccaccagcatgtctcttcaagctaaaaactggctgcctggaccttgctacagacaacagcgtctgtcaaagcaggcaaacgacaacaacaacagcaactttccctggactgcggctacaaagtatcatctaaatggccgggactcgttggttaatccaggaccagctatggccagccacaaagacgatgaagaaaagtttttccccatgcatggaaccctgatatttggtaaacaaggaacaaatgctaacgacgcggatttggacaatgtcatgattacagatgaagaagaaatccgcaccaccaatcccgtggctacggagcagtacgggactgtgtcaaataatttgcaaaactcaaatactggtccaactactggaactgtcaatcaccaaggagcgttacctggtatggtgtggcaggatcgagacgtgtaccttcagggacccatttgggccaagattcctcacaccgatggacactttcatccttctccactgatgggaggttttggactcaaacacccgcctcctcagatcatgatcaaaaacactcccgttccagccaatcctcctacaaacttcagttctgccaagtttgcttctttcatcacacagtattccacggggcaggtcagcgtggagatagagtgggagctgcagaaggagaacagcaaacgctggaaccccgagatccagtatacttccaactacaacaagtctgttaatgtggactttactgtggacactaatggtgtgtattcagagcctcgccccattggcaccagatacctgactcgtaatctgtaa

SEQ ID NO: 3714 - DNA, 2208 bp, synthetic construct
  misc_feature 1..2208: note = source = /note="Description of Artificial Sequence: Synthetic polynucleotide"
  source 1..2208: mol_type = other DNA
atggctgccgatggttatcttccagattggctcgaggacactctctctgaaggaataagacagtggtggaagctcaaacctggcccaccaccaccaaggcccgcagagcggcatcaggacgacagcaggggtcttgtgcttcctgggtacaagtacctcggacccttcaacggactcgacaaaggagagccggtcaacgaggcagacgctgcggccctcgagcacgacaaggcctacgaccggcagctcgacagcggagacaacccgtacctcaagtacaaccacgccgacgcggagtttcaggagcgtcttaaagaagatacgtcttttgggggcaacctcggacgagcagtcttccaggcgaaaaagagggttcttgaacctctgggcctggttgaggaacctgttaagacggctccgggaaaaaagaggccggtagagcactctcctgcggagccagactcctcctcgggaaccggaaaagcgggccagcagcctgcaagaaagagattgaatttcggtcagactggagacgcagactccgtacctgacccccagcctctcggacagccaccagcagcccccacaagtttgggatctactacaatggctacaggcagtggcgcaccaatggcagacaataacgagggtgccgatggagtgggtaattcctcaggaaattggcattgcgattcccaatggctgggcgacagagtcatcaccaccagcacccgaacctgggccctgcccacctacaacaaccacctctacaagcaaatctccagccaatcaggagcatcgaacgacaaccactactttggctacagcaccccttgggggtattttgacttcaacagattccactgtcacttctccccacgtgactggcaaagactcatcaacaacaactggggattccgacccaagagactcaacttcaagctctttaacattcaagtcaaagaggtcacgcagaatgacggtacgacgacgattgccaataaccttaccagcacggttcaggtgtttactgactcggagtaccagctcccgtacgtcctcggctcggcgcatcaaggatgcctcccgccgtttccagcggacgtcttcatggtcccacagtatggatacctcaccctgaacaacgggagtcaggcggtaggacgctcttccttttactgcctggagtactttccttctcagatgctgcgtaccggaaacaactttaccttcagctacacctttgaggacgtgcccttccacagcagctacgctcacagccagagtttggaccggctgatgaatcctctgatcgaccagtatctgtattatctgaacaggacacaatcaaatagtggaactcttcagcagtctaggctactgtttagccaagctggacccaccagcatgtcccttcaagctaaaaactggctgcctggaccttgctacagacagcagcgtctgtcaaagcaggcaaacgacaacaacaacagcaactttccctggactgcggctacaaagtatcatctaaatggtcgggactcgttggttaatccaggaccagctatggccagccacaaagacgatgaagaaaagtttttccccatgcatggaaccctgatatttggtaaacaaggaacaaatgctaacgacgcggatttggaacatgtcatgattacagatgaagaagaaatcaggaccaccaatcccgtggctacagagcagtacggaaacgtgtcaaataatttgcaaaactcaaatactggtccgactacagaaaatgtcaatcgccagggagcgttacctggtatggtgtggcaggatcgagacgtgtacctgcagggacccatttgggccaagattcctcacaccgacggacactttcacccttctccactgatgggaggttttggactcaaacacccgcctcctcaaatcatgatcaaaaacactcctgttccagccaatcctcctacaaacttcagcgcggcaaagtttgcttccttcatcacacagtattccacgggacaggtcagcgtggagatcgagtgggagctgcagaaggagaacagcaaacgctggaaccccgagatccagtacacttccaactacaacaaatctgttaatgtggactttactgtggacgctaatggtgtgtattcagagcctcgccccattggcaccagatacctgactcgtaatctgtaa

SEQ ID NO: 3715 - DNA, 2208 bp, synthetic construct
  misc_feature 1..2208: note = source = /note="Description of Artificial Sequence: Synthetic polynucleotide"
  source 1..2208: mol_type = other DNA
atggctgccgatggttatcttccagattggctcgaggacactctctctgaaggaataagacagtggtggaagctcaaacctggcccaccaccaccaaggcccgcagagcggcatcaggacgacagcaggggtcttgtgcttcctgggtacaagtacctcggacccttcaacggactcgacaaaggagagccggtcaacgaggcagacgctgcggccctcgagcacgacaaggcctacgaccggcagctcgacagcggagacaacccgtacctcaagtacaaccacgccgacgcggagtttcaggagcgtcttaaagaagatacgtcttttgggggcaacctcggacgagcagtcttccaggcgaaaaagagggttcttgaacctctgggcctggttgaggaacctgttaagacggctccgggaaaaaagaggccggtagagcactctcctgcggagccagactcctcctcgggaaccggaaaagcgggccagcagcctgcaagaaagagattgaatttcggtcagactggagacgcagactccgtacctgacccccagcctctcggacagccaccagcagcccccacaagtttgggatctactacaatggctacaggcagtggcgcaccaatggcagacaataacgagggtgccgatggagtgggtaattcctcaggaaattggcattgcgattcccaatggctgggcgacagagtcatcaccaccagcacccgaacctgggccctgcccacctacaacaaccacctctacaagcaaatctccagccaatcaggagcatcgaacgacaaccactactttggctacagcaccccttgggggtattttgacttcaacagattccactgtcacttctccccacgtgactggcaaagactcatcaacaacaactggggattccgacccaagagactcaacttcaagctctttaacattcaagtcaaagaggtcacgcagaatgacggtacgacgacgattgccaataaccttaccagcacggttcaggtgtttactgactcggagtaccagctcccgtacgtcctcggctcggcgcatcaaggatgcctcccgccgtttccagcggacgtcttcatggtcccacagtatggatacctcaccctgaacaacgggagtcaggcggtaggacgctcttccttttactgcctggagtactttccttctcagatgctgcgtaccggaaacaactttaccttcagctacacctttgaggacgtgcccttccacagcagctacgctcacagccagagtttggaccggctgatgaatcctctgatcgaccagtatctgtattatctgaacaggacacaatcaaatagtggaactcttcagcagtctaggctactgtttagccaagctgcacccaccagcatgtcccttcaagctaaaaactggctgcctggaccttgctacagacagcagcgtctgtcaaagcaggcaaacgacaacaacaacagcaactttccctggactgcggctacaaagtatcatctaaatggtcgggactcgttggttaatccaggaccagctatggccagccacaaagacgatgaagaaaagtttttccccatgcatggaaccctgatatttggtaaacaaggaacaaatgctaacgacacggatttggaacatgtcatgattacagatgaagaagaaatcaggaccaccaatcccgtggctacagagcagtacggaaacgtgtcaaataatttgcaaaactcaaatactggtccaactacagaaaatgtcaatcaccagggagcgttacctggtatggtgtggcaggatcgagacgtgtacctgcagggacccatttgggccaagattcctcacaccgacggacactttcacccttctccactgatgggaggttttggactcaaacacccgcctcctcaaatcatgatcaaaaacactcctgttccagccaatcctcctacaaacttcagcgcggcaaagtttgcttccttcatcacacagtattccacgggacaggtcagcgtggagatcgagtgggagctgcagaaggagaacagcaaacgctggaaccccgagatccagtacacttccaactacaacaaatctgttaatgtggactttactgtggacgctaatggtgtgtattcagagcctcgccccattggcaccagatacctgactcgtaatctgtaa

SEQ ID NO: 3716 - DNA, 2208 bp, synthetic construct
  misc_feature 1..2208: note = source = /note="Description of Artificial Sequence: Synthetic polynucleotide"
  source 1..2208: mol_type = other DNA
atggctgccgatggttatcttccagattggctcgaggacattctctctgaaggaataagacagtggtggaagctcaaacctggcccaccaccaccaaagcccgcagagcggcataaggacgacagcaggggtcttgtgcttcctgggtacaagtacctcggacccttcaacggactcgacaaaggagagccggtcaacgaggcagacgccgcggccctcgagcacgacaaggcctacgaccggcagctcgacagcggagacaacccgtacctcaagtacaaccacgccgacgcggagtttcaggagcgtcttaaagaagatacgtcttttgggggcaacctcggacgagcagtcttccaggcaaaaaagagggttcttgaacctctgggcctggttgaggaacctgttaagacggctccgggaaaaaagaggccggtagagcaatctcctgcggagccagactcctcctcgggaaccggaaaggcgggcaaccagcctgcaagaaagagattgaattttggtcagactggagacgcagactccgtacctgacccccagcctctcggacagccaccagcagccccctctggtctgggatctactacaatggctacaggcagtggcgcaccaatggcagacaataacgagggtgccgatggagtgggtaattcctcaggaaattggcattgcgattcccaatggttgggcgacagagtcatcaccaccagcacccgaacctgggccctgcccacctacaacaatcacctctacaagcaaatctccagccaatcaggagcagcgaacgacaaccactactttggctacagcaccccctgggggtattttgacttcaacagattccactgccacttttcaccacgtgactggcaaagactcatcaacaacaactggggattccgacccaaaagactcaacttcaagctctttaacattcaagtcaaagaggtcacgcagaatgacggtacgacgacgattgccaataaccttaccagcacggttcaggtgtttactgactcggagtaccagctcccgtacgtcctcggctcggcgcatcaaggatgcctcccgccgtttccagcggacgtcttcatggtcccacagtatggatacctcaccctgaacaacgggagtcaggcggtaggacgctcttccttttactgcctggagtactttccttctcagatgcttcgtaccggaaacaactttaccttcagttacacctttgaagacgttcctttccacagcagctacgctcacagtcaaagtctggaccggctgatgaatcctctgatagaccagtacctgtattatctaaacaaaacacaatcaaatagtggaactcttcagcagtctcggctactgtttagtcaagctggacccaccagcatgtctcttcaagctaaaaactggctgcctggaccttgctacagacaacagcgtctgtcaaagcaggcaaacgacaacaacaacagcaactttccctggactgcggctacaaagtatcatctaaatggccgggactcgttggttaatccaggaccagctatggccagccacaaagacgatgaagaaaagtttttccccatgcatggaaccctgatatttggtaaacaaggaacaaatgctaacgacgcggatttggacaatgtcatgattacagatgaagaagaaatccgcaccaccaatcccgtggctacggagcagtacgggactgtgtcaaataatttgcaaaactcaaatactggtccaactactggaactgtcaatcaccaaggagcgttacctggtatggtgtggcaggatcgagacgtgtaccttcagggacccatttgggccaagattcctcacaccgatggacactttcatccttctccactgatgggaggttttggactcaaacacccgcctcctcagatcatgatcaaaaacactcccgttccagccaatcctcctacaaacttcagttctgccaagtttgcttctttcgtcacacagtattccacggggcaggtcagcgtggagatagagtgggagctgcagaaggagaacagcaaacgctggaaccccgagatccagtatacttccaactacaacaagtctgttaatgtggactttactgtggacactaatggtgtgtattcagagcctcgccccattggcaccagatacctgactcgtaatctgtaa

SEQ ID NO: 3717 - DNA, 2208 bp, synthetic construct
  misc_feature 1..2208: note = source = /note="Description of Artificial Sequence: Synthetic polynucleotide"
  source 1..2208: mol_type = other DNA
atggctgccgatggttatcttccagattggctcgaggacactctctctgaaggaataagacagtggtggaagctcaaacctggcccaccaccaccaaggcccgcagagcggcatcaggacgacagcaggggtcttgtgcttcctgggtacaagtacctcggacccttcaacggactcgacaaaggagagccggtcaacgaggcagacgctgcggccctcgagcacgacaaggcctacgaccggcagctcgacagcggagacaacccgtacctcaagtacaaccacgccgacgcggagtttcaggagcgtcttaaagaagatacgtcttttgggggcaacctcggacgagcagtcttccaggcgaaaaagagggttcttgaacctctgggcctggttgaggaacctgttaagacggctccgggaaaaaagaggccggtagagcactctcctgcggagccagactcctcctcgggaaccggaaaagcgggccagcagcctgcaagaaagagattgaatttcggtcagactggagacgcagactccgtacctgacccccagcctctcggacagccaccagcagcccccacaagtttgggatctactacaatggctacaggcagtggcgcaccaatggcagacaataacgagggtgccgatggagtgggtaattcctcaggaaattggcattgcgattcccaatggctgggcgacagagtcatcaccaccagcacccgaacctgggccctgcccacctacaacaaccacctctacaagcaaatctccagccaatcaggagcatcgaacgacaaccactactttggctacagcaccccttgggggtattttgacttcaacagattccactgtcacttctccccacgtgactggcaaagactcatcaacaacaactggggattccgacccaagagactcaacttcaagctctttaacattcaagtcaaagaggtcacgcagaatgacggtacgacgacgattgccaataaccttaccagcacggttcaggtgtttactgactcggagtaccagctcccgtacgccctcggctcggcgcatcaaggatgcctcccgccgtttccagcggacgtcttcatggtcccacagtatggatacctcaccctgaacaacgggagtcaggcggtaggacgctcttccttttactgcctggagtactttccttctcagatgctgcgtaccggaaacaactttaccttcagctacacctttgaggacgtgcccttccatagcagctacgctcacagccagagtttggaccggctgatgaatcctctgatcgaccagtatctgtattatctgaacaggacacaatcaaatagtggaactcttcagcagtctaggctactgtttagccaagctggacccaccagcatgtcccttcaagctaaaaactggctgcctggaccttgctacagacagcagcgtctgtcaaagcaggcaaacgacaacaacaacagcaactttccctggactgcggctacaaagtatcatctaaatggtcgggactcgttggttaatccaggaccagctatggccagccacaaagacgatgaagaaaagtttttccccatgcatggaaccctgatatttggtaaacaaggaacaaatgctaacgacacggatttggaacatgtcatgattacagatgaagaagaaatcaggaccaccaatcccgtggctacagagcagtacggaaacgtgtcaaataatttgcaaaactcaaatactggtccaactacagaaaatgtcaatcaccagggagcgttacctggtatggtgtggcaggatcgagacgtgtacctgcagggacccatttgggccaagattcctcacaccgacggacactttcacccttctccactgatgggaggttttggactcaaacacccgcctcctcaaatcatgatcaaaaacactcctgttccagccaatcctcctacaaacttcagcgcggcaaagtttgcttccttcatcacacagtattccacgggacaggtcagcgtggagatcgagtgggagctgcagaaggagaacagcaaacgctggaaccccgagatccagtacacttccaactacaacaaatctgttaatgtggactttactgtggacgctaatggtgtgtattcagagcctcgccccattggcaccagatacctgactcgtaatctgtaa

SEQ ID NO: 3718 - DNA, 2208 bp, synthetic construct
  misc_feature 1..2208: note = source = /note="Description of Artificial Sequence: Synthetic polynucleotide"
  source 1..2208: mol_type = other DNA
atggctgccgatggttatcttccagattggctcgaggacattctctctgaaggaataagacagtggtggaagctcaaacctggcccaccaccaccaaagcccgcagagcggcataaggacgacagcaggggtcttgtgcttcctgggtacaagtacctcggacccttcaacggactcgacaaaggagagccggtcaacgaggcagacgccgcggccctcgagcacgacaaggcctacgaccggcagctcgacagcggagacaacccgtacctcaagtacaaccacgccgacgcggagtttcaggagcgtcttaaagaagatacgtcttttgggggcaacctcggacgagcagtcttccaggcaaaaaagagggttcttgaacctctgggcctggttgaggaacctgttaagacggctccgggaaaaaagaggccggtagagcaatctcctgcggagccagactcctcctcgggaaccggaaaggcgggcaaccagcctgcaagaaagagattgaattttggtcagactggagacgcagactccgtacctgacccccagcctctcggacagccaccagcagccccctctggtctgggatctactacaatggctacaggcagtggcgcaccaatggcagacaataacgagggtgccgatggggtgggtaattcctcaggaaattggcattgcgattcccaatggttgggcgacagagtcatcaccaccagcacccgaacctgggccctgcccacctacaacaatcacctctacaagcaaatctccagccaatcaggagcagcgaacgacaaccactactttggctacagcaccccctgggggtattttgacttcaacagattccactgccacttttcaccacgtgactggcaaagactcatcaacaacaactggggattccgacccaaaagactcaacttcaagctctttagcattcaagtcaaagaggtcacgcagaatgacggtacgacgacgattgccaataaccttaccagcacggttcaggtgtttactgactcggagtaccagctcccgtacgtcctcggctcggcgcatcaaggatgcctcccgccgtttccagcggacgtcttcatggtcccacagtatggatacctcaccctgaacaacgggagtcaggcggtaggacgctcttccttttactgcctggagtactttccttctcagatgcttcgtaccggaaacaactttaccttcagttacacctttgaagacgttcctttccacagcagctacgctcacagtcaaagtctggaccggctgatgaatcctctgatagaccagtacctgtattatctaaacaaaacacaatcaaatagtggaactcttcagcagtctcggctactgtttagtcaagctggacccaccagcatgtctcttcaagctaaaaactggctgcctggaccttgctacagacaacagcgtctgtcaaagcaggcaaacgacaacaacaacagcaactttccctggactgcggctacaaagtatcatctaaatggccgggactcgttggttaatccaggaccagctatggccagccacaaagacgatgaagaaaagtttttccccatgcatggaaccctgatatttggtaaacaaggaacaaatgctaacgacgcggatttggacaatgtcatgattacagatgaagaagaaatccgcaccaccaatcccgtggctacggagcagtacgggactgtgtcaaataatttgcaaaactcaaatactggtccaactactggaactgtcaatcaccaaggagcgttacctggtatggtgtggcaggatcgagacgtgtaccttcagggacccatttgggccaagattcctcacaccgatggacactttcatccttctccactgatgggaggttttggactcaaacacccgcctcctcagatcatgatcaaaaacactcccgttccagccaatcctcctacaaacttcagttctgccaagtttgcttctttcatcacacagtattccacggggcaggtcagcgtggagatagagtgggagctgcagaaggagaacagcaaacgctggaaccccgagatccagtatacttccaactacaacaagtctgttaatgtggactttactgtggacactaatggtgtgtattcagagcctcgccccattggcaccagatacctgactcgtaatctgtaa

SEQ ID NO: 3719 - DNA, 2208 bp, synthetic construct
  misc_feature 1..2208: note = source = /note="Description of Artificial Sequence: Synthetic polynucleotide"
  source 1..2208: mol_type = other DNA
atggctgccgatggttatcttccagattggctcgaggacactctctctgaaggaataagacagtggtggaagctcaaacctggcccaccaccaccaaggcccgcagagcggcatcaggacgacagcaggggtcttgtgcttcctgggtacaagtacctcggacccttcaacggactcgacaaaggagagccggtcaacgaggcagacgctgcggccctcgagcacgacaaggcctacgaccggcagctcgacagcggagacaacccgtacctcaagtacaaccacgccgacgcggagtttcaggagcgtcttaaagaagatacgtcttttgggggcaacctcggacgagcagtcttccaggcgaaaaagagggttcttgagcctctgggcctggttgaggaacctgttaagacggctccgggaaaaaagaggccggtagagcactctcctgcggagccagactcctcctcgggaaccggaaaagcgggccagcagcctgcaagaaagagattgaatttcggtcagactggagacgcagactccgtacctgacccccagcctctcggacagccaccagcagcccccacaagtttgggatctactacaatggctacaggcagtggcgcaccaatggcagacaataacgagggtgccgatggagtgggtaattcctcaggaaattggcattgcgattcccaatggctgggcgacagagtcatcaccaccagcacccgaacctgggccctgcccacctacaacaaccacctctacaagcaaatctccagccaatcaggagcatcgaacgacaaccactaccttggctacagcaccccttgggggtattttgacttcaacagattccactgtcacttctccccacgtgactggcaaagactcatcaacaacaactggggattccgacccaagagactcaacttcaagctctttaacattcaagtcaaagaggtcacgcagaatgacggtacgacgacgattgccaataaccttaccagcacggttcaggtgtttactgactcggagtaccagctcccgtacgtcctcggctcggcgcatcaaggatgcctcccgccgtttccagcggacgtcttcatggtcccacagtatggatacctcaccctgaacaacgggagtcaggcggtaggacgctcttccttttactgcctggagtactttccttctcagatgctgcgtaccggaaacaactttaccttcagctacacctttgaggacgtgcccttccacagcagctacgctcacagccagagtttggaccggctgatgaatcctctgatcgaccagtatctgtattatctgaacaggacacaatcaaatagtggaactcttcagcagtctaggctactgtttagccaagctgcacccaccagcatgtcccttcaagctaaaaactggctgcctggaccttgctacagacagcagcgtctgtcaaagcaggcaaacgacaacaacaacagcaactttccctggactgcggctacaaagtatcctctaaatggtcgggactcgttggttaatccaggaccagctatggccagccacaaagacgatgaagaaaagtttttccccatgcatggaaccctgatatttggtaaacaaggaacaaatgctaacgacacggatttggaacatgtcatgattacagatgaagaagaaatcaggaccaccaatcccgtggctacagagcagtacggaaacgtgtcaaataatttgcaaaactcaaatactggtccaactacagaaaatgtcaatcaccagggagcgttacctggtatggtgtggcaggatcgagacgtgtacctgcagggacccatttgggccaagattcctcacaccgacggacactttcacccttctccactgatgggaggttttggactcaaacacccgcctcctcaaatcatgatcaaaaacactcctgttccagccaatcctcctacaaacttcagcgcggcaaagtttgcttccttcatcacacagtattccacgggacaggtcagcgtggagatcgagtgggagctgcagaaggagaacagcaaacgctggaaccccgagatccagtacacttccaactacaacaaatctgttaatgtggactttactgtggacgctaatggtgtgtattcagagcctcgccccattggcaccagatacctgactcgtaatctgtaa

SEQ ID NO: 3720 - DNA, 2208 bp, synthetic construct
  misc_feature 1..2208: note = source = /note="Description of Artificial Sequence: Synthetic polynucleotide"
  source 1..2208: mol_type = other DNA
atggctgccgatggttatcttccagattggctcgaggacattctctctgaaggaataagacagtggtggaagctcaaacctggcccaccaccaccaaagcccgcagagcggcataaggacgacagcaggggtcttgtgcttcctgggtacaagtacctcggacccttcaacggactcgacaaaggagagccggtcaacgaggcagacgccgcggccctcgagcacgacaaggcctacgaccggcagctcgacagcggagacaacccgtacctcaagtacaaccacgccgacgcggagtttcaggagcgtcttaaagaagatacgtcttttgggggcaacctcggacgagcagtcttccaggcaaaaaagagggttcttgaacctctgggcctggttgaggaacctgttaagacggctccgggaaaaaagaggccggtagagcaatctcctgcggagccagactcctcctcgggaaccggaaaggcgggcaaccagcctgcaagaaagagattgaattttggtcagactggagacgcagactccgtacctgacccccagcctctcggacagccaccagcagccccctctggtctgggatctactacaatggctacaggcagtggcgcaccaatggcagacaataacgagggtgccgatggagtgggtaattcctcaggaaattggcattgcgattcccaatggttgggcgacagagtcatcaccaccagcacccgaacctgggccctgcccacctacaacaatcacctctacaagcaaatctccagccaatcaggagcagcgaacgacaaccactactttggctacagcaccccctgggggtattttgacttcaacagattccactgccacttttcaccacgtgactggcaaagactcatcaacaacaactggggattccgacccaaaagactcaacttcaagctctttaacattcaagtcaaagaggtcacgcagaatgacggtacgacgacgattgccaataaccttaccagcacggttcaggtgtttactgactcggagtaccagctcccgtacgtcctcggctcggcgcatcaaggatgcctcccgccgtttccagcggacgtcttcatggtcccacagtatggatacctcaccctgaacaacgggagtcaggcggtaggacgctcttccttttactgcctggagtactttccttctcagatgcttcgtaccggaaacaactttaccttcagttacgcctttgaagacgttcctttccacagcagctacgctcacagtcaaagtctggaccggctgatgaatcctctgatagaccagtacctgtattatctaaacaaaacacaatcaaatagtggaactcttcagcagtctcggctactgtttagtcaagctggacccaccagcatgtctcttcaagctaaaaactggctgcctggaccttgctacagacaacagcgtctgtcaaagcaggcaaacgacaacaacaacagcaactttccctggactgcggctacaaagtatcatctaaatggccgggactcgttggttaatccaggaccagctatggccagccacaaagacgatgaagaaaagtttttccccatgcatggaaccctgatatttggtaaacaaggaacaaatgctaacgacgcggatttggacaatgtcatgattacagatgaagaagaaatccgcaccaccaatcccgtggctacggagcagtacgggactgtgtcaaataatttgcaaaactcaaatactggtccaactactggaactgtcaatcaccaaggagcgttacctggtatggtgtggcaggatcgagacgtgtaccttcagggacccatttgggccaagattcctcacaccgatggacactttcatccttctccactgatgggaggttttggactcaaacacccgcctcctcagatcatgatcaaaaacactcccgttccagccaatcctcctacaaacttcagttctgccaagtttgctcctttcatcacacagtattccacggggcaggtcagcgtggagatagagtgggagctgcagaaggagaacagcaaacgctggaaccccgagatccagtatacttccaactacaacaagtctgttaatgtggactttactgtggacactaatggtgtgtattcagagcctcgccccattggcaccagatacctgactcgtaatctgtaa

SEQ ID NO: 3721 - DNA, 2208 bp, synthetic construct
  misc_feature 1..2208: note = source = /note="Description of Artificial Sequence: Synthetic polynucleotide"
  source 1..2208: mol_type = other DNA
atggctgccgatggttatcttccagattggctcgaggacactctctctgaaggaataagacagtggtggaagctcaaacctggcccaccaccaccaaggcccgcagagcggcatcaggacgacagcaggggtcttgtgcttcctgggtacaagtacctcggacccttcaacggactcgacaaaggagagccggtcaacgaggcagacgctgcggccctcgagcacgacaaggcctacgaccggcagctcgacagcggagacaacccgtacctcaagtacaaccacgccgacgcggagtttcaggagcgtcttaaagaagatacgtcttttgggggcaacctcggacgagcagtcttccaggcgaaaaagagggttcttgaacctctgggcctggttgaggaacctgttaagacggctccgggaaaaaagaggccggtagagcactctcctgcggagccagactcctcctcgggaaccggaaaagcgggccagcagcctgcaagaaagagattgaatttcggtcagactggagacgcagactccgtacctgacccccagcctctcggacagccaccagcagcccccacaagtttgggatctactacaatggctacaggcagtggcgcaccaatggcagacaataacgagggtgccgatggagtgggtaattcctcaggaaattggcattgcgattcccaatggctgggcgacagagtcatcaccaccagcacccgaacctgggccctgcccacctacaacaaccacctctacaagcaaatctccagccaatcaggagcatcgaacgacaaccactactttggctacagcaccccttgggggtattttgacttcaacagattccactgtcacttctccccacgtgactggcaaagactcatcaacaacaactggggattccgacccaagagactcaacttcaagctctttaacattcaagtcaaagaggtcacgcagaatgacggtacgacgacgattgccaataaccttaccagcacggttcaggtgtttactgactcggagtaccagctcccgtacgtcctcggctcggcgcatcaaggatgcctcccgccgtttccagcggacgtcttcatggtcccacagtatggatacctcaccctgaacaacgggagtcaggcggtaggacgctcttccttttactgcctggagtactttccttctcagatgctgcgtaccggaaacaactttaccttcagctacacctttgaggacgtgcccttccacagcagctacgctcacagccagagtttggaccggctgatgaatcctctgatcgaccagtatctgtattatctgaacaggacacaatcaaatagtggaactcttcagcagtctaggctactgtttagccaagctggacccaccagcatgtcccttcaagctaaaaactggctgcctggaccttgctacagacagcagcgtctgtcaaagcaggcaaacgacaacaacaacagcaactttccctggactgcggctacaaagtatcatctaaatggtcgggactcgttggttaatccaggaccagctatggccagccacaaagacgatgaagaaaagtttttccccatgcatggaaccctgatatttggtaaacaaggaacaaatgctaacgacgcggatttggaacatgtcatgattacagatgaagaagaaatcaggaccaccaatcccgtggctacagagcagtacggaaacgtgtcaaataatttgcaaaactcaaatactggtccaactacagaaaatgtcaatcaccagggagcgttacctggtatggtgtggcaggatcgagacgtgtacctgcagggacccatttgggccaagattcctcacaccgacggacactttcacccttctccactgatgggaggttttggactcaaacacccgcctcctcaaatcatgatcaaaaacactcctgttccagccaatcctcctacaaacttcagcgcggcaaagtttgcttccttcatcacacggtattccacgggacaggtcagcgtggagatcgagtgggagctgcagaaggagaacagcaaacgctggaaccccgagatccagtacacttccaactacaacaaatctgttaatgtggactttactgtggacgctaatggtgtgtattcagagcctcgccccattggcaccagatacctgactcgtaatctgtaa

SEQ ID NO: 3722 - DNA, 2208 bp, synthetic construct
  misc_feature 1..2208: note = source = /note="Description of Artificial Sequence: Synthetic polynucleotide"
  source 1..2208: mol_type = other DNA
atggctgccgatggttatcttccagattggctcgaggacactctctctgaaggaataagacagtggtggaagctcaaacctggcccaccaccaccaaggcccgcagagcggcatcaggacgacagcaggggtcttgtgcttcctgggtacaagtacctcggacccttcaacggactcgacaaaggagagccggtcaacgaggcagacgctgcggccctcgagcacgacaaggcctacgaccggcagctcgacagcggagacaacccgtacctcaagtacaaccgcgccgacgcggagtttcaggagcgtcttaaagaagatacgtcttttgggggcaacctcggacgagcagtcttccaggcgaaaaagagggttcttgaacctctgggcctggttgaggaacctgttaagacggctccgggaaaaaagaggccggtagagcactctcctgcggagccagactcctcctcgggaaccggaaaagcgggccagcagcctgcaagaaagagattgaatttcggtcagactggagacgcagactccgtacctgacccccagcctctcggacagccaccagcagcccccacaagtttgggatctactacaatggctacaggcagtggcgcaccaatggcagacaataacgagggtgccgatggagtgggtaattcctcaggaaattggcattgcgattcccaatggctgggcgacagagtcatcaccaccagcacccgaacctgggccctgcccacctacaacaaccacctctacaagcaaatctccagccaatcaggagcatcgaacgacaaccactactttggctacagcaccccttgggggtattttgacttcaacagattccactgtcacttctccccacgtgactggcaaagactcatcaacaacaactggggattccgacccaagagactcaacttcaagctctttaacattcaagtcaaagaggtcacgcagaatgacggtacgacgacgattgccaataaccttaccagcacggttcaggtgtttactgactcggagtaccagctcccgtacgtcctcggctcggcgcatcaaggatgcctcccgccgtttccagcggacgtcttcatggtcccacagtatggatacctcaccctgaacaacgggagtcaggcggtaggacgctcttccttttactgcctggagtactttccttctcagatgctgcgtaccggaaacaactttaccttcagctacacctttgaggacgtgcccttccacagcagctacgctcacagccagagtttggaccggctgatgaatcctctgatcgaccagtatctgtattatctgaacaggacacaatcaaatagtggaactcttcagcagtctaggctactgtttagccaagctggacccaccagcatgtcccttcaagctaaaaactggctgcctggaccttgctacagacagcagcgtctgtcaaagcaggcaaacgacaacaacaacagcaactttccctggactgcggctacaaagtatcatctaaatggtcgggactcgttggttaatccaggaccagctatggccagccacaaagacgatgaagaaaagtttttccccatgcatggaaccctgatatttggtaaacaaggaacaaatgctaacgacacggatttggaacatgtcatgattacagatgaagaagaaatcaggaccaccaatcccgtggctacagagcagtacggaaacgtgtcaaataatttgcaaaactcaaatactggtccaactacagaaaatgtcaatcaccagggagcgttacctggtatggtgtggcaggatcgagacgtgtacctgcagggacccatttgggccaagattcctcacaccgacggacactttcacccttctccactgatgggaggttttggactcaaacacccgcctcctcaaatcatgatcaaaaacactcctgttccagccaatcctcctacaaacttcagcgcggcaaagtttgcttccttcatcacacagtattccacgggacaggtcagcgtggagatcgagtgggagctgcagaaggagaacagcaaacgctggaaccccgagatccagtacacttccaactacaacaaatctgttaatgtggactttactgtggacgctaatggtgtgtattcagagcctcgccccattggcaccagatacctgactcgtaatctgtaa

SEQ ID NO: 3723 - DNA, 2208 bp, synthetic construct
  misc_feature 1..2208: note = source = /note="Description of Artificial Sequence: Synthetic polynucleotide"
  source 1..2208: mol_type = other DNA
atggctgccgatggttatcttccagattggctcgaggacactctctctgaaggaataagacagtggtggaagctcaaacctggcccaccaccaccaaggcccgcagagcggcatcaggacgacagcaggggtcttgtgcttcctgggtacaagtacctcggacccttcaacggactcgacaaaggagagccggtcaacgaggcagacgctgcggccctcgagcacgacaaggcctacgaccggcagctcgacagcggagacaacccgtacctcaagtacaaccacgccgacgcggagtttcaggagcgtcttaaagaagatacgtcttttgggggcaacctcggacgagcagtcttccaggcgaaaaagagggttcttgaacctctgggcctggttgaggaacctgttaagacggctccgggaaaaaagaggccggtagagcactctcctgcggagccagactcctcctcgggaaccggaaaagcgggccagcagcctgcaagaaagagattgaatttcggtcagactggagacgcagactccgtacctgacccccagcctctcggacagccaccagcagcccccacaagtttgggatctactacaatggctacaggcagtggcgcaccaatggcagacaataacgagggtgccgatggagtgggtaattcctcaggaaattggcattgcgattcccaatggctgggcgacagagtcatcaccaccagcacccgaacctgggccctgcccacctacaacaaccacctctacaagcaaatctccagccaatcaggagcatcgaacgacaaccactactttggctacagcaccccttgggggtattttgacttcaacagattccactgtcacttctccccacgtgactggcaaagactcatcaacaacaactggggattccgacccaagagactcaacttcaagctctttaacattcaagtcaaagaggtcacgcagaatgacggtacgacgacgattgccaataaccttaccagcacggttcaggtgtttactgactcggagtaccagctcccgtacgtcctcggctcggcgcatcaaggatgcctcccgccgtttccagcggacgtcttcatggtcccacagtatggatacctcaccctgaacaacgggagtcaggcggtaggacgctcttccttttactgcctggagtactttccttctcagatgctgcgtaccggaaacaactttaccttcagctacacctttgaggacgtgcccttccacagcagctacgctcacagccagagtttggaccggctgatgaatcctctgatcgaccagtatctgtattatctgaacaggacacaatcaaatagtggaactcttcagcagtctaggctactgtttagccaagctggacccaccagcatgtcccttcaagctaaaaactggctgcctggaccttgctacagacagcagcgtctgtcaaagcaggcaaacgacaacaacaacagcaactttccctggactgcggctacaaagtatcatctaaatggtcgggactcgttggttaatccaggaccagctatggccagccacaaagacgatgaagaaaagtttttccccatgcatggaaccctgatatttggtaaacaaggaacaaatgctaacgacgcggatttggaacatgtcatgattacagatgaagaagaaatcaggaccaccaatcccgtggctacagagcagtacggaaacgtgtcaaataatttgcaaaactcaaatactggtccaactacagaaaatgtcaatcaccagggagcgttacctggtatggtgtggcaggatcgagacgtgtacctgcagggacccatttgggccaagattcctcacaccgacggacacyttcacccttctccactgatgggaggttttggactcaaacacccgcctcctcaaatcatgatcaaaaacactcctgttccagccaatcctcctacaaacttcagcgcggcaaagtttgcttccttcatcacacagtattccacgggacaggtcagcgtggagatcgagtgggagctgcagaaggagaacagcaaacgctggaaccccgagatccagtacacttccaactacaacaaatctgttaatgtggactttactgtggacgctaatggtgtgtattcagagcctcgccccattggcaccagatacctgactcgtaatctgtaa

SEQ ID NO: 3724 - DNA, 2208 bp, synthetic construct
  misc_feature 1..2208: note = source = /note="Description of Artificial Sequence: Synthetic polynucleotide"
  source 1..2208: mol_type = other DNA
atggctgccgatggttatcttccagattggctcgaggacactctctctgaaggaataagacagtggtggaagctcaaacctggcccaccaccaccaaggcccgcagagcggcatcaggacgacagcaggggtcttgtgcttcctgggtacaagtacctcggacccttcaacggactcgacaaaggagagccggtcaacgaggcagacgctgcggccctcgagcacgacaaggcctacgaccggcagctcgacagcggagacaacccgtacctcaagtacaaccacgccgacgcggagtttcaggagcgtcttaaagaagatacgtcttttgggggcaacctcggacgagcagtcttccaggcgaaaaagagggttcttgaacctctgggcctggttgaggaacctgttaagacggctccgggaaaaaagaggccggcagagcactctcctgcggagccagactcctcctcgggaaccggaaaagcgggccagcagcctgcaagaaagagattgaatttcggtcagactggagacgcagactccgtacctgacccccagcctctcggacagccaccagcagcccccacaagtttgggatctactacaatggctacaggcagtggcgcaccaatggcagacaataacgagggtgccgatggagtgggtaattcctcaggaaattggcattgcgattcccaatggctgggcgacagagtcatcaccaccagcacccgaacctgggccctgcccacctacaacaaccacctctacaagcaaatctccagccaatcaggagcatcgaacgacaaccactactttggctacagcaccccttgggggtattttgacttcaacagattccactgtcacttctccccacgtgactggcaaagactcatcaacaacaactggggattccgacccaagagactcaacttcaagctctttaacattcaagtcaaagaggtcacgcagaatgacggtacgacgacgattgccaataaccttaccagcacggttcaggtgtttactgactcggagtaccagctcccgtacgtcctcggctcggcgcatcaaggatgcctcccgccgtttccagcggacgtcttcatggtcccacagtatggatacctcaccctgaacaacgggagtcaggcggtaggacgctcttccttttactgcctggagtactttccttctcagatgctgcgtaccggaaacaactttaccttcagctacacctttgaggacgtgcccttccacagcagctacgctcacagccagagtttggaccggctgatgaatcctctgatcgaccagtatctgtattatctgaacaggacacaatcaaatagtggaactcttcagcagtctaggctactgtttagccaagctggacccaccagcatgtcccttcaagctaaaaactggctgcctggaccttgctacagacagcagcgtctgtcaaagcaggcaaacgacaacaacaacagcaactttccctggactgcggctacaaagtatcatctaaatggtcgggactcgttggttaatccaggaccagctatggccagccacaaagacgatgaagaaaagtttttccccatgcatggaaccctgatatttggtaaacaaggaacaaatgctaacgacgcggatttggaacatgtcatgattacagatgaagaagaaatcaggaccaccaatcccgtggctacagagcagtacggaaacgtgtcaaataatttgcaaaactcaaatactggtccaactacagaaaatgtcaatcaccagggagcgttacctggtatggtgtggcaggatcgagacgtgtacctgcagggacccatttgggccaagattcctcacaccgacggacactttcacccttctccactgatgggaggttttggactcaaacacccgcctcctcaaatcatgatcaaaaacactcctgttccagccaatcctcctacaaacttcagcgcggcaaagtttgcttccttcatcacacagtattccacgggacaggtcagcgtggagatcgagtgggagctgcagaaggagaacagcaaacgctggaaccccgagatccagtacacttccaactacaacaaatctgttaatgtggactttactgtggacgctaatggtgtgtattcagagcctcgccccattggcaccagatacctgactcgtaatctgtaa

SEQ ID NO: 3725 - DNA, 2208 bp, synthetic construct
  misc_feature 1..2208: note = source = /note="Description of Artificial Sequence: Synthetic polynucleotide"
  source 1..2208: mol_type = other DNA
atggctgccgatggttatcttccagattggctcgaggacactctctctgaaggaataagacagtggtggaagctcaaacctggcccaccaccaccaaggcccgcagagcggcatcaggacgacagcaggggtcttgtgcttcctgggtacaagtacctcggacccttcaacggactcgacaaaggagagccggtcaacgaggcagacgctgcggccctcgagcacgacaaggcctacgaccggcagctcgacagcggagacaacccgtacctcaagtacaaccacgccgacgcggagtttcaggagcgtcttaaagaagatacgtcttttgggggcaacctcggacgagcagtcttccaggcgaaaaagagggttcttgaacctctgggcctggttgaggaacctgttaagacggctccgggaaaaaagaggccggtagagcactctcctgcggagccagactcctcctcgggaaccggaaaagcgggccagcagcctgcaagaaagagattgaatttcggtcagactggagacgcagactccgtacctgacccccagcctctcggacagccaccagcagcccccacaagtttgggatctactacaatggctacaggcagtggcgcaccaatggcagacaataacgagggtgccgatggagtgggtaattcctcaggaaattggcattgcgattcccaatggctgggcgacagagtcatcaccaccagcacccgaacctgggccctgcccacctacaacaaccacctctacaagcaaatctccagccaatcaggagcatcgaacgacaaccactactttggctacagcaccccttgggggtattttgacttcaacagattccactgtcacttctccccacgtgactggcaaagactcatcaacaacaactggggattccgacccaagagactcaacttcaagctctttaacattcaagtcaaagaggtcacgcagaatgacggtacgacgacgattgccaataaccttaccagcacggttcaggtgtttactgactcggagtaccagctcccgtacgtcctcggctcggcgcatcaaggatgcctcccgccgtttccagcggacgtcttcatggtcccacagtatggatacctcaccctgaacaacgggagtcaggcggtaggacgctcttccttttactgcctggagtactttccttctcagatgctgcgtaccggaaacaactttaccttcagctacacctttgaggacgtgcccttccacagcagctacgctcacagccagagtttggaccggctgatgaatcctctgatcgaccagtatctgtattatctgaacaggacacaatcaaatagtggaactcttcagcagcctaggctactgtttagccaagctggacccaccagcatgtcccttcaagctaaaaactggctgcctggaccttgctacagacagcagcgtctgtcaaagcaggcaaacgacaacaacaacagcaactttccctggactgcggctacaaagtatcatctaaatggtcgggactcgttggttaatccaggaccagctatggccagccacaaagacgatgaagaaaagtttttccccatgcatggaaccctgatatttggtaaacaaggaacaaatgctaacgacgcggatttggaacatgtcatgattacagatgaagaagaaatcaggaccaccaatcccgtggctacagagcagtacggaaacgtgtcaaataatttgcaaaactcaaatactggtccgactacagaaaatgtcaatcaccagggagcgttacctggtatggtgtggcaggatcgagacgtgtacctgcagggacccatttgggccaagattcctcacaccgacggacactttcacccttctccactgatgggaggttttggactcaaacacccgcctcctcaaatcatgatcaaaaacactcctgttccagccaatcctcctacaaacttcagcgcggcaaagtttgcttccttcatcacacagtattccacgggacaggtcagcgtggagatcgagtgggagctgcagaaggagaacagcaaacgctggaaccccgagatccagtacacttccaactacaacaaatctgttaatgtggactttactgtggacgctaatggtgtgtattcagagcctcgccccattggcaccagatacctgactcgtaatctgtaa

SEQ ID NO: 3726 - DNA, 2208 bp, synthetic construct
  misc_feature 1..2208: note = source = /note="Description of Artificial Sequence: Synthetic polynucleotide"
  source 1..2208: mol_type = other DNA
atggctgccgatggttatcttccagattggctcgaggacactctctctgaaggaataagacagtggtggaagctcaaacctggcccaccaccaccaaggcccgcagagcggcatcaggacgacagcaggggtcttgtgcttcctgggtacaagtacctcggacccttcaacggactcgacaaaggagagccggtcaacgaggcagacgctgcggccctcgagcacgacaaggcctacgaccggcagctcgacagcggagacaacccgtacctcaagtacaaccacgccgacgcggagtttcaggagcgtcttaaagaagatacgtcttttgggggcaacctcggacgagcagtcttccaggcgaaaaagagggttcttgaacctctgggcctggttgaggaacctgttaagacggctccgggaaaaaagaggccggtagagcactctcctgcggagccagactcctcctcgggaaccggaaaagcgggccagcagcctgcaagaaagagattgaatttcggtcagactggagacgcagactccgtacctgacccccagcctctcggacagccaccagcagcccccacaagtttgggatctactacaatggctacaggcagtggcgcaccaatggcagacaataacgagggtgccgatggagtgggtaattcctcaggaaattggcattgcgattcccaatggctgggcgacagagtcatcaccaccagcacccgaacctgggccctgcccacctacaacaaccacctctacaagcaaatctccagccaatcaggagcatcgaacgacaaccactactttggctacagcaccccttgggggtattttgacttcaacagattccactgtcacttctccccacgtgactggcaaagactcatcaacaacaactggggattccgacccaagagactcaacttcaagctctttaacattcaagtcaaagaggtcacgcagaatgacggtacgacgacgattgccaataaccttaccagcacggttcaggtgtttactgactcggagtaccagctcccgtacgtcctcggctcggcgcatcaaggatgcctcccgccgtttccagcggacgtcttcatggtcccacagtatggatacctcaccctgaacaacgggagtcaggcggtaggacgctcttccttttactgcctggagtactttccttctcagatgctgcgtaccggaaacaactttaccttcagctacacctttgaggacgtgcccttccacagcagctacgctcacagccagagtttggaccggctgatgaatcctctgatcgaccagtatctgtattatctgaacaggacacaatcaaatagtggaactcttcagcagtctaggctactgtttagccaagctggacccaccagcatgtcccttcaagctaaaaactggctgcctggaccttgctacagacagcagcgtctgtcaaagcaggcaaacgacaacaacaacagcaactttccctggactgcggctacaaagtatcatctaaatggtcgggactcgttggttaatccaggaccagctatggccagccacaaagacgatgaagaaaagtttttccccatgcatggaaccctgatatttggtaaacaaggaacaaatgctaacgacrcggatttggaacatgtcatgattacagatgaagaagaaatcaggaccaccaatcccgtggctacagagcagtacggaaacgtgtcaaataatttgcaaaactcaaatactggtccaactacagaaaatgtcaatcaccagggagcgttacctggtatggtgtggcaggatcgagacgtgtacctgcagggacccatttgggccaagattcctcacaccgacggacactttcacccttctccactgatgggaggttttggactcaaacacccgcctcctcaaatcatgatcaaaaacactcctgttccagccaatcctcctacaaacttcagcgcggcaaagtttgcttccttcatcacacagtattccacgggacaggtcagcgtggagatcgagtgggagctgcagaaggagaacagcaaacgctggaaccccgagacccagtacacttccaactacaacaaatctgttaatgtggactttactgtggacgctaatggtgtgtattcagagcctcgccccattggcaccagatacctgactcgtaatctgtaa

SEQ ID NO: 3727 - DNA, 2208 bp, synthetic construct
  misc_feature 1..2208: note = source = /note="Description of Artificial Sequence: Synthetic polynucleotide"
  source 1..2208: mol_type = other DNA
atggctgccgatggttatcttccagattggctcgaggacactctctctgaaggaataagacagtggtggaagctcaaacctggcccaccactaccaaggcccgcagagcggcatcaggacgacagcaggggtcttgtgcttcctgggtacaagtacctcggacccttcaacggactcgacaaaggagagccggtcaacgaggcagacgctgcggccctcgagcacgacaaggcctacgaccggcagctcgacagcggagacaacccgtacctcaagtacaaccacgccgacgcggagtttcaggagcgtcttaaagaagatacgtcttttgggggcaacctcggacgagcagtcttccaggcgaaaaagagggttcttgaacctctgggcctggttgaggaacctgttaagacggctccgggaaaaaagaggccggtagagcactctcctgcggagccagactcctcctcgggaaccggaaaagcgggccagcagcctgcaagaaagagattgaatttcggtcagactggagacgcagactccgtacctgacccccagcctctcggacagccaccagcagcccccacaagtttgggatctactacaatggctacaggcagtggcgcaccaatggcagacaataacgagggtgccgatggagtgggtaattcctcaggaaattggcattgcgattcccaatggctgggcgacagagtcatcaccaccagcacccgaacctgggccctgcccacctacaacaaccacctctacaagcaaatctccagccaatcaggagcatcgaacgacaaccactactttggctacagcaccccttgggggtattttgacttcaacagattccactgtcacttctccccacgtgactggcaaagactcatcaacaacaactggggattccgacccaagagactcaacttcaagctctttaacattcaagtcaaagaggtcacgcagaatgacggtacgacgacgattgccaataaccttaccagcacggttcaggtgtttactgactcggagtaccggctcccgtacgtcctcggctcggcgcatcaaggatgcctcccgccgtttccagcggacgtcttcatggtcccacagtatggatacctcaccctgaacaacgggagtcaggcggtaggacgctcttccttttactgcctggagtactttccttctcagatgctgcgtaccggaaacaactttaccttcagctacacctttgaggacgtgcccttccacagcagctacgctcacagccagagtttggaccggctgatgaatcctctgatcgaccagtatctgtattatctgaacaggacacaatcaaatagtggaactcttcagcagtctaggctactgtttagccaagctggacccaccagcatgtcccttcaagctaaaaactggctgcctggaccttgctacagacagcagcgtctgtcaaagcaggcaaacgacaacaacaacagcaactttccctggactgcggctacaaagtatcatctaaatggtcgggactcgttggttaatccgggaccagctatggccagccacaaagacgatgaagaaaagtttttccccatgcatggaaccctgatatttggtaaacaaggaacaaatgctaacgacgcggatttggaacatgtcatgattacagatgaagaagaaatcaggaccaccaatcccgtggctacagagcagtacggaaacgtgtcaaataatttgcaaaactcaaatactggtccaactacagaaaatgtcaatcaccagggagcgttacctggtatggtgtggcaggatcgagacgtgtacctgcagggacccatttgggccaagattcctcacaccgacggacactttcacccttctccactgatgggaggttttggactcaaacacccgcctcctcaaatcatgatcaaaaacactcctgttccagccaatcctcctacaaacttcagcgcggcaaagtttgcttccttcatcacacagtattccacgggacaggtcagcgtggagatcgagtgggagctgcagaaggagaacagcaaacgctggaaccccgagatccagtacacttccaactacaacaaatctgttaatgtggactttactgtggacgctaatggtgtgtattcagagcctcgccccattggcaccagatacctgactcgtaatctgtaa

SEQ ID NO: 3728 - DNA, 2208 bp, synthetic construct
  misc_feature 1..2208: note = source = /note="Description of Artificial Sequence: Synthetic polynucleotide"
  source 1..2208: mol_type = other DNA
atggctgccgatggttatcttccagattggctcgaggacactctctctgaaggaataagacagtggtggaagctcaaacctggcccaccaccaccaaggcccgcagagcggcatcaggacgacagcaggggtcttgtgcttcctgggtacaagtacctcggacccttcaacggactcgacaaaggagagccggtcaacgaggcagacgctgcggccctcgagcacgacaaggcctacgaccggcagctcgacagcggagacaacccgtacctcaagtacaaccacgccgacgcggagtttcaggagcgtcttaaagaagatacgtcttttgggggcaacctcggacgagcagtcttccaggcgaaaaagagggttcttgaacctctgggcctggttgaggaacctgttaagacggctccgggaaaaaagaggccggtagagcactctcctgcggagccagactcctcctcgggaaccggaaaagcgggccagcagcctgcaagaaagagattgaatttcggtcagactggagacgcagactccgtacctgacccccagcctctcggacagccaccagcagcccccacaagtttgggatctactacaatggctacaggcagtggcgcaccaatggcagacaataacgagggtgccgatggagtgggtaattcctcaggaaattggcattgcgattcccaatggctgggcgacagagtcatcaccaccagcacccgaacctgggccctgcccacctacaacaaccacctctacaagcaaatctccagccaatcaggagcatcgaacgacaaccactactttggctacagcaccccttgggggtattttgacttcaacagattccactgtcacttctccccacgtgactggcaaagactcatcaacaacaactggggattccgacccaagagactcaacttcaagctctttaacattcaagtcaaagaggtcacgcagaatgacggtacgacgacgattgccaataaccttaccagcacggttcaggtgtttactgactcggagtaccagctcccgtacgtcctcggctcggcgcatcaaggatgcctcccgccgtttccagcggacgtcttcatggtcccacagtatggatacctcaccctgaacaacgggagtcaggcggtaggacgctcttccttttactgcctggagtactttccttctcagatgctgcgtaccggaaacaactttaccttcagctacacctttgaggacgtgcccttccacagcagctacgctcacagccagagtttggaccggctgatgaatcctctgaccgaccagtatctgtattatctgaacaggacacaatcaaatagtggaactcttcagcagtctaggctactgtttagccaagctggacccaccagcatgtcccttcaagctaaaaactggctgcctggaccttgctacagacagcagcgtctgtcaaagcaggcaaacgacaacaacaacagcaactttccctggactgcggctacaaagtatcatctaaatggtcgggactcgttggttaatccaggaccagctatggccagccacaaagacgatgaagaaaagtttttccccatgcatggaaccctgatatttggtaaacaaggaacaaatgctaacgacacggatttggaacatgtcatgattacagatgaagaagaaatcaggaccaccaatcccgtggctacagagcagtacggaaacgtgtcaaataatttgcaaaactcaaatactggtccaactacagaaaatgtcaatcaccagggagcgttacctggtatggtgtggcaggatcgagacgtgtacctgcagggacccatttgggccaagattcctcacaccgacggacactttcacccttctccactgatgggaggttttggactcaaacacccgcctcctcaaatcatgatcaaaaacactcctgttccagccaatcctcctacaaacttcagcgcggcaaagtttgcttccttcatcacacagtattccacgggacaggtcagcgtggagatcgagtgggagctgcagaaggagaacagcaaacgctggaaccccgagatccagtacacttccaactacaacaaatctgttaatgtggactttactgtggacgctaatggtgtgtattcagagcctcgccccattggcaccagatacctgactcgtaatctgtaa

SEQ ID NO: 3729 - DNA, 2208 bp, synthetic construct
  misc_feature 1..2208: note = source = /note="Description of Artificial Sequence: Synthetic polynucleotide"
  source 1..2208: mol_type = other DNA
atggctgccgatggttatcttccagattggctcgaggacactctctctgaaggaataagacagtggtggaagctcaaacctggcccaccaccaccaaggcccgcagagcggcatcaggacgacagcaggggtcttgtgcttcctgggtacaagtacctcggacccttcaacggactcgacaaaggagagccggtcaacgaggcagacgctgcggccctcgagcacgacaaggcctacgaccggcagctcgacagcggagacaacccgtacctcaagtacaaccacgccgacgcggagtttcaggagcgtcttaaagaagatacgtcttttgggggcaacctcggacgagcagtcttccaggcgaaaaagagggttcttgaacctctgggcctggttgaggaacctgttaagacggctccgggaaaaaagaggccggtagagcactctcctgcggagccagactcctcctcgggaaccggaaaagcgggccagcagcctgcaagaaagagattgaatttcggtcagactggagacgcagactccgtacctgacccccagcctctcggacagccaccagcagcccccacaagtttgggatctactacaatggctacaggcagtggcgcaccaatggcagacaataacgagggtgccgatggagtgggtaattcctcaggaaattggcattgcgattcccaatggctgggcgacagagtcatcaccaccagcacccgaacctgggccctgcccacctacaacaaccacctctacaggcaaatctccagccaatcaggagcatcgaacgacaaccactactttggctacagcaccccttgggggtattttgacttcaacagattccactgtcacttctccccacgtgactggcaaagactcatcaacaacaactggggattccgacccaagagactcaacttcaagctctttaacattcaagtcaaagaggtcacgcagaatgacggtacgacgacgattgccaataaccttaccagcacggttcaggtgtttactgactcggagtaccagctcccgtacgtcctcggctcggcgcatcaaggatgcctcccgccgtttccagcggacgtcttcatggtcccacagtatggatacctcaccctgaacaacgggagtcaggcggtaggacgctcttccttttactgcctgaagtactttccttctcagatgctgcgtaccggaaacaactttaccttcagctacacctttgaggacgtgcccttccacagcagctacgctcacagccagagtttggaccggctgatgaatcctctgatcgaccagtatctgtattatctgaacaggacacaatcaaatagtggaactcttcagcagtctaggctactgtttagccaagctggacccaccagcatgtcccttcaagctaaaaactggctgcctggaccttgctacagacagcagcgtctgtcaaagcaggcaaacgacaacaacaacagcaactttccctggactgcggctacaaagtatcatctaaatggtcgggactcgttggttaatccaggaccagctatggccagccacaaagacgatgaagaaaagtttttccccctgcatggaaccctgatatttggtaaacaaggaacaaatgctaacgacacggatttggaacatgtcatgattacagatgaagaagaaatcaggaccaccaatcccgtggctacagagcagtacggaaacgtgtcaaataatttgcaaaactcaaatactggtccaactacagaaaatgtcaatcaccagggagcgttacctggtatggtgtggcaggatcgagacgtgtacctgcagggacccatttgggccaagattcctcacaccgacggacactttcacccttctccactgatgggaggttttggactcaaacacccgcctcctcaaatcatgatcaaaaacactcctgttccagccaatcctcctacaaacttcagcgcggcaaagtttgcttccttcatcacacagtattccacgggacaggtcagcgtggagatcgagtgggagctgcagaaggagaacagcaaacgctggaaccccgagatccagtacacttccaactacaacaaatctgttaatgtggactttactgtggacgctaatggtgtgtattcagagcctcgccccattggcaccagatacctgactcgtaatctgtaa

SEQ ID NO: 3730 - DNA, 2208 bp, synthetic construct
  misc_feature 1..2208: note = source = /note="Description of Artificial Sequence: Synthetic polynucleotide"
  source 1..2208: mol_type = other DNA
atggctgccgatggttatcttccagattggctcgaggacactctctctgaaggaataagacagtggtggaagctcaaacctggcccaccaccaccaaggcccgcagagcggcatcaggacgacagcaggggtcttgtgcttcctgggtacaagtacctcggacccttcaacggactcgacaaaggagagccggtcaacgaggcagacgctgcggccctcgagcacgacaaggcctacgaccggcagctcgacagcggagacaacccgtacctcaagtacaaccacgccgacgcggagtttcaggagcgtcttaaagaagatacgtcttttgggggcaacctcggacgagcagtcttccaggcgaaaaagagggttcttgaacctctgggcctggttgaggaacctgttaagacggctccgggaaaaaagaggccggtagagcactctcctgcggagccagactcctcctcgggaaccggaaaagcgggccagcagcctgcaagaaagagattgaatttcggtcagactggagacgcagactccgtacctgacccccagcctctcggacagccaccagcagcccccacaagtttgggatctactacaatggctacaggcagtggcgcaccaatggcagacaataacgagggtgccgatggagtgggtaattcctcaggaaattggcattgcgattcccaatggctgggcgacagagtcatcaccaccagcacccgaacctgggccctgcccacctacaacaaccacctctacaggcaaatctccagccaatcaggagcatcgaacgacaaccactactttggctacagcaccccttgggggtattttgacttcaacagattccactgtcacttctccccacgtgactggcaaagactcatcaacaacaactggggattccgacccaagagactcaacttcaagctctttaacattcaagtcaaagaggtcacgcagaatgacggtacgacgacgattgccaataaccttaccagcacggttcaggtgtttactgactcggagtaccagctcccgtacgtcctcggctcggcgcatcaaggatgcctcccgccgtttccagcggacgtcttcatggtcccacagtatggatacctcaccctgaacaacgggagtcaggcggtaggacgctcttccttttactgcctggagtactttccttctcagatgctgcgtaccggaaacaactttaccttcagctacacctttgaggacgtgcccttccacagcagctacgctcacagccagagtttggaccggctgatgaatcctctgatcgaccagtatctgtattatctgaacaggacacaatcaaatagtggaactcttcagcagtctaggctactgtttagccaagctggacccaccagcatgtcccttcaagctaaaaactggctgcctggaccttgctacagacagcagcgtctgtcaaagcaggcaaacgacaacaacaacagcaactttccctggactgcggctacaaagtatcatctaaatggtcgggactcgttggttaatccaggaccagctatggccagccacaaagacgatgaagaaaagtttttccccatgcatggaaccctgatatttggtaaacaaggaacaaatgctaacgacacggatttggaacatgtcatgattacagatgaagaagaaatcaggaccaccaatcccgtggctacagagcagtacggaaacgtgtcaaataatttgcaaaactcaaatactggtccaactacagaaaatgtcaatcaccagggagcgttacctggtatggtgtggcaggatcgagacgtgtacctgcagggacccatttgggccaagattcctcacaccgacggacactttcacccttctccactgatgggaggttttggactcaaacacccgcctcctcaaatcatgatcaaaaacactcctgttccagccaatcctcctacaaacttcagcgcggcaaagtttgcttccttcatcacacagtattccacgggacaggtcagcgtggagatcgagtgggtgctgcagaaggagaacagcaaacgctggaaccccgagatccagtacacttccaactacaacaaatctgttaatgtggactttactgtggacgctaatggtgtgtattcagagcctcgccccattggcaccagatacctgactcgtaatctgtaa

SEQ ID NO: 3731 - DNA, 2208 bp, synthetic construct
  misc_feature 1..2208: note = source = /note="Description of Artificial Sequence: Synthetic polynucleotide"
  source 1..2208: mol_type = other DNA
atggctgccgatggttatcttccagattggctcgaggacactctctctgaaggaataagacagtggtggaagctcaaacctggcccaccaccaccaaggcccgcagagcggcatcaggacgacagcaggggtcttgtgcttcctgggtacaagtacctcggacccttcaacggactcgacaaaggagagccggtcaacgaggcagacgctgcggccctcgagcacgacaaggcctacgaccggcagctcgacagcggagacaacccgtacctcaagtacaaccacgccgacgcggagtttcaggagcgtcttaaagaagatacgtcttttgggggcaacctcggacgagcagtcttccaggcgaaaaagagggttcttgaacctctgggcctggttgaggaacctgttaagacggctccgggaaaaaagaggccggtagagcactctcctgcggagccagactcctcctcgggaaccggaaaagcgggccagcagcctgcaagaaagagattgaatttcggtcagactggagacgcagactccgtacctgacccccagcctctcggacagccaccagcagcccccacaagtttgggatctactacaatggctacaggcagtggcgcaccaatggcagacaataacgagggtgccgatggagtgggtaattcctcaggaaattggcattgcgattcccaatggctgggcgacagagtcatcaccaccagcacccgaacctgggccctgcccacctacaacaaccacctctacaagcaaatctccagccaatcaggagcatcgaacgacaaccactactttggctacagcaccccttgggggtattttgacttcaacagattccactgtcacttctccccacgtgactggcaaagactcatcaacaacaactggggattccgacccaagagactcaacttcaagctctttaacattcaagtcaaagaggtcacgcagaatgacggtacgacgacgattgccaataaccttatcagcacggttcaggtgtttactgactcggagtaccagctcccgtacgtcctcggctcggcgcatcaaggatgcctcccgccgtttccagcggacgtcttcatggtcccacagtatggatacctcaccctgaacaacgggagtcaggcggtaggacgctcttccttttactgcctggagtactttccttctcagatgctgcgtaccggaaacaactttaccttcagctacacctttgaggacgtgcccttccacagcagctacgctcacagccagagtttggaccggctgatgaatcctctgatcgaccagtatctgtattatctgaacaggacacaatcaaatagtggaactcttcagcagtctaggctactgtttagccaagctggacccaccagcatgtcccttcaagctaaaaactggctgcctggaccttgctacagacagcagcgtctgtcaaagcaggcaaacgacaacaacaacagcaactttccctggactgcggctacaaagtatcatctaaatggtcgggactcgttggttaatccaggaccagctatggccagccacaaagacgatgaagaaaagtttttccccatgcatggaaccctgatatttggtaaacaaggaacaaatgctaacgacgcggatttggaacatgtcatgattacagatgaagaagaaatcaggaccaccaatcccgtggctacagagcagtacggaaacgtgtcaaataatttgcaaaactcaaatactggtccaactacagaaaatgtcaatcaccagggagcgttacctggtatggtgtggcaggatcgagacgtgtacctgcagggacccatttgggccaagattcctcacaccgacggacactttcacccttctccactgatgggaggttttggactcaaacacccgcctcctcaaatcatgatcaaaaacactcctgttccagccaatcctcctacaaacttcagcgcggcaaagtttgcttccttcatcacacagtattccacgggacaggtcagcgtggagatcgagtgggagctgcagaaggagaacagcaaacgctggaaccccgagatccagtacacttccaactacaacaaatctgttaatgtggactttactgtggacgctaatggtgtgtattcagagcctcgccccattggcaccagatacctgactcgtaatctgtaa

SEQ ID NO: 3732 - DNA, 2205 bp, synthetic construct
  misc_feature 1..2205: note = source = /note="Description of Artificial Sequence: Synthetic polynucleotide"
  source 1..2205: mol_type = other DNA
atggctgccgatggttatcttccagattggctcgaggacattctctctgaaggaataagacagtggtggaagctcaaacctggcccaccaccaccaaagcccgcagagcggcataaggacgacagcaggggtcttgtgcttcctgggtacaagtacctcggacccttcaacggactcgacaaaggagagccggtcaacgaggcagacgccgcggccctcgagcacgacaaggcctacgaccggcagctcgacagcggagacaacccgtacctcaagtacaaccacgccgacgcggagtttcaggagcgtcttaaagaagatacgtcttttgggggcaacctcggacgagcagtcttccaggcaaaaaagagggttcttgaacctctgggcctggttgaggaacctgttaagacggctccgggaaaaaagaggccggtagagcaatctcctgcggagccagactcctcctcgggaaccggaaaggcgggcaaccagcctgcaagaaagagattgaattttggtcagactggagacgcagactccgtacctgacccccagcctctcggacagccaccagcagccccctctggtctgggatctactacaatggctacaggcagtggcgcaccaatggcagacaataacgagggtgccgatggagtgggtaattcctcaggaaattggcattgcgattcccaatggttgggcgacagagtcatcaccaccagcacccgaacctgggccctgcccacctacaacaatcacctctacaagcaaatctccagccaatcaggagcagcgaacgacaaccactactttggctacagcaccccctgggggtattttgacttcaacagattccactgccacttttcaccacgtgactggcaaagactcatcaacaacaactggggattccgacccaaaagactcaacttcaagctctttaacattcaagtcaaagaggtcacgcagaatgacggtacgacgacgattgccaataaccttaccagcacggttcaggtgtttactgactcggagtaccagctcccgtacgtcctcggctcggcgcatcaaggatgcctcccgccgtttccagcggacgtcttcatggtcccacagtatggatacctcaccctgaacaacgggagtcaggcggtaggacgctcttccttttactgcctggagtactttccttctcagatgcttcgtaccggaaacaactttaccttcagttacacctttgaagacgttcctttccacagcagctacgctcacagtcaaagtctggaccggctgatgaatcctctgatagaccagtacctgtattatctaaacaaaacacaatcaaatagtggaactcttcagcagtctcggctactgtttagtcaagctggacccaccagcatgtctcttcaagctaaaaactggctgcctggaccttgctacagacaacagcgtctgtcaaagcaggcaaacgacaacaacagcaactttccctggactgcggctacaaagtatcatctaaatggccgggactcgttggttaatccaggaccagctatggccagccacaaagacgatgaagaaaagtttttccccatgcatggaaccctgatatttggtaaacaaggaacaaatgctaacgacgcggatttggacaatgtcatgattacagatgaagaagaaatccgcaccaccaatcccgtggctacggagcagtacgggactgtgtcaaataatttgcaaaactcaaatactggtccaactactggaactgtcaatcaccaaggagcgttacctggtatggtgtggcaggatcgagacgtgtaccttcagggacccatttgggccaagattcctcacaccgatggacactttcatccttctccactgatgggaggttttggactcaaacacccgcctcctcagatcatgatcaaaaacactcccgttccagccaatcctcctacaaacttcagttctgccaagtttgcttctttcatcacacagtattccacggggcaggtcagcgtggagatagagtgggagctgcagaaggagaacagcaaacgctggaaccccgagatccagtatacttccaactacaacaagtctgttaatgtggactttactgtggacactaatggtgtgtattcagagcctcgccccattggcaccagatacctgactcgtaatctgtaa

SEQ ID NO: 3733 - DNA, 2208 bp, synthetic construct
  misc_feature 1..2208: note = source = /note="Description of Artificial Sequence: Synthetic polynucleotide"
  source 1..2208: mol_type = other DNA
atggctgccgatggttatcttccagattggctcgaggacattctctctgaaggaataagacagtggtggaagctcaaacctggcccaccaccaccaaagcccgcagagcggcataaggacgacagcaggggtcttgtgcttcctgggtacaagtacctcggacccttcaacggactcgacaaaggagagccggtcaacgaggcagacgccgcggccctcgagcacgacaaggcctacgaccggcagctcgacagcggagacaacccgtacctcaagtacaaccacgccgacgcggagtttcaggagcgtcttaaagaagatacgtcttttgggggcaacctcggacgagcagtcttccaggcaaaaaagagggttcttgaacctctgggcctggttgaggaacctgttaagacggctccgggaaaaaagaggccggtagagcaatctcctgcggagccagactcctcctcgggaaccggaaaggcgggcaaccagcctgcaagaaagagattgaattttggtcagactggagacgcagactccgtacctgacccccagcctctcggacagccaccagcagccccctctggtctgggatctactacaatggctacaggcagtggcgcaccaatggcagacaataacgagggtgccgatggagtgggtaattcctcaggaaattggcattgcgattcccaatggttgggcgacagagtcatcaccaccagcacccgaacctgggccctgcccacctacaacaatcacctctacaagcaaatctccagccaatcaggagcagcgaacgacagccactactttggctacagcaccccctgggggtattttgacttcaacagattccactgccacttttcaccacgtgactggcaaagactcatcaacaacaactggggattccgacccaaaagactcaacttcaagctctttaacattcaagtcaaagaggtcacgcagaatgacggtacgacgacgattgccaataaccttaccagcacggttcaggtgtttactgactcggagtaccagctcccgtacgtcctcggctcggcgcatcaaggatgcctcccgccgtttccagcggacgtcttcatggtcccacagtatggatacctcaccctgaacaacgggagtcaggcggtaggacgctcttccttttactgcctggagtactttccttctcagatgcttcgtaccggaaacaactttaccttcagttacacctttgaagacgttcctttccacagcagctacgctcacagtcaaagtctggaccggctgatgaatcctctgatagaccagtacctgtattatctaaacaaaacacaatcaaatagtggaactcttcagcagtctcggctactgtttagtcaagctggacccaccagcatgtctcttcaagctaaaaactggctgcctggaccttgctacagacaacagcgtctgtcaaagcaggcaaacgacaacaacaacagcaactttccctggactgcggctacaaagtatcatctaaatggccgggactcgttggttaatccaggaccagctatggccagccacaaagacgatgaagaaaagtttttccccatgcatggaaccctgatatttggtaaacaaggaacaaatgctaacgacgcggatttggacaatgtcatgattacagatgaagaagaaatccgcaccaccaatcccgtggctacggagcagtacgggactgtgtcaaataatttgcaaaactcaaatactggtccaactactggaactgtcaatcaccaaggagcgttacctggtatggtgtggcaggatcgagacgtgtaccttcagggacccatttgggccaagattcctcacaccgatggacactttcatccttctccactgatgggaggttttggactcaaacacccgcctcctcagatcatgatcaaaaacactcccgttccagccaatcctcctacaaacttcagttctgccaagtttgcttctttcatcacacagtattccacggggcaggtcagcgtggagatagagtgggagctgcagaaggagaacagcaaacgctggaaccccgagatccagtatacttccaactacaacaagtctgttaatgtggactttactgtggacactaatggtgtgtattcagagcctcgccccattggcaccagatacctgactcgtaatctgtaa

SEQ ID NO: 3734 - DNA, 2208 bp, synthetic construct
  misc_feature 1..2208: note = source = /note="Description of Artificial Sequence: Synthetic polynucleotide"
  source 1..2208: mol_type = other DNA
atggctgccgatggttatcttccagattggctcgaggacactctctctgaaggaataagacagtggtggaagctcaaacctggcccaccaccaccaaggcccgcagagcggcatcaggacgacagcaggggtcttgtgcttcctgggtacaagtacctcggacccttcaacggactcgacaaaggagagccggtcaacgaggcagacgctgcggccctcgagcacgacaaggcctacgaccggcagctcgacagcggagacaacccgtacctcaagtacaaccacgccgacgcggagtttcaggagcgtcttaaagaagatacgtcttttgggggcaacctcggacgagcagtcttccaggcgaaaaagagggttcttgaacctctgggcctggttgaggaacctgttaagacggctccgggaaaaaagaggccggtagagcactctcctgcggagccagactcctcctcgggaaccggaaaagcgggccagcagcctgcaagaaagagattgaatttcggtcagactggagacgcagactccgtacctgacccccagcctctcggacagccaccagcagcccccacaagtttgggatctactacaatggctacaggcagtggcgcaccaatggcagacaataacgagggtgccgatggagtgggtaattcctcaggaaattggcattgcgattcccaatggctgggcgacagagtcatcaccaccagcacccgaacctgggccctgcccacctacaacaaccacctctacaagcaaatctccagccaatcaggagcatcgaacgacaaccactactttggctacagcaccccttgggggtattttgacttcaacagattccactgtcacttctccccacgtgactggcaaagactcatcaacaacaactggggattccgacccaagagactcaacttcaagctctttaacattcaagtcaaagaggtcacgcagaatgacggtacgacgacgattgccaataaccttaccagcacggttcaggtgtttactgactcggagtaccagctcccgtacgtcctcggctcggcgcatcaaggatgcctcccgccgtttccagcggacgtcttcatggtcccacagtatggatacctcaccctgaacaacgggagtcaggcggtaggacgctcttccttttactgcctggagtactttccttctcagatgctgcgtaccggaaacaactttaccttcagctacacctttgaggacgtgcccttccacagcagctacgctcacagccagagtttggaccggctgatgaatcctctgatcgaccagtatctgtattatctgaacaggacacaatcaaatagtggaactcttcagcagtctaggctactgtttagccaagctggacccaccagcatgtcccttcaagctaaaaactggctgcctggaccttgctacagacagcagcgtctgtcaaagcaggcaaacgacaacaacaacagcaactttccctggactgcggctacaaagtatcatctaaatggtcgggactcgttggttaatccaggaccagctatggccagccacaaagacgatgaagaaaagtttttccccatgcatggaaccctgatatttggtaaacaaggaacaaatgctaacgacacggatttggaacatgtcatgattacagatgaagaagaaatcaggaccaccaatcccgtggctacagagcagtacggaaacgtgtcaaataatttgcaaaactcaaatactggtccaactacagaaaatgtcaatcaccagggagcgttacctggtatggtgtggcaggatcgagacgtgtacctgcagggacccatttgggccaagattcctcacaccgacggacactttcacccttctccactgatgggaggttttgggctcaaacacccgcctcctcaaatcatgatcaaaaacactcctgttccagccaatcctcctacaaacttcagcgcggcaaagtttgcttccttcatcacacagtattccacgggacaggtcagcgtggagatcgagtgggagctgcagaaggagaacagcaaacgctggaaccccgagatccagtacacttccaactacaacaaatctgttaatgtggactttactgtggacgctaatggtgtgtattcagagcctcgccccattggcaccagatacctgactcgtaatctgtaa

SEQ ID NO: 3735 - DNA, 2205 bp, synthetic construct
  misc_feature 1..2205: note = source = /note="Description of Artificial Sequence: Synthetic polynucleotide"
  source 1..2205: mol_type = other DNA
atggctgccgatggttatcttccagattggctcgaggacattctctctgaaggaataagacagtggtggaagctcaaacctggcccaccaccaaagcccgcagagcggcataaggacgacagcaggggtcttgtgcttcctgggtacaagtacctcggacccttcaacggactcgacaaaggagagccggtcaacgaggcagacgccgcggccctcgagcacgacaaggcctacgaccggcagctcgacagcggagacaacccgtacctcaagtacaaccacgccgacgcggagtttcaggagcgtcttaaagaagatacgtcttttgggggcaacctcggacgagcagtcttccaggcaaaaaagagggttcttgaacctctgggcctggttgaggaacctgttaagacggctccgggaaaaaagaggccggtagagcaatctcctgcggagccagactcctcctcgggaaccggaaaggcgggcaaccagcctgcaagaaagagattgaattttggtcagactggagacgcagactccgtacctgacccccagcctctcggacagccaccagcagccccctctggtctgggatctactacaatggctacaggcagtggcgcaccaatggcagacaataacgagggtgccgatggagtgggtaattcctcaggaaattggcattgcgattcccaatggttgggcgacagagtcatcaccaccagcacccgaacctgggccctgcccacctacaacaatcacctctacaagcaaatctccagccaatcaggagcagcgaacgacaaccactactttggctacagcaccccctgggggtattttgacttcaacagattccactgccacttttcaccacgtgactggcaaagactcatcaacaacaactggggattccgacccaaaagactcaacttcaagctctttaacattcaagtcaaagaggtcacgcagaatgacggtacgacgacgattgccaataaccttaccagcacggttcaggtgtttactgactcggagtaccagctcccgtacgtcctcggctcggcgcatcaaggatgcctcccgccgtttccagcggacgtcttcatggtcccacagtatggatacctcaccctgaacaacgggagtcaggcggtaggacgctcttccttttactgcctggagtactttccttctcagatgcttcgtaccggaaacaactttaccttcagttacacctttgaagacgttcctttccacagcagctacgctcacagtcaaagtctggaccggctgatgaatcctctgatagaccagtacctgtattatctaaacaaaacacaatcaaatagtggaactcttcagcagtctcggctactgtttagtcaagctggacccaccagcatgtctcttcaagctaaaaactggctgcctggaccttgctacagacaacagcgtctgtcaaagcaggcaaacgacaacaacaacagcaactttccctggactgcggctacaaagtatcatctaaatggccgggactcgttggttaatccaggaccagctatggccagccacaaagacgatgaagaaaagtttttccccatgcatggaaccctgatatttggtaaacaaggaacaaatgctaacgacgcggatttggacaatgtcatgattacagatgaagaagaaatccgcaccaccaatcccgtggctacggagcagtacgggactgtgtcaaataatttgcaaaactcaaatactggtccaactactggaactgtcaatcaccaaggagcgttacctggtatggtgtggcaggatcgagacgtgtaccttcagggacccatttgggccaagattcctcacaccgatggacactttcatccttctccactgatgggaggttttggactcaaacacccgcctcctcagatcatgatcaaaaacactcccgttccagccaatcctcctacaaacttcagttctgccaagtttgcttctttcatcacacagtattccacggggcaggtcagcgtggagatagagtgggagctgcagaaggagaacagcaaacgctggaaccccgagatccagtatacttccaactacaacaagtctgttaatgtggactttactgtggacactaatggtgtgtattcagagcctcgccccattggcaccagatacctgactcgtaatctgtaa

SEQ ID NO: 3736 - DNA, 2208 bp, synthetic construct
  misc_feature 1..2208: note = source = /note="Description of Artificial Sequence: Synthetic polynucleotide"
  source 1..2208: mol_type = other DNA
atggctgccgatggttatcttccagattggctcgaggacactctctctgaaggaataagacagtggtggaagctcaaacctggcccaccaccaccaaggcccgcagagcggcatcaggacgacagcaggggtcttgtgcttcctgggtacaagtacctcggacccttcaacggactcgacaaaggagagccggtcaacgaggcagacgctgcggccctcgagcacgacaaggcctacgaccggcagctcgacagcggagacaacccgtacctcaagtacaaccacgccgacgcggagtttcaggagcgtcttaaagaagatacgtcttttgggggcaacctcggacgagcagtcttccaggcgaaaaagagggttcttgaacctctgggcctggttgaggaacctgttaagacggctccgggaaaaaagaggccggtagagcactctcctgcggagccagactcctcctcgggaaccggaaaagcgggccagcagcctgcaagaaagagattgaatttcggtcagactggagacgcagactccgtacctgacccccagcctctcggacagccaccagcagcccccacaagtttgggatctactacaatggctacaggcagtggcgcaccaatggcagacaataacgagggtgccgatggagtgggtaattcctcaggaaattggcattgcgattcccaatggctgggcgacagagtcatcaccaccagcacccgaacctgggccctgcccacctacaacaaccacctctacaagcaaatctccagccaatcaggagcatcgaacgacaaccactactttggctacagcaccccttgggggtattttgacttcaacagattccactgtcacttctccccacgtgactggcaaagactcatcaacaacaactggggattccgacccaagagactcaacttcaagctctttaacattcaagtcaaagaggtcacgcagaatgacggtacgacgacgattgccaataaccttaccagcacggttcaggtgtttactgactcggagtaccagctcccgtacgtcctcggctcggcgcatcaaggatgcctcccgccgtttccagcggacgtcttcatggtcccacagtatggatacctcaccctgaacaacgggagtcaggcggtaggacgctcttccttttactgcctggagtactttccttctcagatgctgcgtaccggaaacaactttaccttcagctacacctttggggacgtgcccttccacagcagctacgctcacagccagagtttggaccggctgatgaatcctctgatcgaccagtatctgtattatctgaacaggacacaatcaaatagtggaactcttcagcagtctaggctactgtttagccaagctggacccaccagcatgtcccttcaagctaaaaactggctgcctggaccttgctacagacagcagcgtctgtcaaagcaggcaaacgacaacaacaacagcaactttccctggactgcggctacaaagtatcatctaaatggtcgggactcgttggttaatccaggaccagctatggccagccacaaagacgatgaagaaaagtttttccccatgcatggaaccctgatatttggtaaacaaggaacaaatgctaacgacgcggatttggaacatgtcatgattacagatgaagaagaaatcaggaccaccaatcccgtggctacagagcagtacggaaacgtgtcaaataatttgcaaaactcaaatactggtccaactacagaaaatgtcaatcaccagggagcgttacctggtatggtgtggcaggatcgagacgtgtacctgcagggacccatttgggccaagattcctcacaccgacggacactttcacccttctccactgatgggaggttttggactcaaacacccgcctcctcaaatcatgatcaaaaacactcctgttccagccaatcctcctacaaacttcagcgcggcaaagtttgcttccttcatcacacagtattccacgggacaggtcagcgtggagatcgagtgggagctgcagaaggagaacagcaaacgctggaaccccgagatccagtacacttccaactacaacaaatctgttaatgtggactttactgtggacgctaatggtgtgtattcagagcctcgccccattggcaccagatacctgactcgtaatctgtaa

SEQ ID NO: 3737 - DNA, 2208 bp, synthetic construct
  misc_feature 1..2208: note = source = /note="Description of Artificial Sequence: Synthetic polynucleotide"
  source 1..2208: mol_type = other DNA
atggctgccgatggttatcttccagattggctcgaggacactctctctgaaggaataagacagtggtggaagctcaaacctggcccaccaccaccaaggcccgcagagcggcatcaggacgacagcaggggtcttgtgcttcctgggtacaagtacctcggacccttcaacggactcgacaaaggagagccggtcaacgaggcagacgctgcggccctcgagcacgacaaggcctacgaccggcagctcgacagcggagacaacccgtacctcaagtacaaccacgccgacgcggagtttcaggagcgtcttaaagaagatacgtcttttgggggcaacctcggacgagcagtcttccaggcgaaaaagagggttcttgaacctctgggcctggttgaggaacctgttaagacggctccgggaaaaaagaggccggtagagcactctcctgcggagccagactcctcctcgggaaccggaaaagcgggccagcagcctgcaagaaagagattgaatttcggtcagactggagacgcagactccgtacctgacccccagcctctcggacagccaccagcagcccccacaagtttgggatctactacaatggctacaggcagtggcgcaccaatggcagacaataacgagggtgccgatggagtgggtaattcctcaggaaattggcattgcgattcccaatggctgggcgacagagtcatcaccaccagcacccgaacctgggccctgcccacctacaacaaccacctctacaagcaaatctccagccaatcaggagcatcgaacgacagccactactttggctacagcaccccttgggggtattttgacttcaacagattccactgtcacttctccccacgtgactggcaaagactcatcaacaacaactggggattccgacccaagagactcaacttcaagctctttaacattcaagtcaaagaggtcacgcagaatgacggtacgacgacgattgccaataaccttaccagcacggttcaggtgtttactgactcggagtaccagctcccgtacgtcctcggctcggcgcatcaaggatgcctcccgccgtttccagcggacgtcttcatggtcccacagtatggatacctcaccctgaacaacgggagtcaggcggtaggacgctcttccttttactgcctggagtactttccttctcagatgctgcgtaccggaaacaactttaccttcagctacacctttgaggacgtgcccttccacagcagctacgctcacagccagagtttggaccggctgatgaatcctctgatcgaccagtatctgtattatctgaacaggacacaatcaaatagtggaactcttcagcagtctaggctactgtttagccaagctggacccaccagcatgtcccttcaagctaaaaactggctgcctggaccttgctacagacagcagcgtctgtcaaagcaggcaaacgacaacaacaacagcaactttccctggactgcggctacaaagtatcatctaaatggtcgggactcgttggttaatccaggaccagctatggccagccacaaagacgatgaagaaaagtttttccccatgcatggaaccctgatatttggtaaacaaggaacaaatgctaacgacgcggatttggaacatgtcatgattacagatgaagaagaaatcaggaccaccaatcccgtggctacagagcagtacggaaacgtgtcaaataatttgcaaaactcaaatactggtccaactacagaaaatgtcaatcaccagggagcgttacctggtatggtgtggcaggatcgagacgtgtacctgcagggacccatttgggccaagattcctcacaccgacggacactttcacccttctccactgatgggaggttttggactcaaacacccgcctcctcaaatcatgatcaaaaacactcctgttccagccaatcctcctacaaacttcagcgcggcaaagtttgcttccttcatcacacagtattccacgggacaggtcagcgtggagatcgagtgggagctgcagaaggagaacagcaaacgctggaaccccgagatccagtacacttccaactacaacaaatctgttaatgtggactttactgtggacgctaatggtgtgtattcagagcctcgccccattggcaccagatacctgactcgtaatctgtaa

SEQ ID NO: 3738 - DNA, 2208 bp, synthetic construct
  misc_feature 1..2208: note = source = /note="Description of Artificial Sequence: Synthetic polynucleotide"
  source 1..2208: mol_type = other DNA
atggctgccgatggttatcttccagattggctcgaggacactctctctgaaggaataagacagtggtggaagctcaaacctggcccaccaccaccaaggcccgcagagcggcatcaggacgacagcaggggtcttgtgcttcctgggtacaagtacctcggacccttcaacggactcgacaaaggagagccggtcaacgaggcagacgctgcggccctcgagcacgacaaggcctacgaccggcagctcgacagcggagacaacccgtacctcaagtacaaccacgccgacgcggagtttcaggagcgtcttaaagaagatacgtcttttgggggcaacctcggacgagcagtcttccaggcgaaaaagagggttcttgaacctctgggcctggttgaggaacctgttaagacggctccgggaaaaaagaggccggtagagcactctcctgcggagccagactcctcctcgggaaccggaaaagcgggccagcagcctgcaagaaagagattgaatttcggtcagactggagacgcagactccgtacctgacccccagcctctcggacagccaccagcagcccccacaagtttgggatctactacaatggctacaggcagtggcgcaccaatggcagacaataacgagggtgccgatggagtgggtaattcctcaggaaattggcattgcgattcccaatggctgggcgacagagtcatcaccaccagcacccgaacctgggccctgcccacctacaacaaccacctctacaagcaaatctccagccaatcaggagcatcgaacgacaaccactactttggctacagcaccccttgggggtattttgacttcaacagattccactgtcacttctccccacgtgactggcaaagactcatcaacaacaactggggattccgacccaagagactcaacttcaagctctttaacattcaagtcaaagaggtcacgcagaatgacggtacgacgacgattgccaataaccttaccagcacgattcaggtgtttactgactcggagtaccagctcccgtacgtcctcggctcggcgcatcaaggatgcctcccgccgtttccagcggacgtcttcatggtcccacagtatggatacctcaccctgaacaacgggagtcaggcggtaggacgctcttccttttactgcctggagtactttccttctcagatgctgcgtaccggaaacaactttaccttcagctacacctttgaggacgtgcccttccacagcagctacgctcacagccagagtttggaccggctgatgaatcctctgatcgaccagtatctgtattatctgaacaggacacaatcaaatagtggaactcttcagcagtctaggctactgtttagccaagctggacccaccagcatgtcccttcaagctaaaaactggctgcctggaccttgctacagacagcagcgtctgtcaaagcaggcaaacgacaacaacaacagcaactttccctggactgcggctacaaagtatcatctaaatggtcgggactcgttggttaatccaggaccagctatggccagccacaaagacgatgaagaaaagtttttccccatgcatggaaccctgatatttggtaaacaaggaacaaatgctaacgacgcggatttggaacatgtcatgattacagatgaagaagaaatcaggaccaccaatcccgtggctacagagcagtacggaaacgtgtcaaataatttgcaaaactcaaatactggtccaactacagaaaatgtcaatcaccagggagcgttacctggtatggtgtggcaggatcgagacgtgtacctgcagggacccatttgggccaagattcctcacaccgacggacactttcacccttctccactgatgggaggttttggactcaaacacccgcctcctcaaatcatgatcaaaaacactcctgttccagccaatccccctacaaacttcagcgcggcaaagtttgcttccttcatcacacagtattccacgggacaggtcagcgtggagatcgagtgggagctgcagaaggagaacagcaaacgctggaaccccgagatccagtacacttccaactacaacaaatctgttaatgtggactttactgtggacgctaatggtgtgtattcagagcctcgccccattggcaccagacacctgactcgtaatctgtaa

SEQ ID NO: 3739 - DNA, 2208 bp, synthetic construct
  misc_feature 1..2208: note = source = /note="Description of Artificial Sequence: Synthetic polynucleotide"
  source 1..2208: mol_type = other DNA
atggctgccgatggttatcttccagattggctcgaggacactctctctgaaggaataagacagtggtggaagctcaaacctggcccaccaccaccaaggcccgcagagcggcatcaggacgacagcaggggtcttgtgcttcctgggtacaagtacctcggacccttcaacggactcgacaaaggagagccggtcaacgaggcagacgctgcggccctcgagcacgacaaggcctacgaccggcagctcgacagcggagacaacccgtacctcaagtacaaccacgccgacgcggagtttcaggagcgtcttaaagaagatacgtcttttgggggcaacctcggacgagcagtcttccaggcgaaaaagagggttcttgaacctctgggcctggttgaggaacctgttaagacggctccgggaaaaaagaggccggtagagcactctcctgcggagccagactcctcctcgggaaccggaaaagcgggccagcagcctgcaagaaagagattgaatttcggtcagactggagacgcagactccgtacctgacccccagcctctcggacagccaccagcagcccccacaagtttgggatctactacaatggctacaggcagtggcgcaccaatggcagacaataacgagggtgccgatggagtgggtaattcctcaggaaattggcattgcgattcccaatggctgggcgacagagtcatcaccaccagcacccgaacctgggccctgcccacctacaacaaccacctctacaagcaaatctccagccaatcaggagcatcgaacgacaaccactactttggctacagcaccccttgggggtattttgacttcaacagattccactgtcacttctccccacgtgactggcaaagactcatcaacaacaactggggattccgacccaagagactcaacttcaagctctttaacattcaagtcaaagaggtcacgcagaatgacggtacgacgacgattgccaataaccttaccagcacggttcaggtgtttactgactcggagtaccagctcccgtacgtcctcggctcggcgcatcaaggatgcctcccgccgtttccagcggacgtcttcatggtcccacagtatggatacctcaccctgaacaacgggagtcaggcggtaggacgctcttccttttactgcctggagtactttccttctcagatgctgcgtaccggaaacaactttaccttcagctacacctttgaggacgtgcccttccacagcagctacgctcacagccagagtttggaccggctgatgaatcctctgatcgaccagtatctgtattatctgaacaggacacaatcaaatagtggaactcttcagcagtctgggctactgtttagccaagctggacccaccagcatgtcccttcaagctaaaaactggctgcctggaccttgctacagacagcagcgtctgtcaaagcaggcaaacgacaacaacaacagcaactttccctggactgcggctacaaagtatcatctaaatggtcgggactcgttggttaatccaggaccagctatggccagccacaaagacgatgaagaaaagtttttccccatgcatggaaccctgatatttggtaaacaaggaacaaatgctaacgacacggatttggaacatgtcatgattacagatgaagaagaaatcaggaccaccaatcccgtggctacagagcagtacggaaacgtgtcaaataatttgcaaaactcaaatactggtccaactacagaaaatgtcaatcaccagggagcgttacctggtatggtgtggcaggatcgagacgtgtacctgcagggacccatttgggccaagattcctcacaccgacggacactttcacccttctccactgatgggaggttttggactcaaacacccgcctcctcaaatcatgatcaaaaacactcctgttccagccaatcctcctacaaacttcagcgcggcaaagtttgcttccttcatcacacagtattccacgggacaggtcagcgtggagatcgagtgggagctgcagaaggagaacagcaaacgctggaaccccgagatccagtacacttccaactacaacaaatctgttaatgtggactttactgtggacgctaatggtgtgtattcagagcctcgccccattggcaccagatacctgactcgtaatctgtaa

SEQ ID NO: 3740 - DNA, 2208 bp, synthetic construct
  misc_feature 1..2208: note = source = /note="Description of Artificial Sequence: Synthetic polynucleotide"
  source 1..2208: mol_type = other DNA
atggctgccgatggttatcttccagattggctcgaggacactctctctgaaggaataagacagtggtggaagctcaaacctggcccaccaccaccaaggcccgcagagcggcatcaggacgacagcaggggtcttgtgcttcctgggtacaagtacctcggacccttcaacggactcgacaaaggagagccggtcaacgaggcagacgctgcggccctcgagcacgacaaggcctacgaccggcagctcgacagcggagacaacccgtacctcaagtacaaccacgccgacgcggagtttcaggagcgtcctaaagaagatacgtcttttgggggcaacctcggacgagcagtcttccaggcgaaaaagagggttcttgaacctctgggcctggttgaggaacctgttaagacggctccgggaaaaaagaggccggtagagcactctcctgcggagccagactcctcctcgggaaccggaaaagcgggccagcagcctgcaagaaagagattgaatttcggtcagactggagacgcagactccgtacctgacccccagcctctcggacagccaccagcagcccccacaagtttgggatctactacaatggctacaggcagtggcgcaccaatggcagacaataacgagggtgccgatggagtgggtaattcctcaggaaattggcattgcgattcccaatggctgggcgacagagtcatcaccaccagcacccgaacctgggccctgcccacctacaacaaccacctctacaagcaaatctccagccaatcaggagcatcgaacgacaaccactactttggctacagcaccccttgggggtattttgacttcaacagattccactgtcacttctccccacgtgactggcaaagactcattaacaacaactggggattccgacccaagagactcaacttcaagctctttaacattcaagtcaaagaggtcacgcagaatgacggtacgacgacgattgccaataaccttaccagcacggttcaggtgtttactgactcggagtaccagctcccgtacgtcctcggctcggcgcatcaaggatgcctcccgccgtttccagcggacgtcttcatggtcccacagtatggatacctcaccctgaacaacgggagtcaggcggtaggacgctcttccttttactgcctggagtactttccttctcagatgctgcgtaccggaaacaactttaccttcagctacacctttgaggacgtgcccttccacagcagctacgctcacagccagagtttggaccggctgatgaatcctctgatcgaccagtatctgtattatctgaacaggacacaatcaaatagtggaactcttcagcagtctaggctactgtttagccaagctggacccaccagcatgtcccttcaagctaaaaactggctgcctggaccttgctacagacagcagcgtctgtcaaagcaggcaaacgacaacaacaacagcaactttccctggactgcggctacaaagtatcatctaaatggtcgggactcgttggttaatccaggaccagctatggccagccacaaagacgatgaagaaaagtttttccccatgcatggaaccctgatatttggtaaacaaggaacaaatgctaacgacgcggatttggaacatgtcatgattacagatgaagaagaaatcaggaccaccaatcccgtggctacagagcagtacggaaacgtgtcaaataatttgcaaaactcaaatactggtccaactacagaaaatgtcaatcaccagggagcgttacctggtatggtgtggcaggatcgagacgtgtacctgcagggacccatttgggccaagattcctcacaccgacggacactttcacccttctccactgatgggaggttttggactcaaacacccgcctcctcaaatcatgatcaaaaacactcctgttccagccaatcctcctacaaacttcagcgcggcaaagtttgcttccttcatcacacggtattccacgggacaggtcagcgtggagatcgagtgggagctgcagaaggagaacagcaaacgctggaaccccgagatccagtacacttccaactacaacaaatctgttaatgtggactttactgtggacgctaatggtgtgtattcagagcctcgccccattggcaccagatacctgactcgtaatctgtaa

SEQ ID NO: 3741 - DNA, 2208 bp, synthetic construct
  misc_feature 1..2208: note = source = /note="Description of Artificial Sequence: Synthetic polynucleotide"
  source 1..2208: mol_type = other DNA
atggctgccgatggttatcttccagattggctcgaggacactctctctgaaggaataagacagtggtggaagctcaaacctggcccaccaccgccaaagcccgcagagcggcataaggacgacagcaggggtcttgtgcttcctgggtacaagtacctcggacccttcaacggactcgacaagggagagccggtcaacgaggcagacgccgcggccctcgagcacgacaaggcctacgaccggcagctcgacagcggagacaacccgtacctcaagtacaaccacgccgacgcggagcttcaggagcgccttaaagaagatacgtcttttgggggcaacctcggacgagcagtattccaggcgaaaaagagggttcttgaacctctgggcctggttgaggagcctgttaagacggctccgggaaaaaagaggccggtagagcactctcctgtggagccagactcctcctcgggaaccggaaaagcgggccagcagcctgcgagaaagagattgaattttggtcagactggagacgcagactccgtacctgacccccagcctctcggacagccaccagcagcccccacaagtttgggatctactacaatggctacaggcagtggcgcaccaatggcagacaataacgagggtgccgatggagtgggtaattcctcaggaaattggcattgcgattcccaatggtcgggcgacagagtcatcaccaccagcacccgaacctgggccctgcccacctacaacaaccacctctacaagcaaatctccagccaatcaggagccagcaacgacaaccactactttggctacagcaccccctgggggtattttgacttcaacagattccactgccacttttcaccacgtgactggcaaagactcatcaacaacaactggggattccgacccaagagactcaacttcaagctctttaacattcaagtcaaaggggtcacgcagaatgacggtacgacgacgattgccaataaccttaccagcacggttcaggtgtttactgactcggagtaccagctcccgtacgtcctcggctcggcgcatcaaggatgcctcccgccgtttccagcggacgtcttcatggtcccacagtatggatacctcaccctgaacaacgggagtcaggcggtaggacgctcttccttttactgcctggagtactttccttctcagatgcttcgtaccggaaacaactttaccttcagttacacctttgaagacgttcctttccacagcagctacgctcacagtcaaagtctggaccggctgatgaatcctcttatcgaccagtacctgtattatctaaacaaaacacaatcaaatagtggaactcttcagcagtctcggctactgtttagtcaagctggacctaccagcatgtctcttcaagctaaaaactggctgcctggaccttgctacagacaacagcgtctgtcaaagcaggcaaacgacaacaacaacagcaactttccctggactgcggctacaaagtatcatctaaatggccgggactcgttggttaatccaggaccagctatggccagccacaaagacgatgaagaaaagtttttccccatgcatggaaccctgatatttggcaaacaaggaacaaatgctaacgacgcggatttggacaatgtcatgattacagatgaagaagaaatccgtaccaccaatcccgtggctacggagcagtacgggactgtgtcaaataatttgcaaaactcaaatactggtccaactactggaactgtcaatcaccaaggagcgttacctggtatggtgtggcaggatcgagacgtgtaccttcagggacccatttgggccaagattcctcacaccgatggacactttcacccttctccgctgatgggaggttttggactcaaacacccgcctcctcagatcatgatcaaaaacactcccgttccagccaatcctcccacaaacttcagttctgccaagtttgcttctttcatcacacagtattccacgggacaggttagcgtggagatcgagtgggagctgcagaaggagaacagcaaacgctggaaccccgagatccagtacacttccaactacaacaagtctgttaatgtggactttactgtggacactaatggtgtgtattcagagcctcgccccattggcaccagatacctgactcgtaatctgtaa

SEQ ID NO: 3742 - DNA, 2208 bp, synthetic construct
  misc_feature 1..2208: note = source = /note="Description of Artificial Sequence: Synthetic polynucleotide"
  source 1..2208: mol_type = other DNA
atggctgccgatggttatcttccagattggctcgaggacattctctctgaaggaataagacagtggtggaagctcaaacctggcccaccaccaccaaagcccgcagagcggcataaggacgacagcaggggtcttgtgcttcctgggtacaagtacctcggacccttcaacggactcgacaaaggagagccggtcaacgaggcagacgccgcggccctcgagcacgacaaggcctacgaccggcagctcgacagcggagacaacccgtacctcaagtacaaccacgccgacgcggagtttcaggagcgtcttaaagaagatacgtcttttgggggcaacctcggacgagcagtcttccaggcaaaaaagagggttcttgaacctctgggcctggttgaggaacctgttaagacggctccgggaaaaaagaggccggtagagcaatctcctgcggagccagactcctcctcgggaaccggaaaggcgggcaaccagcctgcaagaaagagattgaattttggtcagactggagacgcagactccgtacctgacccccagcctctcggacatccaccagcagccccctctggtctgggatctactacaatggctacaggcagtggcgcaccaatggcagacaataacgagggtgccgatggagtgggtaattcctcaggaaattggcattgcgattcccaatggttgggcgacagagtcatcaccaccagcacccgaacctgggccctgcccacctacaacaatcacctctacaagcaaatctccagccaatcaggagccagcaacgacaaccactactttggctacagcaccccctgggggtattttgacttcaacagattccactgccacttttcaccacgtgactggcaaagactcatcaacaacaactggggattccgacccaaaagactcaacttcaagctctttaacattcaagtcaaagaggtcacgcagaatgacggtacgacgacgattgccaataaccttaccagcacggttcaggtgtttactgactcggagtaccagctcccgtacgtcctcggctcggcgcatcaaggatgcctcccgccgtttccagcggacgtcttcatggtcccacagtatggatacctcaccctgaacaacgggagtcaggcggtaggacgctcttccttttactgcctggagtactttccttctcagatgcttcgtaccggaaacaactttaccttcagttacacctttgaagacgttcctttccacagcagctacgctcacagtcaaagtctggaccggctgatgaatcctctgatagaccagtacctgtattatctaaacaaaacacaatcaaatagtggaactcttcagcagtctcggctactgtttagtcaagctggacccaccagcatgtctcttcaagctaaaaactggctgcctggaccttgctacagacaacagcgtctgtcaaagcaggcaaacgacaacaacaacagcaactttccctggactgcggctacaaagtatcatctaaatggccgggactcgttggttaatccaggaccagctatggccagccacaaagacgatgaagaaaagtttttccccatgcatggaaccctgatatttggtaaacaaggaacaaatgctaacgacgcggatttggacaatgtcatgattacagatgaagaagaaatccgcaccaccaatcccgtggctacggagcagtacgggactgtgtcaaataatttgcaaaactcaaatactggtccaactactggaactgtcaatcaccaaggagcgttacctggtatggtgtggcaggatcgagacgtgtaccttcagggacccatttgggccaagattcctcacaccgatggacactttcatccttctccactgatgggaggttttggactcaaacacccgcctcctcagatcatgatcaaaaacactcccgttccagccaatcctcctacaaacttcagttctgccaagtttgcttctttcatcacacagtattccacggggcaggtcagcgtggagatagagtgggagctgcagaaggagaacagcaaacgctggaaccccgagatccagtatacttccaactacaacaagtctgttaatgtggactttactgtggacactaatggtgtgtattcagagcctcgccccattggcaccagatacctgactcgtaatctgtaa

SEQ ID NO: 3743 - DNA, 2208 bp, synthetic construct
  misc_feature 1..2208: note = source = /note="Description of Artificial Sequence: Synthetic polynucleotide"
  source 1..2208: mol_type = other DNA
atggctgccgatggttatcttccagattggctcgaggacattctctctgaaggaataagacagtggtggaagctcaaacctggcccaccaccaccaaagcccgcagagcggcataaggacgacagcaggggtcttgtgcttcctgggtacaagtacctcggacccttcaacggactcgacaaaggagagccggtcaacgaggcagacgccgcggccctcgagcacgacaaggcctacgaccggcagctcgacagcggagacaacccgtacctcaagtacaaccacgccgacgcggagtttcaggagcgtcttaaagaagatacgtcttttgggggcaacctcggacgagcagtcttccaggcaaaaaagagggttcttgaacctctgggcctggttgaggaacctgttaagacggctccgggaaaaaagaggccggtagagcaatctcctgcggagccagactcctcctcgggaaccggaaaggcgggcaaccagcctgcaagaaagagattgaattttggtcagactggagacgcagactccgtacctgacccccagcctctcggacagccaccagcagccccctctggtctgggatctactacaatggctacaggcagtggcgcaccaatggcagacaataacgagggtgccgatggagtgggtaattcctcaggaaattggcattgcgattcccaatggttgggcgacagagtcatcaccaccagcacccgaacctgggccctgcccacctacaacaatcacctctacaagcaaatctccagccaatcaggagccagcaacgacaaccactactttggctacagcaccccctgggggtattttgacttcaacagattccactgccacttttcaccacgtgactggcaaagactcatcaacaacaactggggattccgacccaaaagactcaacttcaagctctttaacattcaagtcaaagaggtcacgcagaatgacggtacgacgacgattgccaataaccttaccagcacggttcaggtgtttactgactcggagtaccagctcccgtacgtcctcggctcggcgcatcaaggatgcctcccgccgtttccagcggacgtcttcatggtcccacagtatggatacctcaccctgaacaacgggagtcaggcggtaggacgctcttccttttactgcctggagtactttccttctcagatgcttcgtaccggaaacaactttaccttcagttacacctttgaagacgttcctttccacagcagctacgctcacagtcaaagtctggaccggctgatgaatcctctgatagaccagtacctgtattatctaaacaaaacacaatcaaatagtggaactcttcagcagtctcggctactgtttagtcaagctggacccaccagcatgtctcttcaagctaaaaactggctgcctggaccttgctacagacaacagcgtctgtcaaagcaggtaaacgacaacaacaacagcaactttccctggactgcggctacaaagtatcatctaaatggccgggactcgttggttaatccaggaccagctatggccagccacaaagacgatgaagaaaagtttttccccatgcatggaaccctgatatttggtaaacaaggaacaaatgctaacgacgcggatttggacaatgtcatgattacagatgaagaagaaatccgcaccaccaatcccgtggctacggagcagtacgggactgtgtcaaataatttgcaaaactcaaatactggtccaactactggaactgtcaatcaccaaggagcgttacctggtatggtgtggcaggatcgagacgtgtaccttcagggacccatttgggccaagattcctcacaccgatggacactttcatccttctccactgatgggaggttttggactcaaacacccgcctcctcagatcatgatcaaaaacactcccgttccagccaatcctcctacaaacttcagttctgccaagtttgcttctttcatcacacagtattccacggggcaggtcagcgtggagatagagtgggagctgcagaaggagaacagcaaacgctggaaccccgagatccagtatacttccaactacaacaagtctgttaatgtggactttactgtggacactaatggtgtgtattcagagcctcgccccattggcaccagatacctgactcgtaatctgtaa

SEQ ID NO: 3744 - DNA, 2208 bp, synthetic construct
  misc_feature 1..2208: note = source = /note="Description of Artificial Sequence: Synthetic polynucleotide"
  source 1..2208: mol_type = other DNA
atggctgccgatggttatcttccagattggctcgaggacattctctctgaaggaataagacagtggtggaagctcaaacctggcccaccaccaccaaagcccgcagagcggcataaggacgacagcaggggtcttgtgcttcctgggtacaagtacctcggacccttcaacggactcgacaaaggagagccggtcaacgaggcagacgccgcggccctcgagcacgacaaggcctacgaccggcagctcgacagcggagacaacccgtacctcaagtacaaccacgccgacgcggagtttcaggagcgtcttaaagaagatacgtcttttgggggcaacctcggacgagcagtcttccaggcaaaaaagagggttcttgaacctctgggcctggttgaggaacctgttaagacggctccgggaaaaaagaggccggtagagcaatctcctgcggagccagactcctcctcgggagccggaaaggcgggcaaccagcctgcaagaaagagattgaattttggtcagactggagacgcagactccgtacctgacccccagcctctcggacagccaccagcagccccctctggtctgggatctactacaatggctacaggcagtggcgcaccaatggcagacaataacgagggtgccgatggagtgggtaattcctcaggaaattggcattgcgattcccaatggttgggcgacagagtcatcaccaccagcacccgaacctgggccctgcccacctacaacaatcacctctacaagcaaatctccagccaatcaggagccagcaacgacaaccactactttggctacagcaccccctgggggtattttgacttcaacagattccactgccacttttcaccacgtgactggcaaagactcatcaacaacaactggggattccgacccaaaagactcaacttcaagctctttaacattcaagtcaaagaggtcacgcagaatgacggtacgacgacgattgccaataaccttaccagcacggttcaggtgtttactgactcggagtaccagctcccgtacgtcctcggctcggcgcatcaaggatgcctcccgccgtttccagcggacgtcttcatggtcccacagtatggatacctcaccctgaacaacgggagtcaggcggtaggacgctcttccttttactgcctggagtactttccttctcagatgcttcgtaccggaaacaactttaccttcagttacacctttgaagacgttcctttccacagcagctacgctcacagtcaaagtctggaccggctgatgaatcctctgatagaccagtacctgtattatctaaccaaaacacaatcaaatagtggaactcttcagcagtctcggctactgtttagtcaagctggacccaccagcatgtctcttcaagctaaaaactggctgcctggaccttgctacagacaacagcgtctgtcaaagcaggcaaacgacaacaacaacagcaactttccctggactgcggctacaaagtatcatctaaatggccgggactcgttggttaatccaggaccagctatggccagccacaaagacgatgaagaaaagtttttccccatgcatggaaccctgatatttggtaaacaaggaacaaatgctaacgacgcggatttggacaatgtcatgattacagatgaagaagaaatccgcaccaccaatcccgtggctacggagcagtacgggactgtgtcaaataatttgcaaaactcaaatactggtccaactactggaactgtcgatcaccaaggagcgttacctggtatggtgtggcaggatcgagacgtgtaccttcagggacccatttgggccaagattcctcacaccgatggacactttcatccttctccactgatgggaggttttggactcaaacacccgcctcctcagatcatgatcaaaaacactcccgttccagccaatcctcctacaaacttcagttctgccaagtttgcttctttcatcacacagtattccacggggcaggtcagcgtggagatagagtgggagctgcagaaggagaacagcaaacgctggaaccccgagatccagtatacttccaactacaacaagtctgttaatgtggactttactgtggacactaatggtgtgtattcagagcctcgccccattggcaccagatacctgactcgtaatctgtaa

SEQ ID NO: 3745 - DNA, 2208 bp, synthetic construct
  misc_feature 1..2208: note = source = /note="Description of Artificial Sequence: Synthetic polynucleotide"
  source 1..2208: mol_type = other DNA
atggctgccgatggttatcttccagattggctcgaggacattctctctgaaggaataagacagtggtggaagctcaaacctggcccaccaccaccaaagcccgcagagcggcataaggacgacagcaggggtcttgtgcttcctgggtacaagtacctcggacccttcaacggactcgacaaaggagagccggtcaacgaggcagacgccgcggccctcgagcacgacaaggcctacgaccggcagctcgacagcggagacaacccgtacctcaagtacaaccacgccgacgcggagtttcaggagcgtcttaaagaagatacgtcttttgggggcaacctcggacgagcagtcttccaggcaaaaaagagggttcttgaacctctgggcctggttgaggaacctgttaagacggctccgggaaaaaagaggccggtagagcaatctcctgcggagccagactcctcctcgggaaccggaaaggcgggcaaccagcctgcaagaaagagattgaattttggtcagactggagacgcagactccgtacctgacccccagcctctcggacagccaccagcagccccctctggtctgggatctactacaatggctacaggcagtggcgcaccaatggcagacaataacgagggtgccgatggagtgggtaattcctcaggaaattggcattgcgattcccaatggttgggcgacagagtcatcaccaccagcacccgaacctgggccctgcccacctacaacaatcacctctacaagcaaatctccagccaatcaggagccagcaacgacaaccactactttggctacagcaccccctgggggtattttgacttcaacagattccactgccacttttcaccacgtgactggcaaagactcatcaacaacaactggggattccgacccaaaagactcaacttcaagctctttaacattcaagtcaaagaggtcacgcagaatgacggtacgacgacgattgccaataaccttaccagcacggttcaggtgtttactgactcggagtaccagctcccgtacgtcctcggctcggcgcatcaaggatgcctcccgccgtttccagcggacgtcttcatggtcccacagtatggatacctcaccctgaacaacgggagtcaggcggtaggacgctcttccttttactgcctggagtactttccttctcagatgcttcgtaccggaaacaactttaccttcagttacacctttgaagacgttcctttccacagcagctacgctcacagtcaaagtctggaccggctgatgaatcctctgatagaccagtacctgtattatctaaacaaaacacaatcaaatagtggaactcttcagcagtctcggctactgcttagtcaagctggacccaccagcatgtctcttcaagctaaaaactggctgcctggaccttgctacagacaacagcgtctgtcaaagcaggcaaacgacaacaacaacagcaactttccctggactgcggctacaaagtatcatctaaatggccgggactcgttggttaatccaggaccagctatggccagccacaaagacgatgaagaaaagtttttccccatgcatggaaccctgatatttggtaaacaaggaacaaatgctaacgacgcggatttggacaatgtcatgattacagatgaagaagaaatccgcaccaccaatcccgtggctacggagcagtacgggactgtgtcaaataatttgcaaaactcaaatactggtccaactactggaactgtcaatcaccaaggagcgttacctggtatggtgtggcaggatcgagacgtgtaccttcagggacccatttgggccaagattcctcacaccgatggacactttcatccttctccactgatgggaggttttggactcaaacacccgcctcctcagatcatgatcaaaaacactcccgttccagccaatcctcctacaaacttcagttctgccaagtttgcttctttcatcacacagtattccacggggcaggtcagcgtggagatagagtgggagctgcagaaggagaacagcaaacgctggaaccccgagatccagtatacttccaactacaacaagtctgttaatgtggactttactgtggacactaatggtgtgtattcagagcctcgccccattggcaccagatacctgactcgtaatctgtaa

SEQ ID NO: 3746 - DNA, 2208 bp, synthetic construct
  misc_feature 1..2208: note = source = /note="Description of Artificial Sequence: Synthetic polynucleotide"
  source 1..2208: mol_type = other DNA
atggctgccgatggttatcttccagattggctcgaggacactctctctgaaggaataagacagtggtggaagctcaaacctggcccaccaccgccaaagcccgcagagcggcataaggacgacagcaggggtcttgtgcttcctgggtacaagtacctcggacccttcaacggactcgacaagggagagccggtcaacgaggcagacgccgcggccctcgagcacgacaaggcctacgaccggcagctcgacagcggagacaacccgtacctcaagtacaaccacgccgacgcggagtttcaggagcgccttaaagaagatacgtcttttgggggcaacctcggacgagcagtattccaggcgaaaaagagggttcttgaacctctgggcctggttgaggagcctgttaagacggctccgggaaaaaagaggccggtagagcactctcctgtggagccagactcctcctcgggaaccggaaaagcgggccagcagcctgcgagaaagagattgaattttggtcagactggagacgcagactccgtacctgacccccagcctctcggacagccaccagcagcccccacaagtttgggatctactacaatggctacaggcagtggcgcaccaatggcagacaataacgagggtgccgatggagtggataattcctcaggaaattggcattgcgattcccaatggtcgggcgacagagtcatcaccaccagcacccgaacctgggccctgcccacctacaacaaccacctctacaagcaaatctccagccaatcaggagccagcaacgacaaccactactttggctacagcaccccctgggggtattttgacttcaacagattccactgccacttttcaccacgtgactggcaaagactcatcaacaacaactggggattccgacccaagagactcaacttcaagctctttaacattcaagtcaaagaggtcacgcagaatgacggtacgacgacgattgccaataaccttaccagcacggttcaggtgtctactgactcggagtaccagctcccgtacgtcctcggctcggcgcatcaaggatgcctcccgccgtttccagcggacgtcttcatggtcccacagtatggatacctcaccctgaacaacgggagtcaggcggtaggacgctcttccttttactgcctggagtactttccttctcagatgcttcgtaccggaaacaactttaccttcagttacacctttgaagacgttcctttccacagcagctacgctcacagtcaaagtctggaccggctgatgaatcctcttatcgaccagtacctgtattatctaaacaaaacacaatcaaatagtggaactcttcagcagtctcggctactgtttagtcaagctggacctaccagcatgtctcttcaagctaaaaactggctgcctggaccttgctacagacaacagcgtctgtcaaagcaggcaaacgacaacaacaacagcaactttccctggactgcggctacaaagtatcatctaaatggccgggactcgttggttaatccaggaccagctatggccagccacaaagacgatgaagaaaagtttttccccatgcatggaaccctgatatttggcaaacaaggaacaaatgctaacgacgcggatttggacaatgtcatgattacagatgaagaagaaatccgtaccaccaatcccgtggctacggagcagtacgggactgtgtcaaataatttgcaaaactcaaatactggtccaactactggaactgtcaatcaccaaggagcgttacctggtatggtgtggcaggatcgagacgtgtaccttcagggacccatttgggccaagattcctcacaccgatggacactttcacccttctccgctgatgggaggttttggactcaaacacccgcctcctcagatcatgatcaaaaacactcccgttccagccaatcctcccacaaacttcagttctgccaagtttgcttctttcatcacacagtattccacgggacaggttagcgtggagatcgagtgggagctgcagaaggagaacagcaaacgctggaaccccgagatccagtacacttccaactacaacaagtctgttaatgtggactttactgtggacactaatggtgtgtattcagagcctcgccccattggcaccagatacctgactcgtaatctgtaa

SEQ ID NO: 3747 - DNA, 2208 bp, synthetic construct
  misc_feature 1..2208: note = source = /note="Description of Artificial Sequence: Synthetic polynucleotide"
  source 1..2208: mol_type = other DNA
atggctgccgatggttatcttccagattggctcgaggacactctctctgaaggaataagacagtggtggaagctcaaacctggcccaccaccgccaaagcccgcagagcggcataaggacgacagcaggggtcttgtgcttcctgggtacaagtacctcggacccttcaacggactcgacaagggagagccggtcaacgaggcagacgccgcggccctcgagcacgacaaggcctacgaccggcagctcgacagcggagacaacccgtacctcaagtacaaccacgccgacgcggagtttcaggagcgccttaaagaagatacgtcttttgggggcaacctcggacgagcagtattccaggcgaaaaagagggttcttgaacctctgggcctggttgaggagcctgttaagacggctccgggaaaaaagaggccggtagagcactctcctgtggagccagactcctcctcgggaaccggaaaagcgggccagcagcctgcgagaaagagattgaattttggtcagactggagacgcagactccgtacctgacccccagcctctcggacagccaccagcagcccccacaagtttgggatctactacaatggctacaggcagtggcgcaccaatggcagacaataacgagggtgccgatggagtgggtaattcctcaggaaattggcattgcgattcccaatggtcgggcgacagagtcatcaccaccagcacccgaacctgggccctgcccacctacaacaaccacctctacaagcaaatctccagccaatcaggagccagcaacgacaaccactactttggctacagcaccccctgggggtattttgacttcaacagattccactgccacttttcaccacgtgactggcaaagactcatcaacaacaactggggattccgacccaagagactcaacttcaagctctttaacattcaagtcaaagaggtcacgcagaatgacggtacgacgacgattgccaataaccttaccagcacggttcaggtgtttactgactcggagtaccagctcccgtacgtcctcggctcggcgcatcaaggatgcctcccgccgtttccggcggacgtcttcatggtcccacagtatggatacctcaccctgaacaacgggagtcaggcggtaggacgctcttccttttactgcctggagtactttccttctcagatgcttcgtaccggaaacaactttaccttcagttacacctttgaagacgttcctttccacagcagctacgctcacagtcaaagtctggaccggctgatgaatcctcttatcgaccagtacctgtattatctaaacaaaacacaatcaaatagtggaactcttcagcagtctcggctactgtttagtcaagctggacctaccagcatgtctcttcaagctaaaaactggctgcctggaccttgctgcagacaacagcgtctgtcaaagcaggcaaacgacaacaacaacagcaactttccctggactgcggctacaaagtatcatctaaatggccgggactcgttggttaatccaggaccagctatggccagccacaaagacgatgaagaaaagtttttccccatgcatggaaccctgatatttggcaaacaaggaacaaatgctaacgacgcggatttggacaatgtcatgattacagatgaagaagaaatccgtaccaccaatcccgtggctacggagcagtacgggactgtgtcaaataatttgcaaaactcaaatactggtccaactactggaactgtcaatcaccaaggagcgttacctggtatggtgtggcaggatcgagacgtgtaccttcagggacccatttgggccaagattcctcacaccgatggacactttcacccttctccgctgatgggaggttttggactcaaacacccgcctcctcagatcatgatcaaaaacactcccgttccagccaatcctcccacaaacttcagttctgccaagtttgcttctttcatcacacagtattccacgggacaggttagcgtggagatcgagtgggagctgcagaaggagaacagcaaacgctggaaccccgagatccagtacacttccaactacaacaagtctgttaatgtggactttactgtggacactaatggtgtgtattcagagcctcgccccattggcaccagatacctgactcgtaatctgtaa

SEQ ID NO: 3748 - DNA, 2208 bp, synthetic construct
  misc_feature 1..2208: note = source = /note="Description of Artificial Sequence: Synthetic polynucleotide"
  source 1..2208: mol_type = other DNA
atggctgccgatggttatcttccagattggctcgaggacattctctctgaaggaataagacagtggtggaagctcaaacctggcccaccaccaccaaagcccgcagagcggcataaggacgacagcaggggtctcgtgcttcctgggtacaagtacctcggacccttcaacggactcgacaaaggagagccggtcaacgaggcagacgccgcggccctcgagcacgacaaggcctacgaccggcagctcgacagcggagacaacccgtacctcaagtacaaccacgccgacgcggagtttcaggagcgtcttaaagaagatacgtcttttgggggcaacctcggacgagcagtcttccaggcaaaaaagagggttcttgaacctctgggcctggttgaggaacctgttaagacggctccgggaaaaaagaggccggtagagcaatctcctgcggagccagactcctcctcgggaaccggaaaggcgggcaaccagcctgcaagaaagagattgaattttggtcagactggagacgcagactccgtacctgacccccagcctctcggacagccaccagcagccccctctggtctgggatctactacaatggctacaggcagtggcgcaccaatggcagacaataacgagggtgccgatggagtgggtaattcctcaggaaattggcattgcgattcccaatggttgggcgacagagtcatcaccaccagcacccgaacctgggccctgcccacctacaacaatcacctctacaagcaaatctccagccaatcaggagccagcaacgacaaccactactttggctacagcaccccctgggggtattttgacttcaacagattccactgccacttttcaccacgtgactggcaaagactcatcaacaacaactggggattccgacccaaaagactcaacttcaagctctttaacattcaagtcaaagaggtcacgcagaatgacggtacgacgacgattgccaataaccttaccagcacggttcaggtgtttactgactcggagtaccagctcccgtacgtcctcggctcggcgcatcaaggatgcctcccgccgtttccagcggacgtcttcatggtcccacagtatggatacctcaccctgaacaacgggagtcaggcggtaggacgctcttccttttactgcctggagtactttccttctcagatgcttcgtaccggaaacaactttaccttcagttacacctttgaagacgttcctttccacagcagctacgctcacagtcaaagtctggaccggctgatgaatcctctgatagaccagtacctgtattatctaaacaaaacacaatcaaatagtggaactcttcagcagtctcggctactgtttagtcaagctggacccaccagcatgtctcttcaagctaaaaactggctgcctggaccttgctacagacaacagcgtctgtcaaagcaggcaaacgacaacaacaacagcaactttccctggactgcggctacaaagtatcatctaaatggccgggactcgttggttaatccaggaccagctatggccagccacaaagacgatgaagaaaagtttttccccatgcatggaaccctgatatttggtaaacaaggaacaaatgctaacgacgcggatttggacaatgtcatgattacagatgaagaagaaatccgcaccaccaatcccgtggctacggagcagtacgggactgtgtcaaataatttgcaaaactcaaatactggtccaactactggaactgtcaatcaccaaggagcgttacctggtatggtgtggcaggatcgagacgtgtaccttcagggacccatttgggccaagattcctcacaccgatggacactttcatccttctccactgatgggaggttttggactcaaacacccgcctcctcagatcatgatcaaaaacactcccgttccagccaatcctcctacaaacttcagttctgccaagtttgcttctttcatcacacagtattccacggggcaggtcagcgtggagatagagcgggagctgcagaaggagaacagcaaacgctggaaccccgagatccagtatacttccaactacaacaagtctgttaatgtggactttactgtggacactaatggtgtgtattcagagcctcgccccattggcaccagatacctgactcgtaatctgtaa

SEQ ID NO: 3749 - DNA, 2208 bp, synthetic construct
  misc_feature 1..2208: note = source = /note="Description of Artificial Sequence: Synthetic polynucleotide"
  source 1..2208: mol_type = other DNA
atggctgccgatggttatcttccagattggctcgaggacattctctctgaaggagtaagacagtggtggaagctcaaacctggcccaccaccaccaaagcccgcagagcggcataaggacgacagcaggggtcttgtgcttcctgggtacaagtacctcggacccttcaacggactcgacaaaggagagccggtcaacgaggcagacgccgcggccctcgagcacgacaaggcctacgaccggcagctcgacagcggagacaacccgtacctcaagtacaaccacgccgacgcagagtttcaggagcgtcttaaagaagatacgtcttttgggggcaacctcggacgagcagtcttccaggcaaaaaagagggttcttgaacctctgggcctggttgaggaacctgttaagacggctccgggaaaaaagaggccggtagagcaatctcctgcggagccagactcctcctcgggaaccggaaaggcgggcaaccagcctgcaagaaagagattgaattttggtcagactggagacgcagactccgtacctgacccccagcctctcggacagccaccagcagccccctctggtctgggatctactacaatggctacaggcagtggcgcaccaatggcagacaataacgagggtgccgatggagtgggtaattcctcaggaaattggcattgcgattcccaatggttgggcgacagagtcatcaccaccagcacccgaacctgggccctgcccacctacaacaatcacctctacaagcaaatctccagccaatcaggagccagcaacgacaaccactactttggctacagcaccccctgggggtattttgacttcaacagattccactgccacttttcaccacgtgactggcaaagactcatcaacaacaactggggattccgacccaaaagactcaacttcaagctctttaacattcaagtcaaagaggtcacgcagaatgacggtacgacgacgattgccaataaccttaccagcacggttcaggtgtttactgactcggagtaccagctcccgtacgtcctcggctcggcgcatcaaggatgcctcccgccgtttccagcggacgtcttcatggtcccacagtatggatacctcaccctgaacaacgggagtcaggcggtaggacgctcttccttttactgcctggagtactttccttctcagatgcttcgtaccggaaacaactttaccttcagttacacctttgaagacgttcctttccacagcagctacgctcacagtcaaagtctggaccggctgatgaatcctctgatagaccagtacctgtattatctaaacaaaacacaatcaaatagtggaactcttcagcagtctcggctactgtttagtcaagctggacccaccagcatgtctcttcaagctaaaaactggctgcctggaccttgctacagacaacagcgtctgtcaaagcaggcaaacgacaacaacaacagcaactttccctggactgcggctacaaagtatcatctaaatggccgggactcgttggttaatccaggaccagctatggccagccacaaagacgatgaagaaaagtttttccccatgcatggaaccctgatatttggtaaacaaggaacaaatgctaacgacgcggatttggacaatgtcatgattacagatgaagaagaaatccgcaccaccaatcccgtggctacggagcagtacgggactgtgtcaaataatttgcaaaactcaaatactggtccaactactggaactgtcaatcaccaaggagcgttacctggtatggtgtggcaggatcgagacgtgtaccttcagggacccatttgggccaagattcctcacaccgatggacactttcatccttctccactgatgggaggttttggactcaaacacccgcctcctcagatcatgatcaaaaacactcccgttccagccaatcctcctacaaacttcagttctgccaagtttgcttctttcatcacacagtattccacggggcaggtcagcgtggagatagagtgggagctgcagaaggagaacagcaaacgctggaaccccgagatccagtatacttccaactacaacaagtctgttaatgtggactttactgtggacactaatggtgtgtattcagagcctcgccccattggcaccagatacctgactcgtaatctgtaa

SEQ ID NO: 3750 - DNA, 2208 bp, synthetic construct
  misc_feature 1..2208: note = source = /note="Description of Artificial Sequence: Synthetic polynucleotide"
  source 1..2208: mol_type = other DNA
atggctgccgatggttatcttccagattggctcgaggacactctctctgaaggaataagacagtggtggaagctcaaacctggcccaccaccgccaaagcccgcagagcggcataaggacgacagcaggggtcttgtgcttcctgggtacaagtacctcggacccttcaacggactcgacaagggagagccggtcaacgaggcagacgccgcggccctcgagcacgacaaggcctacgaccggcagctcgacagcggagacaacccgtacctcaagtacaaccacgccgacgcggagtttcaggagcgccttaaagaagatacgtcttttgggggcaacctcggacgagcagtattccaggcgaaaaagagggttcttgaacctctgggcctggttgaggagcctgttaagacggctccgggaaaaaagaggccggtagagcactctcctgtggagccagactcctcctcgggaaccggaaaagcgggccagcagcctgcgagaaagagattgaattttggtcagactggagacgcagactccgtacctgacccccagcctctcggacagccaccagcagcccccacaagtttgggatctactacaatggctacaggcagtggcgcaccaatggcagacaataacgagggtgccgatggagtgggtaattcctcaggaaattggcattgcgattcccaatggtcgggcgacagagtcatcaccaccagcacccgaacctgggccctgcccacctacaacaaccacctctacaagcaaatctccagccaatcaggagccagcaacgacaaccactactttggctacagcaccccctgggggtattttgacttcaacagattccactgccacttttcaccacgtgactggcaaagactcatcaacaacaactggggattccgacccaagagactcaacttcaagctctttaacattcaagtcaaagaggtcacgcagaatgacggtacgacgacgattgccaataaccttaccagcacggttcaggtgtctactgactcggagtaccagctcccgtacgtcctcggctcggcgcatcaaggatgcctcccgccgtttccagcggacgtcttcatggtcccacagtatggatacctcaccctgaacaacgggagtcaggcggtaggacgctcttccttttactgcctggagtactttccttctcagatgcttcgtaccggaaacaactttaccttcagttacacctttgaagacgttcctttccacagcagctacgctcacagtcaaagtctggaccggctgatgaatcctcttatcgaccagtacctgtattatctaaacaaaacacaatcaaatagtggaactcttcagcagtctcggctactgtttagtcaagctggacctaccagcatgtctcttcaagctaaaaactggctgcctggaccttgctacagacaacagcgtctgtcaaagcaggcaaacgacaacaacaacagcaactttccctggactgcggctacaaagtatcatctaaatggccgggactcgttggttaatccaggaccagctatggccagccacaaagacgatgaagaaaagtttttccccatgcatggaaccctgatatttggcaaacaaggaacaaatgctaacgacgcggatttggacaatgtcatgattacagatgaagaagaaatccgtaccaccaatcccgtggctacggagcagtacgggactgtgtcaaataatttgcaaaactcaaatactggtccaactactggaactgtcaatcaccaaggagcgttacctggtatggtgtggcaggatcgagacgtgtaccttcagggacccatttgggccaagattcctcacaccgatggacactttcacccttctccgctgatgggaggttttggactcaaacacccgcctcctcagatcatgatcaaaaacactcccgttccagccaatcctcccacaaacttcagttctgccaagtttgcttctttcatcacacagtattccacgggacaggttagcgtggagatcgagtgggagctgcagaaggagaacagcaaacgctggaaccccgagatccagtacacttccaactacaacaagtctgttaatgtggactttactgtggacactaatggtgtgtattcagagcctcgccccattggcaccagatacctgactcgtaatctgtaa

SEQ ID NO: 3751 - DNA, 2208 bp, synthetic construct
  misc_feature 1..2208: note = source = /note="Description of Artificial Sequence: Synthetic polynucleotide"
  source 1..2208: mol_type = other DNA
atggctgccgatggttatcttccagattggctcgaggacattctctctgaaggaataagacagtggtggaagctcaaacctggcccaccaccaccaaagcccgcagagcggcataaggacgacagcaggggtcttgtgcttcctgggtacaagtacctcggacccttcaacggactcgacaaaggagagccggtcaacgaggcagacgccgcggccctcgagcacgacaaggcctacgaccggcagctcgacagcggagacaacccgtacctcaagtacaaccacgccgacgcggagtttcaggagcgtcttaaagaagatacgtcttttgggggcaacctcggacgagcagtcttccaggcaaaaaagagggttcttgaacctctgggcctggttgaggaacctgttaagacggctccgggaaaaaagaggccggtagagcaatctcctgcggagccagactcctcctcgggaaccggaaaggcgggcaaccagcctgcaagaaagagattgaattttggtcagactggagacgcagactccgtacctgacccccagcctctcggacagccaccagcagccccctctggtctgggatctactacaatggctacaggcagtggcgcaccaatggcagacaataacgagggtgccgatggagtgggtaattcctcaggaaattggcattgcgattcccaatggttgggcgacagagtcatcaccaccagcacccgaacctgggccctgcccacctacaacaatcacctctacaagcaaatctccagccaatcaggagccagcaacgacaaccactactttggctacagcaccccctgggggtattttgacttcaacagattccactgccacttttcaccacgtgactggcaaagactcatcaacaacaactggggattccgacccaaaagactcaacttcaagctctttaacattcaagtcaaagaggtcacgcagaatgacggtacgacgacgattgccaataaccttaccagcacggttcaggtgtttactgactcggagtaccagctcccgtacgtcctcggctcggcgcatcaaggatgcctcccgccgtttccagcggacgtcttcatggtcccacagtatggatacctcaccctgaacaacgggagtcaggcggtaggacgctcttccttttactgcctggagtactttccttctcagatgcttcgtaccggaaacaactttaccttcagttacacctttgaagacgttcctttccacagcagctacgctcacagtcaaagtctggaccggctgatgaatcctctgatagaccagtacctgtattatctaaacaaaacacaatcaaatagtggaactcttcagcagtctcggctactgtttagtcaagctggacccaccagcatgtctcttcaagctaaaaactggctgcctggaccttgctacagacaacagcgtctgtcaaagcaggcaaacgacaacaacaacagcaactttccctggactgcggctacaaagtatcatctaaatggccgggactcgttggttaatccaggaccagctatggccagccacaaagacgatgaagaaaagtttttccccatgcatggaaccctgatatttggtaaacaaggaacaaatgctaacgacgcggatttggacaatgtcatgattacagatgaagaagaaatccgcaccaccaatcccgtggctacggagcagtacgggactgtgtcaaataatttgcaaaactcaaatactggtccaactactggaactgtcaatcaccaaggagcgttacctggtatggtgtggcaggatcgagacgtgtaccttcagggacccatttgggccaagattcctcacaccgatggacactttcatccttctccactgatgggaggttttggactcaaacacccgcctcctcagatcatgatcaaaaacactcccgttccagtcaatcctcctacaaacttcagttctgccaagtttgcttctttcatcacacagtattccacggggcaggtcagcgtggagatagagtgggagctgcagaaggagaacagcaaacgctggaaccccgagatccagtatacttccaactacaacaagtctgttaatgtggactttactgtggacactaatggtgtgtattcagagcctcgccccattggcaccagatacctgactcgtaatctgtaa

SEQ ID NO: 3752 - DNA, 2208 bp, synthetic construct
  misc_feature 1..2208: note = source = /note="Description of Artificial Sequence: Synthetic polynucleotide"
  source 1..2208: mol_type = other DNA
atggctgccgatggttatcttccagattggctcgaggacactctctctgaaggaataagacagtggtggaagctcaaacctggcccaccaccgccaaagcccgcagagcggcataaggacgacagcaggggtcttgtgcttcctgggtacaagtacctcggacccttcaacggactcgacaaaggagagccggtcaacgaggcagacgccgcggccctcgagcacgacaaggcctacgaccggcagctcgacagcggagacaacccgtacctcaagtacaaccacgccgacgcggagtttcaggagcgccttaaagaagatacgtcttttgggggcaacctcgcaagagcagtattccaggcgaaaaagagggttcttgaacctctgggcctggttgaggagcctgttaagacggctccgggaaaaaagaggccggtagagcactctcctgcggagccagattcctcctccggaactggaaagtcgggccaacagcctgcaagaaagagattgaattttggtcagactggagacgcagactccgtacctgacccccagcctctcggacagccaccagcagccccctctggtctgggatctactacaatggctacaggcagtggcgcaccaatggcagacaataacgagggtgccgatggagtgggtaattcctcaggaaattggcattgcgattcccaatggttgggcgacagagtcatcaccaccagcacccgaacctgggccctgcccacctacaacaatcacctctacaagcaaatctccagccaatcaggagccagcaacgacaaccactactttggctacagcaccccctgggggtattttgacttcaacagattccactgccacttttcaccacgtgactggcaaagactcatcaacaacaactggggattccgacccaaaagactcaacttcaagctctttaacattcaagtcaaagaggtcacgcagaatgacggtacgacgacgattgccaataaccttaccagcacggttcaggtgtttactgactcggagtaccagctcccgtacgtcctcggctcggcgcatcaaggatgcctcccgccgtttccagcggacgtcttcatggtcccacagtatggatacctcaccctgaacaacgggagtcaggcggtaggacgctcttccttttactgcctggagtactttccttctcagatgcttcgtaccggaaacaactttaccttcagttacacctttgaagacgttcctttccacagcagctacgctcacagtcaaagtctggaccggctgatgaatcctctgatagaccagtacctgtattatctaaacaaaacacaatcaaatagtggaactcttcagcagtctcggctactgtttagtcaagctggacccaccagcatgtctcttcaagctaaaaactggctgcctggaccttgctacagacaacagcgtctgtcaaagcaggcaaacgacaacaacaacagcaactttccctggactgcggctacaaagtatcatctaaatggccgggactcgttggttaatccaggaccagctatggccagccacaaagacgatgaagaaaagtttttccccatgcatggaaccctgatatttggtaaacaaggaacaaatgctaacgacgcggatttggacaatgtcatgattacagatgaagaagaaatccgcaccaccaatcccgtggctacggagcagtacgggactgtgtcaaataatttgcaaaactcaaatactggtccaactactggaactgtcaatcaccaaggagcgttacctggtatggtgtggcaggatcgagacgtgtaccttcagggacccatttgggccaagattcctcacaccgatggacactttcatccttctccactgatgggaggttttggactcaaacacccgcctcctcagatcatgatcaaaaacactcccgttccagccaatcctcctacaaacttcagttctgccaagtttgcttctttcatcacacagtattccacggggcaggtcagcgtggagatagagtgggagctgcagaaggagaacagcaaacgctggaaccccgagatccagtatacttccaactacaacaagtctgttaatgtggactttactgtggacactaatggtgtgtattcagagcctcgccccattggcaccagatacctgactcgtaatctgtaa

SEQ ID NO: 3753 - DNA, 2208 bp, synthetic construct
  misc_feature 1..2208: note = source = /note="Description of Artificial Sequence: Synthetic polynucleotide"
  source 1..2208: mol_type = other DNA
atggctgccgatggttatcttccagattggctcgaggacattctctctgaaggaataagacagtggtggaagctcaaacctggcccaccaccaccaaagcccgcagagcggcataaggacgacagcaggggtcttgtgcttcctgggtacaagtacctcggacccttcaacggactcgacaaaggagagccggtcaacgaggcagacgccgcggccctcgagcacgacaaggcctacgaccggcagctcgacagcggagacaacccgtacctcaagtacaaccacgccgacgcggagtttcaggagcgtcttaaagaagatacgtcttttgggggcaacctcggacgagcagtcttccaggcaaaaaagagggttcttgaacctctgggcctggttgaggaacctgttaagacggctccgggaaaaaagaggccggtagagcaatctcctgcggagccagactcctcctcgggaaccggaaaggcgggcaaccagcctgcaagaaagagattgaattttggtcagactggagacgcagactccgtacctgacccccagcctctcggacagccaccagcagccccctctggtctgggatctactacaatggctacaggcagtggcgcaccaatggcagacaataacgagggtgccgatggagtgggtaattcctcaggaaattggcattgcgattcccaatggttgggcgacagagtcatcaccaccagcacccgaacctgggccctgcccacctacaacaatcacctctacaagcaaatctccagccaatcaggagccagcaacgacaaccactactttggctacagcaccccctgggggtattttgacttcaacagattccactgccacttttcaccacgtgactggcaaagactcatcaacaacaactggggattccgacccaaaagactcaacttcaagctctttaacattcaagtcaaagaggtcacgcagaatgacggtacgacgacgattgccaataaccttaccagcacggttcaggtgtttactgactcggagtaccagctcccgtacgtcctcggctcggcgcatcaaggatgcctcccgccgtttccagcggacgtcttcatggtcccacagtatggatacctcaccctgaacaacgggagtcaggcggtaggacgctcttccttttactgcctggagtactttccttctcagatgcttcgtaccggaaacaactttaccttcagttacacctttgaagacgttcctttccacagcagctacgctcacagtcaaagtctggaccggctgatgaatcctctgatagaccagtacctgtattatctaaacaaaacacaatcaaatagtggaactcttcagcagtctcggctactgtttagtcaagctggacccaccagcatgtctcttcaagctaaaaactggctgcctggaccttgctacagacaacagcgtctgtcaaagcaggcaaacgacaacaacaacagcaactttccctggactgcggctacaaagtatcatctaaatggccgggactcgttggttaatccaggaccagctatggccagccacaaagacgatgaagaaaagtttttccccatgcatggaaccctgatatttggtaaacaaggaacaaatgctaacgacgcggatttggacaatgtcatgattacagatgaagaagaaatccgcaccaccaatcccgtggctacggagcagtacgggactgtgtcaaataatttgcaaaactcaaatactggtccaactactggaactgtcaatcaccaaggagcgttacctggtatggtgtggcaggatcgagacgtgtaccttcagggacccatttgggccaagattcctcacaccgatggacactttcatccttccccactgatgggaggttttggactcaaacacccgcctcctcagatcatgatcaaaaacactcccgttccagccaatcctcctacaaacttcagttctgccaagtttgcttctttcatcacacagtattccacggggcaggtcagcgtggggatagagtgggagctgcagaaggagaacagcaaacgctggaaccccgagatccagtatacttccaactacaacaagtctgttaatgtggactttactgtggacactaatggtgtgtattcagagcctcgccccattggcaccagatacctgactcgtaatctgtaa

SEQ ID NO: 3754 - DNA, 2205 bp, synthetic construct
  misc_feature 1..2205: note = source = /note="Description of Artificial Sequence: Synthetic polynucleotide"
  source 1..2205: mol_type = other DNA
atggctgccgatggttatcttccagattggctcgaggacattctctctgaaggaataagacagtggtggaagctcaaacctggcccaccaccaccaaagcccgcagagcggcataaggacgacagcaggggtcttgtgcttcctgggtacaagtacctcggacccttcaacggactcgacaaaggagagccggtcaacgaggcagacgccgcggccctcgagcacgacaaggcctacgaccggcagctcgacagcggagacaacccgtacctcaagtacaaccacgccgacgcggagtttcaggagcgtcttaaagaagatacgtcttttgggggcaacctcggacgagcagtcttccaggcaaaaaagagggttcttgaacctctgggcctggttgaggaacctgttaagacggctccgggaaaaaagaggccggtagagcaatctcctgcggagccagactcctcctcgggaaccggaaaggcgggcaaccagcctgcaagaaagagattgaattttggtcagactggagacgcagactccgtacctgacccccagcctctcggacagccaccagcagccccctctggtctgggatctactacaatggctacaggcagtggcgcaccaatggcagacaataacgagggtgccgatggagtgggtaattcctcaggaaattggcattgcgattcccaatggttgggcgacagagtcatcaccaccagcacccgaacctgggccctgcccacctacaacaatcacctctacaagcaaatctccagccaatcaggagccagcaacgacaaccactactttggctacagcaccccctgggggtattttgacttcaacagattccactgccacttttcaccacgtgactggcaaagactcatcaacaacaactggggattccgacccaaaagactcaacttcaagctctttaacattcaagtcaaagaggtcacgcagaatgacggtacgacgacgattgccaataaccttaccagcacggttcaggtgtttactgactcggagtaccagctcccgtacgtcctcggctcggcgcatcaaggatgcctcccgccgtttccagcggacgtcttcatggtcccacagtatggatacctcaccctgaacaacgggagtcaggcggtaggacgctcttccttttactgcctggagtactttccttctcagatgcttcgtaccggaaacaactttaccttcagttacacctttgaagacgttcctttccacagcagctacgctcacagtcaaagtctggaccggctgatgaatcctctgatagaccagtacctgtattatctaaacaaaacacaatcaaatagtggaactcttcagcagtctcggctactgtttagtcaagctggacccaccagcatgtctcttcaagctaaaaactggctgcctggaccttgctacagacaacagcgtctgtcaaagcaggcaaacgacaacaacagcaactttccctggactgcggctacaaagtatcatctaaatggccgggactcgttggttaatccaggaccagctatggccagccacaaagacgatgaagaaaagtttttccccatgcatggaaccctgatatttggtaaacaaggaacaaatgctaacgacgcggatttggacaatgtcatgattacagatgaagaagaaatccgcaccaccaatcccgtggctacggagcagtacgggactgtgtcaaataatttgcaaaactcaaatactggtccaactactggaactgtcaatcaccaaggagcgttacctggtatggtgtggcaggatcgagacgtgtaccttcagggacccatttgggccaagattcctcacaccgatggacactttcatccttctccactgatgggaggttttggactcaaacacccgcctcctcagatcatgatcaaaaacactcccgttccagccaatcctcctacaaacttcagttctgccaagtttgcttctttcatcacacagtattccacggggcaggtcagcgtggagatagagtgggagctgcagaaggagaacagcaaacgctggaaccccgagatccagtatacttccaactacaacaagtctgttaatgtggactttactgtggacactaatggtgtgtattcagagcctcgccccattggcaccagatacctgactcgtaatctgtaa

SEQ ID NO: 3755 - DNA, 2208 bp, synthetic construct
  misc_feature 1..2208: note = source = /note="Description of Artificial Sequence: Synthetic polynucleotide"
  source 1..2208: mol_type = other DNA
atggctgccgatggttatcttccagattggctcgaggacactctctctgaaggaataagacagtggtggaagctcaaacctggcccaccaccgccaaagcccgcagagcggcataaggacgacagcaggggtcttgtgcttcctgggtataagtacctcggacccttcaacggactcgacaagggagagccggtcaacgaggcagacgccgcggccctcgagcacgacaaggcctacgaccggcagctcgacagcggagacaacccgtacctcaagtacaaccacgccgacgcggagtttcaggagcgccttaaagaagatacgtcttttgggggcaacctcggacgagcagtattccaggcgaaaaagagggttcttgaacctctgggcctggttgtggagcctgttaagacggctccgggaaaaaagaggccggtagagcactctcctgtggagccagactcctcctcgggaaccggaaaagcgggccagcagcctgcgagaaagagattgaattttgatcagactggaggcgcagactccgtacctgacccccagcctctcggacagccaccagcagcccccacaagtttgggatctactacaatggctacaggcagtggcgcaccaatggcagacaataacgagggtgccgatggagtgggtaattcctcaggaaattggcattgcgattcccaatggtcgggcgacagagtcatcaccaccagcacccgaacctgggccctgcccacctacaacaaccacctctacaagcaaatctccagccgatcaggagccagcaacgacaaccactactttggctacagcaccccctgggggtattttgacttcaacggattccactgccacttttcaccacgtgactggcaaagactcatcaacaacaactggggattccgacccaagagactcaacttcaagctctttaacattcaagtcaaagaggtcacgcagaatgacggtacgacgacgattgccaataaccttaccagcacggttcaggtgtttactgactcggagtaccagctcccgcacgtcctcggctcggcgcatcaaggatgcctcccgccgtttccagcggacgtcttcatggtcccacagtatggatacctcaccctgaacaacgggagtcaggcggtaggacgctcttccttttactgcccggggtactttccttctcagatgcttcgtaccggaaacaactttaccttcagttacacctttgaagacgttcctttccacagcagctacgctcacagtcaaagtctggaccggctgatgaatcctcttatcgaccagtacctgtattatctaaacaaaacacaatcaaatagtggaactcttcagcagtctcggctactgtttagtcaagctggacctaccagcatgtctcttcaagctaaaaactggctgcctggaccttgctacagacaacagcgtctgtcaaagcaggcaaacggcaacaacaacagcaactttccctggactgcggctacaaagtatcatctaaatggccgggactcgttggttaatccaggaccagctatggccagccacaaagacgatgaagaaaagtttttccccatgcatggaaccctgatatttggcaaacaaggaacaaatgctaacgacgcggatttggacaatgtcatgattacagatgaagaagaaatccgtaccaccaatcccgtggctacggagcagtacgggactgtgtcaaataatttgcaaaactcaaatactggtccaactactggaactgtcaatcaccaaggagcgttacctggtatggtgtggcaggatcgagacgtgtaccttcagggacccatttgggccaagattcctcacaccgatggacactttcacccttctccgctgatgggaggttttggactcaaacacccgcctcctcagatcatgatcaaaaacactcccgttccagccaatcctcccacaaacttcagttctgccaagtttgcttctttcatcacacagtattccacgggacaggttagcgtggagatcgagtgggagctgcagaaggagaacagcaaacgctggaaccccgagatccagtacacttccaactacaacaagtctgttaatgtggactttactgtggacactaatggtgtgtattcagagcctcgccccattggcaccagatacctgactcgtaatctgtaa

SEQ ID NO: 3756 - DNA, 2205 bp, synthetic construct
  misc_feature 1..2205: note = source = /note="Description of Artificial Sequence: Synthetic polynucleotide"
  source 1..2205: mol_type = other DNA
atggctgccgatggttatcttccagattggctcgaggacactctctctgaaggaataagacagtggtggaagctcaaacctggcccaccaccgccaaagcccgcagagcggcataaggacgacagcaggggtcttgtgcttcctgggtacaagtacctcggacccttcaacggactcgacaagggagagccggtcaacgaggcagacgccgcggccctcgagcacgacaaggcctacgaccggcagctcgacagcggagacaacccgtacctcaagtacaaccacgccgacgcggagtttcaggagcgccttaaagaagatacgtcttttgggggcaacctcggacgagcagtattccaggcgaaaaagagggttcttgaacctctgggcctggttgaggagcctgttaagacggctccgggaaaaaagaggccggtagagcactctcctgtggagccagactcctcctcgggaaccggaaaagcgggccagcagcctgcgagaaagagattgaattttggtcagactggagacgcagactccgtacctgacccccagcctctcggacagccaccagcagcccccacaagtttgggatctactacaatggctacaggcagtggcgcaccaatggcagacaataacgagggtgccgatggagtgggtaattcctcaggaaattggcattgcgattcccaatggtcgggcgacagagtcatcaccaccagcacccgaacctgggccctgcccacctacaacaaccacctctacaagcaaatctccagccaatcaggagccagcaacgacaaccactactttggctacagcaccccctgggggtattttgacttcaacagattccactgccacttttcaccacgtgactggcaaagactcatcaacaacaactggggattccgacccaagagactcaacttcaagctctttaacattcaagtcaaagaggtcacgcagaatgacggtacgacgacgattgccaataaccttaccagcacggttcaggtgtttactgactcggagtaccagctcccgtacgtcctcggctcggcgcatcaaggatgcctcccgccgtttccagcggacgtcttcatggtcccacagtatggatacctcaccctgaacaacgggagtcaggcggtaggacgctcttccttttactgcctggagtactttccttctcagatgcttcgtaccggaaacaactttaccttcagttacacctttgaagacgttcctttccacagcagctacgctcacagtcaaagtctggaccggctgatgaatcctcttatcgaccagtacctgtattatctaaacaaaacacaatcaaatagtggaactcttcagcagtctcggctactgtttagtcaagctggacctaccagcatgtctcttcaagctaaaaactggctgcctggaccttgctacagacaacagcgtctgtcaaagcaggcaaacgacaacaacagcaactttccctggactgcggctacaaagtatcatctaaatggccgggactcgttggttaatccaggaccagctatggccagccacaaagacgatgaagaaaagtttttccccatgcatggaaccctgatatttggcaaacaaggaacaaatgctaacgacgcggatttggacaatgtcatgattacagatgaagaagaaatccgtaccaccaatcccgtggctacggagcagtacgggactgtgtcaaataatttgcaaaactcaaatactggtccaactactggaactgtcaatcaccaaggagcgttacctggtatggtgtggcaggatcgagacgtgtaccttcagggacccatttgggccaagattcctcacaccgatggacactttcacccttctccgctgatgggaggttttggactcaaacacccgcctcctcagatcatgatcaaaaacactcccgttccagccaatcctcccacaaacttcagttctgccaagtttgcttctttcatcacacagtattccacgggacaggttagcgtggagatcgagtgggagctgcagaaggagaacagcaaacgctggaaccccgagatccagtacacttccaactacaacaagtctgttaatgtggactttactgtggacactaatggtgtgtattcagagcctcgccccattggcaccagatacctgactcgtaatctgtaa

SEQ ID NO: 3757 - DNA, 2208 bp, synthetic construct
  misc_feature 1..2208: note = source = /note="Description of Artificial Sequence: Synthetic polynucleotide"
  source 1..2208: mol_type = other DNA
atggctgccgatggttatcttccagattggctcgaggacattctctctgaaggaataagacagtggtggaagctcaaacctggcccaccaccaccaaagcccgcagagcggcataaggacgacagcaggggtcttgtgcttcctgggtacaagtacctcggacccttcaacggactcgacaaaggagagccggtcaacgaggcagacgccgcggccctcgagcacgacaaggcctacgaccggcagctcgacagcggagacaacccgtacctcaagtacaaccacgccgacgcggagtttcaggagcgtcttaaagaagatacgtcttttgggggcaacctcggacgagcagtcttccaggcaaaaaagagggttcttgaacctctgggcctggttgaggaacctgttaagacggctccgggaaaaaagaggccggtagagcaatctcctgcggagccagactcctcctcgggaaccggaaaggcgggcaaccagcctgcaagaaagagattgaattttggtcagactggagacgcagactccgtacctgacccccagcctctcggacagccaccagcagccccctctggtctgggatctactacaatggctacaggcagtggcgcaccaatggcagacaataacgagggtgccgatggagtgggtaattcctcaggaaattggcattgcgattcccaatggttgggcgacagagtcatcaccaccagcacccgaacctgggccctgcccacctacaacaatcacctctacaagcaaatctccagccaatcaggagccagcaacgacaaccactactttggctacagcaccccctgggggtattttgacttcaacagattccactgccacttttcaccacgtgactggcaaagactcatcaacaacaactggggattccgacccaaaagactcaacttcaagctctttaacattcaagtcaaagaggtcacgcagaatgacggtacgacgacgattgccaataaccttaccagcacggttcaggtgtttactgactcggagtaccagctcccgtacgtcctcggctcggcgcatcaaggatgcctcccgccgtttccagcggacgtcttcatggtcccacagtatggatacctcaccctgaacaacgggagtcaggcggtaggacgctcttccttttactgcctggagtactttccttctcagatgcttcgtaccggaaacaactttaccttcagttacacctttgaagacgttcctttccacagcagctacgctcacagtcaaagtctggaccggctgatgaatcctctgatagaccagtacctgtattatctaaacaaaacacaatcaaatagtggaactcttcagcagtctcggctactgtttagtcaagctggacccaccagcatgtctcttcaagctaaaaactggctgcctggaccttgctacagacaacagcgtctgtcaaagcaggcaaacgacaacaacaacagcaactttccctggactgcggctacaaagtatcatctaaatggccgggactcgttggttaatccaggaccagctatggccagccacaaagacgatgaagaaaagtttttccccatgcatggaaccctgatatttggtaaacaaggaacaaatgctaacgacgcggatttggacaatgtcatgattacagatgaagaagaaatccgcaccaccaatcccgtggctacggagcagtacgggactgtgtcaaataatttgcaaaactcaaatactggtccaactactggaactgtcaatcaccaaggagcgttacctggtatggtgtggcaggatcgagacgtgtaccttcagggacccatttgggccaagattcctcacaccgatggacactttcatccttccccactgatgggaggttttggactcaaacacccgcctcctcagatcatgatcaaaaacactcccgttccagccaatcctcctacaaacttcagttctgccaagtttgcttctttcatcacacagtattccacggggcaggtcagcgtggggatagagtgggtgctgcagaaggagaacagcaaacgctggaaccccgagatccagtatacttccaactacaacaagtctgttaatgtggactttactgtggacactaatggtgtgtattcagagcctcgccccattggcaccagatacctgactcgtaatctgtaa

SEQ ID NO: 3758 - DNA, 2208 bp, synthetic construct
  misc_feature 1..2208: note = source = /note="Description of Artificial Sequence: Synthetic polynucleotide"
  source 1..2208: mol_type = other DNA
atggctgccgatggttatcttccagattggctcgaggacactctctctgaaggaataagacagtggtggaagctcaaacctggcccaccaccgccaaagcccgcagagcggcataaggacgacagcaggggtcttgtgcttcctgggtacaagtacctcggacccttcaacggactcgacaaaggagagccggtcaacgaggcagacgccgcggccctcgagcacgacaaggcctacgaccggcagctcgacagcggagacaacccgtacctcaagtacaaccacgccgacgcggagtttcaggagcgccttaaagaagatacgtcttttgggggcaacctcgcaagagcagtattccaggcgaaaaagagggttcttgaacctctgggcctggttgaggagcctgttaagacggctccgggaaaaaagaggccggtagagcaatctcctgcggagccagactcctcctcgggaaccggaaaggcgggcaaccagcctgcaagaaagagattgaattttggtcagactggagacgcagactccgtacctgacccccagcctctcggacagccaccagcagccccctctggtctgggatctactacaatggctacaggcagtggcgcaccaatggcagacaataacgagggtgccgatggagtgggtaattcctcaggaaattggcattgcgattcccaatggttgggcgacagagtcatcaccaccagcacccgaacctgggccctgcccacctacaacaatcacctctacaagcaaatctccagccaatcaggagccagcaacgacaaccactactttggctacagcaccccctgggggtattttgacttcaacagattccactgccacttttcaccacgtgactggcaaagactcatcaacaacaactggggattccgacccaaaagactcaacttcaagctctttaacattcaagtcaaagaggtcacgcagaatgacggtacgacgacgattgccaataaccttaccagcacggttcaggtgtttactgactcggagtaccagctcccgtacgtcctcggctcggcgcatcaaggatgcctcccgccgtttccagcggacgtcttcatggtcccacagtatggatacctcaccctgaacaacgggagtcaggcggtaggacgctcttccttttactgcctggagtactttccttctcagatgcttcgtaccggaaacaactttaccttcagttacacctttgaagacgttcctttccacagcagctacgctcacagtcaaagtctggaccggctgatgaatcctctgatagaccagtacctgtattatctaaacaaaacacaatcaaatagtggaactcttcagcagtctcggctactgtttagtcaagctggacccaccagcatgtctcttcaagctaaaaactggctgcctggaccttgctacagacaacagcgtctgtcaaagcaggcaaacgacaacaacaacagcaactttccctggactgcggctacaaagtatcatctaaatggccgggactcgttggttaatccaggaccagctatggccagccacaaagacgatgaagaaaagtttttccccatgcatggaaccctgatatttggtaaacaaggaacaaatgctaacgacgcggatttggacaatgtcatgattacagatgaagaagaaatccgcaccaccaatcccgtggctacggagcagtacgggactgtgtcaaataatttgcaaaactcaaatactggtccaactactggaactgtcaatcaccaaggagcgttacctggtatggtgtggcaggatcgagacgtgtaccttcagggacccatttgggccaagattcctcacaccgatggacactttcatccttctccactgatgggaggttttggactcaaacacccgcctcctcagatcatgatcaaaaacactcccgttccagccaatcctcctacaaacttcagttctgccaagtttgcttctttcatcacacagtattccacggggcaggtcagcgtggagatagagtgggagctgcagaaggagaacagcaaacgctggaaccccgagatccagtatacttccaactacaacaagtctgttaatgtggactttactgtggacactaatggtgtgtattcagagcctcgccccattggcaccagatacctgactcgtaatctgtaa

SEQ ID NO: 3759 - DNA, 2208 bp, synthetic construct
  misc_feature 1..2208: note = source = /note="Description of Artificial Sequence: Synthetic polynucleotide"
  source 1..2208: mol_type = other DNA
atggctgccgatggttatcttccagattggctcgaggacattctctctgaaggaataagacagtggtggaagctcaaacctggcccaccaccaccaaagcccgcagagcggcataaggacgacagcaggggtcttgtgcttcctgggtacaagtacctcggacccttcaacggactcgacaaaggagagccggtcaacgaggcagacgccgcggccctcgagcacgacaaggcctacgaccggcagctcgacagcggagacaacccgtacctcaagtacaaccacgccgacgcggagtttcaggagcgtcttaaagaagatacgtcttttgggggcaacctcggacgagcagtcttccaggcaaaaaagagggttcttgaacctctgggcctggttgaggaacctgttaagacggctccgggaaaaaagaggccggtagagcaatctcctgcggagccagactcctcctcgggagccggaaaggcgggcaaccagcctgcaagaaagagattgaattttggtcagactggagacgcagactccgtacctgacccccagcctctcggacagccaccagcagccccctctggtctgggatctactacaatggctacaggcagtggcgcaccaatggcagacaataacgagggtgccgatggagtgggtaattcctcaggaaattggcattgcgattcccaatggttgggcgacagagtcatcaccaccagcacccgaacctgggccctgcccacctacaacaatcacctctacaagcaaatctccagccaatcaggagccagcaacgacaaccactactttggctacagcaccccctgggggtattttgacttcaacagattccactgccacttttcaccacgtgactggcaaagactcatcaacaacaactggggattccgacccaaaagactcaacttcaagctctttaacattcaagtcaaagaggtcacgcagaatgacggtacgacgacgattgccaataaccttaccagcacggttcaggtgtttactgactcggagtaccagctcccgtacgtcctcggctcggcgcatcaaggatgcctcccgccgtttccagcggacgtcttcatggtcccacagtatggatacctcaccctgaacaacgggagtcaggcggtaggacgctcttccttttactgcctggagtactttccttctcagatgcttcgtaccggaaacaactttaccttcagttacacctttgaagacgttcctttccacagcagctacgctcacagtcaaagtctggaccggctgatgaatcctctgatagaccagtacctgtattatctaaacaaaacacaatcaaatagtggaactcttcagcagtctcggctactgtttagtcaagctggacccaccagcatgtctcttcaagctaaaaactggctgcctggaccttgctacagacaacagcgtctgtcaaagcaggcaaacgacaacaacaacagcaactttccctggactgcggctacaaagtatcatctaaatggccgggactcgttggttaatccaggaccagctatggccagccacaaagacgatgaagaaaagtttttccccatgcatggaaccctgatatttggtaaacaaggaacaaatgctaacgacgcggatttggacaatgtcatgattacagatgaagaagaaatccgcaccaccaatcccgtggctacggagcagtacgggactgtgtcaaataatttgcaaaactcaaatactggtccaactactggaactgtcaatcaccaaggagcgttacctggtatggtgtggcaggatcgagacgtgtaccttcagggacccatttgggccaagattcctcacaccgatggacactttcatccttctccactgatgggaggttttggactcaaacacccgcctcctcagatcatgatcaaaaacactcccgttccagccaatcctcctacaaacttcagttctgccaagtttgcttctttcatcacacagtattccacggggcaggtcagcgtggagatagagtgggagctgcagaaggagaacagcaaacgctggaaccccgagatccagtatacttccaactacaacaagtctgttaatgtggactttactgtggacactaatggtgtgtattcagagcctcgccccattggcaccagatacctgactcgtaatctgtaa

SEQ ID NO: 3760 - DNA, 2208 bp, synthetic construct
  misc_feature 1..2208: note = source = /note="Description of Artificial Sequence: Synthetic polynucleotide"
  source 1..2208: mol_type = other DNA
atggctgccgatggttatcttccagattggctcaaggacattctctctgaaggaataagacagtggtggaagctcaaacctggcccaccaccaccaaagcccgcagagcggcataaggacgacagcaggggtcttgtgcttcctgggtacaagtacctcggacccttcaacggactcgacaaaggagagccggtcaacgaggcagacgccgcggccctcgagcacgacaaggcctacgaccggcagctcgacagcggagacaacccgtacctcaagtacaaccacgccgacgcggagtttcaggagcgtcttaaagaagatacgtcttttgggggcaacctcggacgagcagtcttccaggcaaaaaagagggttcttgaacctctgggcctggttgaggaacctgttaagacggctccgggaaaaaagaggccggtagagcaatctcctgcggagccagactcctcctcgggaaccggaaaggcgggcaaccagcctgcaagaaagagattgaattttggtcagactggagacgcagactccgtacctgacccccagcctctcggacagccaccagcagccccctctggtctgggatctactacaatggctacaggcagtggcgcaccaatggcagacaataacgagggtgccgatggagtgggtaattcctcaggaaattggcatcgcgattcccaatggttgggcgacagagtcatcaccaccagcacccgaacctgggccctgcccacctacaacaatcacctctacaagcaaatctccagccaatcaggagccagcaacgacaaccactactttggctacagcaccccctgggggtattttgacttcaacagattccactgccacttttcaccacgtgactggcaaagactcatcaacaacaactggggattccgacccaaaagactcaacttcaagctctttaacattcaagtcaaagaggtcacgcagaatgacggtacgacgacgattgccaataaccttaccagcacggttcaggtgtttactgactcggagtaccagctcccgtacgtcctcggctcggcgcatcaaggatgcctcccgccgtttccagcggacgtcttcatggtcccacagtatggatacctcaccctgaacaacgggagtcaggcggtaggacgctcttccttttactgcctggagtactttccttctcagatgcttcgtaccggaaacaactttaccttcagttacacctttgaagacgttcctttccacagcagctacgctcacagtcaaagtctggaccggctgatgaatcctctgatagaccagtacctgtattatctaaacaaaacacaatcaaatagtggaactcttcagcagtctcggctactgtttagtcaagctggacccaccagcatgtctcttcaagctaaaaactggctgcctggaccttgctacagacaacagcgtctgtcaaagcaggcaaacgacaacaacaacagcaactttccctggactgcggctacaaagtatcatctaaatggccgggactcgttggttaatccaggaccagctatggccagccacaaagacgatgaagaaaagtttttccccatgcatggaaccctgatatttggtaaacaaggaacaaatgctaacgacgcggatttggacaatgtcatgattacagatgaagaagaaatccgcaccaccaatcccgtggctacggagcagtacgggactgtgtcaaataatttgcaaaactcaaatactggtccaactactggaactgtcaatcaccaaggagcgttacctggtatggtgtggcaggatcgagacgtgtaccttcagggacccatttgggccaagattcctcacaccgatggacactttcatccttctccactgatgggaggttttggactcaaacacccgcctcctcagatcatgatcaaaaacactcccgttccagtcaatcctcctacaaacttcagttctgccaagtttgcttctttcatcacacagtattccacggggcaggtcagcgtggagatagagtgggagctgcagaaggagaacagcaaacgctggaaccccgagatccagtatacttccaactacaacaagtctgttaatgtggactttactgtggacactaatggtgtgtattcagagcctcgccccattggcaccagatacctgactcgtaatctgtaa

SEQ ID NO: 3761 - DNA, 2208 bp, synthetic construct
  misc_feature 1..2208: note = source = /note="Description of Artificial Sequence: Synthetic polynucleotide"
  source 1..2208: mol_type = other DNA
atggctgccgatggttatcttccagattggctcgaggacattctctctgaaggaataagacggtggtggaagctcaaacctggcccaccaccaccaaagcccgcagagcggcataaggacgacagcaggggtcttgtgcttcctgggtacaagtacctcggacccttcaacggactcgacaaaggagagccggtcaacgaggcagacgccgcggccctcgagcacgacaaggcctacgaccggcagctcgacagcggagacaacccgtacctcaagtacaaccacgccgacgcagagtttcaggagcgtcttaaagaagatacgtcttttgggggcaacctcggacgagcagtcttccaggcaaaaaagagggttcttgaacctctgggcctggttgaggaacctgttaagacggctccgggaaaaaagaggccggtagagcaatctcctgcggagccagactcctcctcgggaaccggaaaggcgggcaaccagcctgcaagaaagagattgaattttggtcagactggagacgcagactccgtacctgacccccagcctctcggacagccaccagcagccccctctggtctgggatctactacaatggctacaggcagtggcgcaccaatggcagacaataacgagggtgccgatggagtgggtaattcctcaggaaattggcattgcgattcccaatggttgggcgacagagtcatcaccaccagcacccgaacctgggccctgcccacctacaacaatcacctctacaagcaaatctccagccaatcaggagccagcaacgacaaccactactttggctacagcaccccctgggggtattttgacttcaacagattccactgccacttttcaccacgtgactggcaaagactcatcaacaacaactggggattccgacccaaaagactcaacttcaagctctttaacattcaagtcaaagaggtcacgcagaatgacggtacgacgacgattgccaataaccttaccagcacggttcaggtgtttactgactcggagtaccagctcccgtacgtcctcggctcggcgcatcaaggatgcctcccgccgtttccagcggacgtcttcatggtcccacagtatggatacctcaccctgaacaacgggagtcaggcggtaggacgctcttccttttactgcctggagtactttccttctcagatgcttcgtaccggaaacaactttaccttcagttacacctttgaagacgttcctttccacagcagctacgctcacagtcaaagtctggaccggctgatgaatcctctgatagaccagtacctgtattatctaaacaaaacacaatcaaatagtggaactcttcagcagtctcggctactgtttagtcaagctggacccaccagcatgtctcttcaagctaaaaactggctgcctggaccttgctacagacaacagcgtctgtcaaagcaggcaaacgacaacaacaacagcaactttccctggactgcggctacaaagtatcatctaaatggccgggactcgttggttaatccaggaccagctatggccagccacaaagacgatgaagaaaagtttttccccatgcatggaaccctgatatttggtaaacaaggaacaaatgctaacgacgcggatttggacaatgtcatgattacagatgaagaagaaatccgcaccaccaatcccgtggctacggagcggtacgggactgtgtcaaataatttgcaaaactcaaatactggtccaactactggaactgtcaatcaccaaggagcgttacctggtatggtgtggcaggatcgagacgtgtaccttcagggacccatttgggccaagattcctcacaccgatggacactttcatccttctccactgatgggaggttttggactcaaacacccgcctcctcagatcatgatcaaaaacactcccgttccagccaatcctcctacaaacttcagttctgccaagtttgcttctttcatcacacagtattccacggggcaggtcagcgtggagatagagtgggagctgcagaaggagaacagcaaacgctggaaccccgagatccagtatacttccaactacaacaagtctgttaatgtggactttactgtggacactaatggtgtgtattcagagcctcgccccattggcaccagatacctgactcgtaatctgtaa

SEQ ID NO: 3762 - DNA, 2208 bp, synthetic construct
  misc_feature 1..2208: note = source = /note="Description of Artificial Sequence: Synthetic polynucleotide"
  source 1..2208: mol_type = other DNA
atggctgccgatggttatcttccagattggctcgaggacactctctctgaaggaataagacagtggtggaagctcaaacctggcccaccaccgccaaagcccgcagagcggcataaggacgacagcaggggtcttgtgcttcctgggtacaagtacctcggacccttcaacggactcgacaaaggagagccggtcaacgaggcagacgccgcggccctcgagcacgacaaggcctacgaccggcagctcgacagcggagacaacccgtacctcaagtacaaccacgccgacgcggagtttcaggagcgccttaaagaagatacgtcttttgggggcaacctcgcaagagcagtattccaggcgaaaaagagggttcttgaacctctgggcctggttgaggagcctgttaagacggctccgggaaaaaagaggccggtagagcactctcctgcggagccagattcctcctccggaactggaaagtcgggccaacagcctgcaagaaagagattgaattttggtcagactggagacgcagactccgtacctgacccccagcctctcggacagccaccagcagccccctctggtctgggaactaatacgatggcttcaggcagtggcgcaccaatggcagacaataacgagggcgccgacggagtgggtaattcctcaggaaattggcattgcgattcccaatggttgggcgacagagtcatcaccaccagcacccgaacctgggccctgcccacctacaacaatcacctctacaagcaaatctccagccaatcaggagccagcaacgacaaccactactttggctacagcaccccctgggggtattttgacttcaacagattccactgccacttttcaccacgtgactggcaaagactcatcaacaacaactggggattccgacccaaaagactcaacttcaagctctttaacattcaagtcaaagaggtcacgcagaatgacggtacgacgacgattgccaataaccttaccagcacggttcaggtgtttactgactcggagtaccagctcccgtacgtcctcggctcggcgcatcaaggatgcctcccgccgtttccagcggacgtcttcatggtcccacagtatggatacctcaccctgaacaacgggagtcaggcggtaggacgctcttccttttactgcctggagtactttccttctcagatgcttcgtaccggaaacaactttaccttcagttacacctttgaagacgttcctttccacagcagctacgctcacagtcaaagtctggaccggctgatgaatcctctgatagaccagtacctgtattatctaaacaaaacacaatcaaatagtggaactcttcagcagtctcggctactgtttagtcaagctggacccaccagcatgtctcttcaagctaaaaactggctgcctggaccttgctacagacaacagcgtctgtcaaagcaggcaaacgacaacaacaacagcaactttccctggactgcggctacaaagtatcatctaaatggccgggactcgttggttaatccaggaccagctatggccagccacaaagacgatgaagaaaagtttttccccatgcatggaaccctgatatttggtaaacaaggaacaaatgctaacgacgcggatttggacaatgtcatgattacagatgaagaagaaatccgcaccaccaatcccgtggctacggagcagtacgggactgtgtcaaataatttgcaaaactcaaatactggtccaactactggaactgtcaatcaccaaggagcgttacctggtatggtgtggcaggatcgagacgtgtaccttcagggacccatttgggccaagattcctcacaccgatggacactttcatccttctccactgatgggaggttttggactcaaacacccgcctcctcagatcatgatcaaaaacactcccgttccagccaatcctcctacaaacttcagttctgccaagtttgcttctttcatcacacagtattccacggggcaggtcagcgtggagatagagtgggagctgcagaaggagaacagcaaacgctggaaccccgagatccagtatacttccaactacaacaagtctgttaatgtggactttactgtggacactaatggtgtgtattcagagcctcgccccattggcaccagatacctgactcgtaatctgtaa

SEQ ID NO: 3763 - DNA, 2208 bp, synthetic construct
  misc_feature 1..2208: note = source = /note="Description of Artificial Sequence: Synthetic polynucleotide"
  source 1..2208: mol_type = other DNA
atggctgccgatggttatcttccagattggctcgaggacactctctctgaaggaataagacagtggtggaagctcaaacctggcccaccaccgccaaagcccgcagagcggcataaggacgacagcaggggtcttgtgcttcctgggtacaagtacctcggacccttcaacggactcgacaaaggagagccggtcaacgaggcagacgccgcggccctcgagcacgacaaggcctacgaccggcagctcgacagcggagacaacccgtacctcaagtacaaccacgccgacgcggagtttcaggagcgccttaaagaagatacgtcttttgggggcaacctcgcaagagcagtattccaggcgaaaaagagggttcttgaacctctgggcctggttgaggagcctgttaagacggctccgggaaaaaagaggccggtagagcactctcctgcggagccagattcctcctccggaactggaaagtcgggccaacagcctgcaagaaagagattgaattttggtcagactggagacgcagactccgtacctgacccccagcctctcggacagccaccagcagccccctctggtctgggaactaatacgatggcttcaggcagtggcgcaccaatggcagacaataacgagggcgccgacggagtgggtaattcctcgggaaattggcattgcgattccacatggatgggcgacagagtcatcaccaccagcacccgcacctgggctctgcccacctacaacaaccatctgtacaagcaaatttccagccagtctggagccagcaacgacaaccactacttcggctacagcacccccttggggtattttgacttcaacagattccactgccacttctccccacgtgactggcaaagactcatcaacaacaattggggattccggcccaaaagactcaacttcaagctctttaacattcaagtcaaagaggtcacgcagaatgacggtacgacgacgattgccaataaccttaccagcacggttcaggtgtttactgactcggagtaccagctcccgtacgtcctcggctcggcgcatcaaggatgcctcccgccgtttccagcggacgtcttcatggtcccacagtatggatacctcaccctgaacaacgggagtcaggcggtaggacgctcttccttttactgcctggagtactttccttctcagatgcttcgtaccggaaacaactttaccttcagttacacctttgaagacgttcctttccacagcagctacgctcacagtcaaagtctggaccggctgatgaatcctctgatagaccagtacctgtattatctaaacaaaacacaatcaaatagtggaactcttcagcagtctcggctactgtttagtcaagctggacccaccagcatgtctcttcaagctaaaaactggctgcctggaccttgctacagacaacagcgtctgtcaaagcaggcaaacgacaacaacaacagcaactttccctggactgcggctacaaagtatcatctaaatggccgggactcgttggttaatccaggaccagctatggccagccacaaagacgatgaagaaaagtttttccccatgcatggaaccctgatatttggtaaacaaggaacaaatgctaacgacgcggatttggacaatgtcatgattacagatgaagaagaaatccgcaccaccaatcccgtggctacggagcagtacgggactgtgtcaaataatttgcaaaactcaaatactggtccaactactggaactgtcaatcaccaaggagcgttacctggtatggtgtggcaggatcgagacgtgtaccttcagggacccatttgggccaagattcctcacaccgatggacactttcatccttctccactgatgggaggttttggactcaaacacccgcctcctcagatcatgatcaaaaacactcccgttccagccaatcctcctacaaacttcagttctgccaagtttgcttctttcatcacacagtattccacggggcaggtcagcgtggagatagagtgggagctgcagaaggagaacagcaaacgctggaaccccgagatccagtatacttccaactacaacaagtctgttaatgtggactttactgtggacactaatggtgtgtattcagagcctcgccccattggcaccagatacctgactcgtaatctgtaa

SEQ ID NO: 3764 - DNA, 2208 bp, synthetic construct
  misc_feature 1..2208: note = source = /note="Description of Artificial Sequence: Synthetic polynucleotide"
  source 1..2208: mol_type = other DNA
atggctgccgatggttatcttccagattggctcgaggacactctctctgaaggaataagacagtggtggaagctcaaacctggcccaccaccgccaaagcccgcagagcggcataaggacgacagcaggggtcttgtgcttcctgggtacaagtacctcggacccttcaacggactcgacaaaggagagccggtcaacgaggcagacgccgcggccctcgagcacgacaaggcctacgaccggcagctcgacagcggagacaacccgtacctcaagtacaaccacgccgacgcggagtttcaggagcgccttaaagaagatacgtcttttgggggcaacctcgcaagagcagtattccaggcgaaaaagagggttcttgaacctctgggcctggttgaggagcctgttaagacggctccgggaaaaaagaggccggtagagcactctcctgcggagccagattcctcctccggaactggaaagtcgggccaacagcctgcaagaaagagattgaattttggtcagactggagacgcagactccgtacctgacccccagcctctcggacagccaccagcagccccctctggtctgggaactaatacgatggcttcaggcagtggcgcaccaatggcagacaataacgagggcgccgacggagtgggtaattcctcgggaaattggcattgcgattccacatggatgggcgacagagtcatcaccaccagcacccgcacctgggctctgcccacctacaacaaccatctgtacaagcaaatttccagccagtctggagccagcaacgacaaccactacttcggctacagcaccccttgggggtattttgacttcaacagattccactgccacttctccccacgtgactggcaaagactcatcaacaacaactggggattccgacccaaaagactcaacttcaagctctttaacattcaagtcaaagaggtcacgcagaatgacggtacgacgacgattgccaataaccttaccagcacggttcaggtgtttactgactcggagtaccagctcccgtacgtcctcggctcggcgcatcaaggatgcctcccgccgtttccagcggacgtcttcatggtcccacagtatggatacctcaccctgaacaacgggagtcaggcggtaggacgctcttccttttactgcctggagtactttccttctcagatgcttcgtaccggaaacaactttaccttcagttacacctttgaagacgttcctttccacagcagctacgctcacagtcaaagtctggaccggctgatgaatcctctgatagaccagtacctgtattatctaaacaaaacacaatcaaatagtggaactcttcagcagtctcggctactgtttagtcaagctggacccaccagcatgtctcttcaagctaaaaactggctgcctggaccttgctacagacaacagcgtctgtcaaagcaggcaaacgacaacaacaacagcaactttccctggactgcggctacaaagtatcatctaaatggccgggactcgttggttaatccaggaccagctatggccagccacaaagacgatgaagaaaagtttttccccatgcatggaaccctgatatttggtaaacaaggaacaaatgctaacgacgcggatttggacaatgtcatgattacagatgaagaagaaatccgcaccaccaatcccgtggctacggagcagtacgggactgtgtcaaataatttgcaaaactcaaatactggtccaactactggaactgtcaatcaccaaggagcgttacctggtatggtgtggcaggatcgagacgtgtaccttcagggacccatttgggccaagattcctcacaccgatggacactttcatccttctccactgatgggaggttttggactcaaacacccgcctcctcagatcatgatcaaaaacactcccgttccagccaatcctcctacaaacttcagttctgccaagtttgcttctttcatcacacagtattccacggggcaggtcagcgtggagatagagtgggagctgcagaaggagaacagcaaacgctggaaccccgagatccagtatacttccaactacaacaagtctgttaatgtggactttactgtggacactaatggtgtgtattcagagcctcgccccattggcaccagatacctgactcgtaatctgtaa

SEQ ID NO: 3765 - DNA, 2208 bp, synthetic construct
  misc_feature 1..2208: note = source = /note="Description of Artificial Sequence: Synthetic polynucleotide"
  source 1..2208: mol_type = other DNA
atggctgccgatggttatcttccagattggctcgaggacactctctctgaaggaataagacagtggtggaagctcaaacctggcccaccaccgccaaagcccgcagagcggcataaggacgacagcaggggtcttgtgcttcctgggtataagtacctcggacccttcaacggactcgacaagggagagccggtcaacgaggcagacgccgcggccctcgagcacgacaaggcctacgaccggcagctcgacagcggagacaacccgtacctcaagtacaaccacgccgacgcggagtttcaggagcgccttaaagaagatacgtcttttgggggcaacctcggacgagcagtattccaggcgaaaaagagggttcttgaacctctgggcctggttgtggagcctgttaagacggctccgggaaaaaagaggccggtagagcactctcctgtggagccagactcctcctcgggaaccggaaaagcgggccagcagcctgcgagaaagagattgaattttgatcagactggagacgcagactccgtacctgacccccagcctctcggacagccaccagcagcccccacaagtttgggatctactacaatggctacaggcagtggcgcaccaatggcagacaataacgagggtgccgatggagtgggtaattcctcaggaaattggcattgcgattcccaatggtcgggcgacagagtcatcaccaccagcacccgaacctgggccctgcccacctacaacaaccacctctacaagcaaatctccagccgatcaggagccagcaacgacaaccactactttggctacagcaccccctgggggtattttgacttcaacggattccactgccacttttcaccacgtgactggcaaagactcatcaacaacaactggggattccgacccaagagactcaacttcaagctctttaacattcaagtcaaagaggtcacgcagaatgacggtacgacgacgattgccaataaccttaccagcacggttcaggtgtttactgactcggagtaccagctcccgcacgtcctcggctcggcgcatcaaggatgcctcccgccgtttccagcggacgtcttcatggtcccacagtatggatacctcaccctgaacaacgggagtcaggcggtaggacgctcttccttttactgcccggggtactttccttctcagatgcttcgtaccggaaacaactttaccttcagttacacctttgaagacgttcctttccacagcagctacgctcacagtcaaagtctggaccggctgatgaatcctcttatcgaccagtacctgtattatctaaacaaaacacaatcaaatagtggaactcttcagcagtctcggctactgtttagtcaagctggacctaccagcatgtctcttcaagctaaaaactggctgcctggaccttgctacagacaacagcgtctgtcaaagcaggcaaacggcaacaacaacagcaactttccctggactgcggctacaaagtatcatctaaatggccgggactcgttggttaatccaggaccagctatggccagccacaaagacgatgaagaaaagtttttccccatgcatggaaccctgatatttggcaaacaaggaacaaatgctaacgacgcggatttggacaatgtcatgattacagatgaagaagaaatccgtaccaccaatcccgtggctacggagcagtacgggactgtgtcaaataatttgcaaaactcaaatactggtccaactactggaactgtcaatcaccaaggagcgttacctggtatggtgtggcaggatcgagacgtgtaccttcagggacccatttgggccaagattcctcacaccgatggacactttcacccttctccgctgatgggaggttttggactcaaacacccgcctcctcagatcatgatcaaaaacactcccgttccagccaatcctcccacaaacttcagttctgccaagtttgcttctttcatcacacagtattccacgggacaggttagcgtggagatcgagtgggagctgcagaaggagaacagcaaacgctggaaccccgagatccagtacacttccaactacaacaagtctgttaatgtggactttactgtggacactaatggtgtgtattcagagcctcgccccattggcaccagatacctgactcgtaatctgtaa

SEQ ID NO: 3766 - DNA, 2208 bp, synthetic construct
  misc_feature 1..2208: note = source = /note="Description of Artificial Sequence: Synthetic polynucleotide"
  source 1..2208: mol_type = other DNA
atggctgccgatggttatcttccagattggctcgaggacattctctctgaaggaataagacagtggtggaagctcaaacctggcccaccaccaccaaagcccgcagagcggcataaggacgacagcaggggtcttgtgcttcctgggtacaagtacctcggacccttcaacggactcgacaaaggagagccggtcaacgaggcagacgccgcggccctcgagcacgacaaggcctacgaccggcagctcgacagcggagacaacccgtacctcaagtacaaccacgccgacgcggagtttcaggggcgtcttaaagaagatacgtcttttgggggcaacctcggacgagcagtcttccaggcaaaaaagagggttcttgaacctctgggcctggttgaggaacctgttaagacggctccgggaaaaaagaggccggtagagcaatctcctgcggagccagactcctcctcgggaaccggaaaggcgggcaaccagcctgcaagaaagagattgaattttggtcagactggagacgcagactccgtacctgacccccagcctctcggacagccaccagcagccccctctggtctgggatctactacaatggctacaggcagtggcgcaccaatggcagacaataacgagggtgccgatggagtgggtaattcctcaggaaattggcattgcgattcccaatggttgggcgacagagtcatcaccaccagcacccgaacctgggccctgcccacctacaacaatcacctctacaagcaaatctccagccaatcaggagccagcaacgacaaccactactttggctacagcaccccctgggggtattttgacttcaacagattccactgccacttttcaccacgtgactggcaaagactcatcaacaacaactggggattccgacccaaaagactcaacttcaagctctttaacattcaagtcaaagaggtcacgcagaatgacggtacgacgacgattgccaataaccttaccagcacggttcaggtgtttactgactcggagtaccagctcccgtacgtcctcggctcggcgcatcaaggatgcctcccgccgtttccagcggacgtcttcatggtcccacagtatggatacctcaccctgaacaacgggagtcaggcggtaggacgctcttccttttactgcctggagtactttccttctcagatgcttcgtaccggaaacaactttaccttcagttacacctttgaagacgttcctttccacagcagctacgctcacagtcaaagtctggaccggctgatgaatcctctgatagaccagtacctgtattatctaaacaaaacacaatcaaatagtggaactcttcagcagtctcggctactgtttagtcaagctggacccaccagcatgtctcttcaagctaaaaactggctgcctggaccttgctacagacaacagcgtctgtcaaagcaggcaaacgacaacaacaacagcaactttccctggactgcggctacaaagtatcatctaaatggccgggactcgttggttaatccaggaccagctatggccagccacaaagacgatgaagaaaagtttttccccatgcatggaaccctgatatttggtaaacaaggaacaaatgctaacgacgcggatttggacaatgtcatgattacagatgaagaagaaatccgcaccaccaatcccgtggctacggagcagtacgggactgtgtcaaataatttgcaaaactcaaatactggtccaactactggaactgtcaatcaccaaggagcgttacctggtatggtgtggcaggatcgagacgtgtaccttcagggacccatttgggccaagattcctcacaccgatggacactttcatccttctccactgatgggaggttttggactcaaacacccgcctcctcagatcatgatcaaaaacactcccgttccagccaatcctcctacaaacttcagttctgccaagtttgcttctttcatcacacagtattccacggggcaggtcagcgtggagatagagtgggagctgcagaaggagaacagcaaacgctggaaccccgagatccagtatacttccaactacaacaagtctgttaatgtggactttactgtggacactaatggtgtgtattcagagcctcgccccattggcaccagatacctgactcgtaatctgtaa

SEQ ID NO: 3767 - DNA, 2208 bp, synthetic construct
  misc_feature 1..2208: note = source = /note="Description of Artificial Sequence: Synthetic polynucleotide"
  source 1..2208: mol_type = other DNA
atggctgccgatggttatcttccagattggctcgaggacattctctctgaaggaataagacagtggtggaagctcaaacctggcccaccaccaccaaagcccgcagagcggcataaggacgacagcaggggtcttgtgcttcctgggtacaagtacctcggacccttcaacggactcgacaaaggagagccggtcaacgaggcagacgccgcggccctcgagcacgacaaggcctacgaccggcagctcgacagcggagacaacccgtacctcaagtacaaccacgccgacgcggagtttcaggagcgtcttaaagaagatacgtcttttgggggcaacctcggacgagcagtcttccaggcaaaaaagagggctcttgaacctctgggcctggttgaggaacctgttaagacggctccgggaaaaaagaggccggtagagcaatctcctgcggagccagactcctcctcgggaaccggaaaggcgggcaaccagcctgcaagaaagagatcgaattttggtcagactggagacgcagactccgtacctgacccccagcctctcggacagccaccagcagccccctctggtctgggatctactacaatggctacaggcagtggcgcaccaatggcagacaataacgagggtgccgatggagtgggtaattcctcaggaaattggcattgcgattcccaatggttgggcgacagagtcatcaccaccagcacccgaacctgggccctgcccacctacaacaatcacctctacaagcaaatctccagccaatcaggagccagcaacgacaaccactactttggctacagcaccccctgggggtattttgacttcaacagattccactgccacttttcaccacgtgactggcaaagactcatcaacaacaactggggattccgacccaaaagactcaacttcaagctctttaacattcaagtcaaagaggtcacgcagaatgacggtacgacgacgattgccaataaccttaccagcacggttcaggtgtttactgactcggagtaccagctcccgtacgtcctcggctcggcgcatcaaggatgcctcccgccgtttccagcggacgtcttcatggtcccacagtatggatacctcaccctgaacaacggaagtcaggcggtaggacgctcttccttttactgcctggagtactttccttctcagatgcttcgtaccggaaacaactttaccttcagttacacctttgaagacgttcctttccacagcagctacgctcacagtcaaagtctggaccggctgatgaatcctctgataggccagtacctgtattatctaaacaaaacacaatcaaatagtggaactcttcagcagtctcggctactgtttagtcaagctggacccaccagcatgtctcttcaagctaaaaactggctgcctggaccttgctacagacaacagcgtctgtcaaagcaggcaaacgacaacaacaacagcaactttccctggactgcggctacaaagtatcatctaaatggccgggactcgttggttaatccaggaccagctatggccagccacaaagacgatgaagaaaagtttttccccatgcatggaaccctgatatttggtaaacaaggaacaaatgctaacgacgcggatttggacaatgtcatgattacagatgaagaagaaatccgcaccaccaatcccgtggctacggagcagtacgggactgtgtcaaataatttgcaaaactcaaatactggtccaactactggaactgtcaatcaccaaggagcgttacctggtatggtgtggcaggatcgagacgtgtaccttcagggacccatttgggccaagattcctcacaccgatggacactttcatccttctccactgatgggaggttttggactcaaacacccgcctcctcagatcatgatcaaaaacactcccgttccagccaatcctcctacaaacttcagttctgccaagtttgcttctttcatcacacagtattccacggggcaggtcagcgtggagatagagtgggagctgcagaaggagaacagcaaacgctggaaccccgagatccagtatacttccaactacaacaagtctgttaatgtggactttactgtggacactaatggtgtgtattcagagcctcgccccattggcaccagatacctgactcgtaatctgtaa

SEQ ID NO: 3768 - DNA, 2217 bp, synthetic construct
  misc_feature 1..2217: note = source = /note="Description of Artificial Sequence: Synthetic polynucleotide"
  source 1..2217: mol_type = other DNA
atggctgccgatggttatctcccagattggctcgaggacaacctctctgagggcattcgcgagtggtgggcactgaaacctggagccccgaagcccaaagccaaccagcaaaagcaggacgacggccggggtctggtgcttcctggctacaagtacctcggacccttcaacggactcgacaagggggagcccgtcaacgcggcggacgcggcggccctcgagcacgacaaggcctacgaccagcagctgcaggcgggtgacaatccgtacctgcggtataaccacgccgacgccgagtttcaggagcgtctgcaagaagatacgtcttttgggggcaacctcgggcgagcagtcttccaggccaagaagcgggttctcgaacctctcggtctggttgaggaaggcgctaagacggctcctggaaaggagagaccggtagagccatcaccccagcgttctccagactcctctacgggcatcggcaaggaaggccaacagcctgccagaaaaagactcaattttggtcagactggcgactcagagtcagttccagaccctcaacctctcggagaacctccagcagcgccctctggtgtgggacctaatacaatggctgcaggcggtggcgcaccaatggcagacaataacgaaggcgccgacggagtgggtagttcctcgggaaattggcattgcgattccacatggctgggcgacagagtcatcaccaccagcacccgaacctgggccctgcccacctacaacaaccacctctacaagcaaatctccaacgggacatcgggaggagccaccaacgacaacacctacttcggctacagcaccccctgggggtattttgactttaacagattccactgccacttttcaccacgtgactggcagcgactcatcaacaacaactggggattccggcccaagagactcagcttcaagctcttcaacatccaggtcaaggaggtcacgcagaatgaaggcaccaagaccaccgccaataacctcaccagcaccatccaggtgtttacggactcggagtaccagctgccgtacgttctcggctctgcccaccagggctgcctgcctccgttcccggcggacgtgttcacgattccccagtacggctacctaacactcaacaacggtagtcaggccgtgggacgctcctccttctactgcctggaatactttccttcgcagatgctgagaaccggcaacaacttccagtttacttacaccttcgaggacgtgcctttccacagcagctacgcccacagccagagcttggaccggctgatgaatcctctgattgaccagtacctgtactacttgtctcggattcaaacaacaggaggcacggcaaatacgcagactctgggcttcagccaaggtgggcctaatacaatggccaatcaggcaaagaactggctgccaggaccctgttaccgccaacaacgcgtctcaacgacaaccgggcaaaacaacaatagcaactttgcctggactgctgggaccaaataccatctgaatggaagaaattcattggctaatcctggcatcgctatggcaacacacaaagacgacgaggagcgtttttttcccagtaacgggatcctgatttttggcaaacaaaatgctgccagagacaatgcggattacagcgatgtcatgcccaccagcgaggaagaaatcaaaaccactaaccctgtggccacagaggaatacggtatcgtggcagataacttgcagcagcaaaacacggctcctcaaattggaactgtcaacagccagggggccttacccggtatggtctggcagaaccgggacgtgtacctgcagggtcccatctgggccaagattcctcacacggacggcaacttccacccgtctccgctgatgggcggctttggcctgaaacatcctccgcctcagatcctgatcaagaacacgcctgtacctgcggatcctccgaccaccttcaaccagtcaaagctgaactctttcatcacgcaatacagcaccggacaggtcagcgtggaaattgaatgggagctgcagaaggaaaacagcaagcgctggaaccccgagatccagtacacctccaactactacaaatctacaagtgtggactttgctgttaatacagaaggcgtgtactctgaaccccgccccattggcacccgttacctcactcgtaatctgtaa

SEQ ID NO: 3769 - DNA, 2217 bp, synthetic construct
  misc_feature 1..2217: note = source = /note="Description of Artificial Sequence: Synthetic polynucleotide"
  source 1..2217: mol_type = other DNA
atggctgccgatggttatcttccagattggctcgaggacaacctctctgagggcattcgcgagtggtgggcgctgaaacctggagccccgaagcccaaagccaaccagcaaaagcaggacgacggccggggtctggtgcttcctggctacaagtacctcggacccttcaacggactcgacaagggggagcccgtcaacgcggcggacgcggcggccctcgagcacgacaaggcctacgaccagcagctgcaggcgggtgacaatccgtacctgcggtataaccacgccgacgccgagtttcaggagcgtctgcaagaagatacgtcttttgggggcaacctcgggcgagcagtcttccaggccaagaagcgggttctcgaacctctcggtctggttgaggaaggcgctaagacggctcctggaaagaagagaccggtagagccatcaccccagcgttctccagactcctctacgggcatcggcaaggggggccaacagcccgccagaaaaagactcaattttggtcagactggcgactcagagtcagttccagaccctcaacctctcggagaacctccagcagcgccctctggtgtgggacctaatacaatggctgcaggcggtggcgcaccaatggcagacaataacgaaggcgccgacggagtgggtagttcctcgggaaattggcattgcgattccacatggctgggcgacagagtcatcaccaccagcacccgaacctgggccctgcccacctacaacaaccacctctacaagcaaatctccaacgggacatcgggaggagccaccaacgacaacacctacttcggctacagcaccccctgggggtattttgactttaacagattccactgccacttttcaccacgtgactggcagcgactcatcaacaacaactggggattccggcccaagagactcagcttcaagctcttcaacatccaggtcaaggaggtcacgcagaatgaaggcaccaagaccatcgccaataacctcaccagcaccatccaggtgtttacggactcggagtaccagctgccgtacgttctcggctctgcccaccagggctgcctgcctccgttcccggcggacgtgttcacgattccccagtacggctacctaacactcaacaacggtagtcaggccgtgggacgctcctccttctactgcctggaatactttccttcgcagatgctgagaaccggcaacaacttccagtttacttacaccttcgaggacgtgcctttccacagcagctacgcccacagccagagcttggaccggctgatgaatcctctgattgaccagtacctgtactacttgtctcggattcaaacaacaggaggcacggcaaatacgcagactctgggcttcagccaaggtgggcctaatacaatggccaatcaggcaaagaactggctgccaggaccctgttaccgccaacaacgcgtctcaacgacaaccgggcaaaacaacaatagcaactttgcctggactgctgggaccaaataccatctgaatggaagaaattcattggctaatcctggcatcgctatggcaacacacaaagacgacgaggagcgtttttttcccagtaacgggatcctgatttttggcaaacaaaatgctgccagagacaatgcggattacagcgatgtcatgcccaccagcgaggaagaaatcaaaaccactaaccctgtggccacagaggaatacggtatcgtggcagataacttgcagcagcaaaacacggctcctcaaattggaactgtcaacagccagggggccttacccggtatggtctggcagaaccgggacgtgtacctgcagggtcccatctgggccaagattcctcacacggacggcaacttccacccgtctccgctgatgggcggctttggcctgaaacatcctccgcctcagatcctgatcaagaacacgcctgtacctgcggatcctccgaccaccttcaaccagtcaaagctgaactctttcatcacgcaatacagtaccggacaggtcagcgtggaaattgaatgggagctgcagaaggaaaacagcaagcgctggaaccccgagatccagtacacctccaactactacaaatctacaagtgtggactttgctgttaatacagaaggcgtgtactctgaaccccgccccattggcacccgttacctcacccgtaatctgtaa

SEQ ID NO: 3770 - DNA, 2217 bp, synthetic construct
  misc_feature 1..2217: note = source = /note="Description of Artificial Sequence: Synthetic polynucleotide"
  source 1..2217: mol_type = other DNA
atggctgccgatggttatctcccagattggctcgaggacaacctctctgagggcattcgcgagtggtgggcactgaaacctggagccccgaagcccaaagccaaccagcaaaagcaggacgacggccggggtctggtgcttcctggctacaagtacctcggacccttcaacggactcgacaagggggagcccgtcaacgcggcggacgcggcggccctcgagcacgacaaggcctacgaccagcagctgcaggcgggtgacaatccgtacctgcggtataaccacgccgacgccgagtttcaggagcgtctgcaagaagatacgtcttttgggggcaacctcgggcgagcagtcttccaggccaagaagcgggttctcgaacctctcggtctggttgaggaaggcgctaagacggctcctggaaaggagagaccggtagagccatcaccccagcgttctccagactcctctacgggcatcggcaagaagggccaacagcctgccagaaaaagactcaattttggtcagactggcgactcagagtcagttccagaccctcaacctctcggagaacctccagcagcgccctctggtgtgggacctaatacaatggctgcaggcggtggcgcaccaatggcagacaataacgaaggcgccgacggagtgggtagttcctcgggaaattggcattgcgattccacatggctgggcgacagagtcatcaccaccagcacccgaacctgggccctgcccacctacaacaaccacctctacaagcaaatctccaacgggacatcgggaggagccaccaacgacaacacctacttcggctacagcaccccctgggggtattttgactttaacagattccactgccacttttcaccacgtgactggcagcgactcatcaacaacaactggggattccggcccaagagactcagcttcaagctcttcaacatccaggtcaaggaggtcacgcagaatgaaggcaccaagaccaccgccaataacctcaccagcaccatccaggtgtttacggactcggagtaccagctgccgtacgttctcggctctgcccaccagggctgcctgcctccgttcccggcggacgtgttcacgattccccagtacggctacctaacactcaacaacggtagtcaggccgtgggacgctcctccttctactgcctggaatactttccttcgcagatgctgagaaccggcaacaacttccagtttacttacaccttcgaggacgcgcctttccacagcagctacgcccacagccagagcttggaccggctgatgaatcctctgattgaccagtacctgtactacttgtctcggattcaaacaacaggaggcacggcaaatacgcagactctgggcttcagccaaggtgggcctaatacaatggccaatcaggcaaagaactggctgccaggaccctgttaccgccaacaacgcgtctcaacgacaaccgggcaaaacaacaatagcaactttgcctggactgctgggaccaaataccatctgaatggaagaaattcattggctaatcctggcatcgctatggcaacacacaaagacgacgaggagcgtttttttcccagtaacgggatcctgatttttggcaaacaaaatgctgccagagacaatgcggattacagcgatgtcatgcccaccagcgaggaagaaatcaaaaccactaaccctgtggccacagaggaatacggtatcgtggcagataacttgcagcagcaaaacacggctcctcaaattggaactgtcaacagccagggggccttacccggtatggtctggcagaaccgggacgtgtacctgcagggtcccatctgggccaagattcctcacacggacggcaacttccacccgtctccgctgatgggcggctttggcctgaaacatcctccgcctcagatcctgatcaagaacacgcctgtacctgcggatcctccgaccaccttcaaccagtcaaagctgaactctttcatcacgcaatacagcaccggacaggtcagcgtggaaattgaatgggagctgcagaaggaaaacagcaagcgctggaaccccgagatccagtacacctccaactactacaaatctacaagtgtggactttgctgttaatacagaaggcgtgtactctgaaccccgccccattggcacccgttacctcactcgtaatctgtaa

SEQ ID NO: 3771 - DNA, 2217 bp, synthetic construct
  misc_feature 1..2217: note = source = /note="Description of Artificial Sequence: Synthetic polynucleotide"
  source 1..2217: mol_type = other DNA
atggctgccgatggttatcttccagattggctcgaggacaacctctctgagggcattcgcgagtggtgggcgctgaaacctggagccccgaagcccaaagccaaccagcaaaagcaggacgacggccggggtctggtgcttcctggctacaagtacctcggacccttcaacggactcgacaagggggagcccgtcaacgcggcggacgcggcggccctcgagcacgacaaggcctacgaccagcagctgcaggcgggtgacaatccgtacctgcggtataaccacgccgacgccgagtttcaggagcgtctgcaagaagatacgtcttttgggggcaacctcgggcgagcagtcttccaggccaagaagcgggttctcgaacctctcggtctggttgaggaaggcgctaagacggctcctggaaagaagagaccggtagagccatcaccccagcgttctccagactcctctacgggcatcggcaaggagggccaacagcccgccagaaaaagactcaattttggtcagactggcgactcagagtcagttccagaccctcaacctctcggagaacctccagcagcgccctctggtgtgggacctaatacaatggctgcaggcggtggcgcaccaatggcagacaataacgaaggcgccgacggagtgggtagttcctcgggaaattggcattgcgattccacatggctgggcgacagagtcatcaccaccagcacccgaacctgggccctgcccacctacaacaaccacctctacaagcaaatctccaacgggacatcgggaggagccaccaacgacaacacctacttcggctacagcaccccctgggggtattttgactttaacagattccactgccacttttcaccacgtgactggcagcgactcatcaacaacaactggggattccggcccaagagactcagcttcaagctcttcaacatccaggtcaaggaggtcacgcagaatgaaggcaccaagaccatcgccaataacctcaccagcaccatccaggtgtttacggactcggagtaccagctgccgtacgttctcggctctgcccaccagggctgcctgcctccgttcccggcggacgtgttcacgattccccagtacggctacctaacactcaacaacggtagtcaggccgtgggacgctcctccttctactgcctggaatactttccttcgcagatgctgagaaccggcaacaacttccagtttacttacaccttcgaggacgtgcctttccacagcagctacgcccacagccagagcttggaccggctgatgaatcctctgattgaccagtacctgtactacttgtctcggattcaaacaacaggaggcacggcaaatacgcagactctgggcttcagccaaggtgggcctaatacaatggccaatcaggcaaagaactggctgccaggaccctgttaccgccaacaacgcgtctcaacgacaaccgggcaaaacaacaatagcaactttgcctggactgctgggaccaaataccatctgaatggaagaaattcattggctaatcctggcatcgctatggcaacacacaaagacgacgaggagcgtttttttcccagtaacgggatcctgatttttggcaaacaaaatgctgccagagacaatgcggattacagcgatgtcatgcccaccagcgaggaagaaatcaaaaccactaaccctgtggccacagaggaatacggtatcgtggcagataacttgcagcagcaaaacacggctcctcaaattggaactgtcaacagccagggggccttacccggtatggtctggcagaaccgggacgtgtacctgcagggtcccatctgggccaagattcctcacacggacggcaacttccacccgtctccgctgatgggcggctttggcctgaaacatcctccgcctcagatcctgatcaagaacacgcctgtacctgcggatcctccgaccaccttcaaccagtcaaagctgaactctttcatcacgcaatactgtaccggacaggtcagcgtggaaattgaatgggagctgcagaaggaaaacagcaagcgctggaaccccgagatccagtacacctccaactactacaaatctacaagtgtggactttgctgttaatacagaaggcgtgtactctgaaccccgccccattggcacccgttacctcactcgtaatctgtaa

SEQ ID NO: 3772 - DNA, 2217 bp, synthetic construct
  misc_feature 1..2217: note = source = /note="Description of Artificial Sequence: Synthetic polynucleotide"
  source 1..2217: mol_type = other DNA
atggctgccgatggttatcttccagattggctcgaggacaacctctctgagggcattcgcgagtggtgggcgctgaaacctggagccccgaagcccaaagccaaccagcaaaagcaggacgacggccggggtctggtgcttcctggctacaagtacctcggacccttcaacggactcgacaagggggagcccgtcaacgcggcggacgcggcggccctcgagcacgacaaggcctacgaccagcagctgcaggcgggtgacaatccgtacctgcggtataaccacgccgacgccgagtttcaggagcgtctgcaagaagatacgtcttttgggggcaacctcgggcgagcagtcttccaggccaagaagcgggttctcgaacctctcggtctggttgaggaaggcgctaagacggctcctggaaagaagagaccggtagagccatcaccccagcgttctccagactcctctacgggcatcggcaaggagggccaacagcccgccagaaaaagactcaattttggtcagactggcgactcagagtcagttccagaccctcaacctctcggagaacctccagcagcgccctctggtgtgggacctaatacaatggctgcaggcggtggcgcaccaatggcagacaataacgaaggcgccgacggagtgggtagttcctcgggaaattggcattgcgattccacatggctgggcgacagagtcatcaccaccagcacccgaacctgggccctgcccacctacaacaaccacctctacaagcaaatctccaacgggacatcgggaggagccaccaacgacaacacctacttcggctacagcaccccctgggggtattttgactttaacagattccactgccacttttcaccacgtgactggcagcgactcatcaacaacaactggggattccggcccaagagactcagcttcaagctcttcaacatccaggtcaaggaggtcacgcagaatgaaggcaccaagaccatcgccaataacctcaccagcaccatccaggtgtttacggactcggagtaccagctgccgtacgttctcggctctgcccaccagggctgcctgcctccgttcccggcggacgtgttcacgattccccagtacggctacctaacactcaacaacggtagtcaggccgtgggacgctcctccttctactgcctggaatactttccttcgcagatgctgagaaccggcaacaacttccagtttacttacaccttcgaggacgtgcctttccacagcagctacgcccacagccagagcttggaccggctgatgaatcctctgattgaccagtacctgtactacttgtctcggattcaaacaacaggaggcacggcaaatacgcagactctgggcttcagccaaggtgggcctaatacaatggccaatcaggcaaagaactggctgccaggaccctgttaccgccaacaacgcgtctcaacgacaaccgggcaaaacaacaatagcaactttgcctggactgctgggaccaaataccatctgaatggaagaaattcattggctaatcctggcatcgctatggcaacacacaaagacgacgaggagcgtttttttcccagtaacgggatcctgatttttggcaaacaaaatgctgccagagacaatgcggattacagcgatgtcatgcccaccagcgaggaagaaatcaaaaccactaaccctgtggccacagaggaatacggtatcgtggcagataacttgcagcagcaaaacacggctcctcaaattggaactgtcaacagccagggggccttacccggtatggtctggcagaaccgggacgtgtacctgcagggtcccatctgggccaagattcctcacacggacggcaacttccacccgtctccgctgatgggcggctttggcctgaaacatcctccgcctcagatcctgatcaagaacacgcctgtacctgcggatcctccgaccaccttcaaccagtcaaagctgaactctttcatcacgcaatacagcaccggacaggtcagcgtggaaattgaatgggagctgcagaaggaaaacagcaagcgctggaaccccgagatccagtacacctccaactactacaaatctacaagtgtggactttgctgttaatacagaaggcgtgtactctgaaccccgccccattggcacccgttacctcacccgtaatctgtaa

SEQ ID NO: 3773 - DNA, 2217 bp, synthetic construct
  misc_feature 1..2217: note = source = /note="Description of Artificial Sequence: Synthetic polynucleotide"
  source 1..2217: mol_type = other DNA
atggctgccgatggttatctcccagattggctcgaggacaacctctctgagggcattcgcgagtggtgggcactgaaacctggagccccgaagcccaaagccaaccagcaaaagcaggacgacggccggggtctggtgcttcctggctacaagtacctcggacccttcaacggactcgacaagggggagcccgtcaacgcggcggacgcggcggccctcgagcacgacaaggcctacgaccagcagctgcaggcgggtgacaatccgtacctgcggtataaccacgccgacgccgagtttcaggagcgtctgcaagaagatacgtcttttgggggcaacctcgggcgagcagtcttccaggccaagaagcgggttctcgaacctctcggtctggttgaggaaggcgctaagacggctcctggaaaggagagaccggtagagccatcaccccagcgttctccagactcctctacgggcatcggcaagaagggccaacagcctgccagaaaaagactcaattttggtcagactggcgactcagagtcagttccagaccctcaacctctcggagaacctccagcagcgccctctggtgtgggacctaatacaatggctgcaggcggtggcgcaccaatggcagacaataacgaaggcgccgacggagtgggtagttcctcgggaaattggcattgcgattccacatggctgggcgacagagtcatcaccaccagcacccgaacctgggccctgcccacctacaacaaccacctctacaagcaaatccccaacgggacatcgggaggagccaccaacgacaacacctacttcggctacagcaccccctgggggtattttgactttaacagattccactgccacttttcaccacgtgactggcagcgactcatcaacaacaactggggattccggcccaagagactcagcttcaagctcttcaacatccaggtcaaggaggtcacgcagaatgaaggcaccaagaccaccgccaataacctcaccagcaccatccaggtgtttacggactcggagtaccagctgccgtacgttctcggctctgcccaccagggctgcctgcctccgttcccggcggacgtgttcacgattccccagtacggctacctaacactcaacaacggtagtcaggccgtgggacgctcctccttctactgcctggaatactttccttcgcagatgctgagaaccggcaacaacttccagtttacttacaccttcgaggacgtgcctttccacagcagctacgcccacagccagagcttggaccggctgatgaatcctctgattgaccagtacctgtactacttgtctcggattcaaacaacaggaggcacggcaaatacgcagactctgggcttcagccaaggtgggcctaatacaatggccaatcaggcaaagaactggctgccaggaccctgttaccgccaacaacgcgtctcaacgacaaccgggcaaaacaacaatagcaactttgcctggactgctgggaccaaataccatctgaatggaagaaattcattggctaatcctggcatcgctatggcaacacacaaagacgacgaggagcgtttttttcccagtaacgggatcctgatttttggcaaacaaaatgctgccagagacaatgcggattacagcgatgtcatgcccaccagcgaggaagaaatcaaaaccactaaccctgtggccacagaggaatacggtatcgtggcagataacttgcagcagcaaaacacggctcctcaaattggaactgtcaacagccagggggccttacccggtatggtctggcagaaccgggacgtgtacctgcagggtcccatctgggccaagattcctcacacggacggcaacttccacccgtctccgctgatgggcggctttggcctgaaacatcctccgcctcagatcctgatcaagaacacgcctgtacctgcggatcctccgaccaccttcaaccagtcaaagctgaactctttcatcacgcaatacagcaccggacaggtcagcgtggaaattgaatgggagctgcagaaggaaaacagcaagcgctggaaccccgagatccagtacacctccaactactacaaatctacaagtgtggactttgctgttaatacagaaggcgtgtactctgaaccccgccccattggcacccgttacctcacccgtaatctgtaa

SEQ ID NO: 3774 - DNA, 2217 bp, synthetic construct
  misc_feature 1..2217: note = source = /note="Description of Artificial Sequence: Synthetic polynucleotide"
  source 1..2217: mol_type = other DNA
atggctgccgatggttatcttccagattggctcgaggacaacctctctgagggcattcgcgagtggtgggcgctgaaacctggagccccgaagcccaaagccaaccagcaaaagcaggacgacggccggggtctggtgcttcctggctacaagtacctcggacccttcaacggactcgacaagggggagcccgtcaacgcggcggacgcggcggccctcgagcacgacaaggcctacgaccagcagctgcaggcgggtgacaatccgtacctgcggtataaccacgccgacgccgagtttcaggagcgtctgcaagaagatacgtcttttgggggcaacctcgggcgagcagtcttccaggccaagaagcgggttctcgaacctctcggtctggttgaggaaggcgctaagacggctcctggaaagaagagaccggtagagccatcaccccagcgttctccagactcctctacgggcatcggcaaggagggccaacagcccgccagaaaaagactcaattttggtcagactggcgactcagagtcagttccagaccctcaacctctcggagaacctccagcagcgccctctggtgtgggacctaatacaatggctgcaggcggtggcgcaccaatggcagacaataacgaaggcgccgacggagtgggtagttcctcgggaaattggcattgcgattccacatggctgggcgacagagtcatcaccaccagcacccgaacctgggccctgcccacctacaacaaccacctctacaagcaaatctccaacgggacatcgggaggagccaccaacgacaacacctacttcggctacagcaccccctgggggtattttgactttaacagattccactgccacttttcaccacgtgactggcagcgactcatcaacaacaactggggattccggcccaagagactcagcttcaagctcttcaacatccaggtcaaggaggtcacgcagaatgaaggcaccaagaccaccgccaataacctcaccagcaccatccaggtgtttacggactcggagtaccagctgccgtacgttctcggctctgcccaccagggctgcctgcctccgttcccggcggacgtgttcacgattccccagtacggctacctaacactcaacaacggtagtcaggccgtgggacgctcctccttctactgcctggaatactttccttcgcagatgctgagaaccggcaacaacttccagtttacttacaccttcgaggacgtgcctttccacagcagctacgcccacagccagagcttggaccggctgatgaatcctctgattgaccagtacctgtactacttgtctcggattcaaacaacaggaggcacggcaaatacgcagactctgggcttcagccaaggtgggcctaatacaatggccaatcaggcaaagaactggctgccaggaccctgttaccgccaacaacgcgtctcaacgacaaccgggcaaaacaacaatagcaactttgcctggactgctgggaccaaataccatctgaatggaagaaattcattggctaatcctggcatcgctatggcaacacacaaagacgacgaggagcgtttttttcccagtaacgggatcctgatttttggcaaacaaaatgctgccagagacaatgcggattacagcgatgtcatgcccaccagcgaggaagaaatcaaaaccactaaccctgtggccacagaggaatacggtatcgtggcagataacttgcagcagcaaaacacggctcctcaaattggaactgtcaacagccagggggccttacccggtatggtctggcagaaccgggacgtgtacctgcagggtcccatctgggccaagattcctcacacggacggcaacttccacccgtctccgctgatgggcggctttggcctgaaacatcctccgcctcagatcctgatcaagaacacgcctgtacctgcggatcctccgaccaccttcaaccagtcaaagctgaactctttcatcacgcaatacagcaccggacaggtcagcgtggaaattgaatgggagctgcagaaggaaaacagcaagcgctggaaccccgagatccagtacacctccaactactacaaatctacaagtgtggactttgctgttaatacagaaggcgtgtactctgaaccccgccccattggcacccgttacctcacccgtaatctgtaa

SEQ ID NO: 3775 - DNA, 2217 bp, synthetic construct
  misc_feature 1..2217: note = source = /note="Description of Artificial Sequence: Synthetic polynucleotide"
  source 1..2217: mol_type = other DNA
atggctgccgatggttatctcccagattggctcgaggacaacctctctgagggcattcgcgagtggtgggcactgaaacctggagccccgaagcccaaagccaaccagcaaaagcaggacgacggccggggtctggtgcttcctggctacaagtacctcggacccttcaacggactcgacaagggggagcccgtcaacgcggcggacgcggcggccctcgagcacgacaaggcctacgaccagcagctgcaggcgggtgacaatccgtacctgcggtataaccacgccgacgccgagtttcaggagcgtctgcaagaagatacgtcttttgggggcaacctcgggcgagcagtcttccaggccaagaagcgggttctcgaacctctcggtctggttgaggaaggcgctaagacggctcctggaaaggagagaccggtagagccatcaccccagcgttctccagactcctctacgggcatcggcaagaagggccaacagcctgccagaaaaagactcaattttggtcagactggcgactcagagtcagttccagaccctcaacctctcggagaacctccagcagcgccctctggtgtgggacctaatacaatggctgcaggcggtggcgcaccaatggcagacaataacgaaggcgccgacggagtgggtagttcctcgggaaattggcattgcgattccacatggctgggcgacagagtcatcaccaccagcacccgaacctgggccctgcccacctacaacaaccacctctacaagcaaatctccaacgggacatcgggaggagccaccaacgacaacacctacttcggctacagcaccccctgggggtattttgactttaacagattccactgccacttttcaccacgtgactggcagcgactcatcaacaacaactggggattccggcccaagagactcagcttcaagctcttcaacatccaggtcaaggaggtcacgcagaatgaaggcaccaagaccaccgccaataacctcaccagcaccatccaggtgtttacggactcggagtaccagctgccgtacgttctcggctctgcccaccagggctgcctgcctccgttcccggcggacgtgttcacgattccccagtacggctacctaacactcaacaacggtagtcaggccgtgggacgctcctccttctactgcctggaatactttccttcgcagatgctgagaaccggcaacaacttccagtttacttacaccttcgaggacgtgcctttccacagcagctacgcccacagccagagcttggaccggctgatgaatcctctgattgaccagtacctgtactacttgtctcggattcaaacaacaggaggcacggcaaatacgcagactctgggcttcagccaaggtgggcctaatacaatggccaatcaggcaaagaactggctgccaggaccctgttaccgccaacaacgcgtctcaacgacaaccgggcaaaacaacaatagcaactttgcctggactgctgggaccaaataccatctgaatggaagaaattcattggctaatcctggcatcgctatggcaacacacaaagacgacgaggagcgtttttttcccagtaacgggatcctgatttttggcaaacaaaatgctgccagagacaatgcggattacagcgatgtcatgcccaccagcgaggaagaaatcaaaaccactaaccctgtggccacagaggaatacggtatcgtggcagataacttgcagcagcaaaacacggctcctcaaattggaactgtcaacagccagggggccttacccggtatggtctggcagaaccgggacgtgtacctgcagggtcccatctgggccaagattcctcacacggacggcaacttccacccgtctccgctgatgggcggctttggcctgaaacatcctccgcctcagatcctgatcaagaacacgcctgtacctgcggatcctccgaccaccttcaaccagtcaaagctgaactctttcatcacgcaatacagtaccggacaggtcagcgtggaaattgaatgggagctgcagaaggaaaacagcaagcgctggaaccccgagatccagtacacctccaactactacaaatctacaagtgtggactttgctgttaatacagaaggcgtgtactctgaaccccgccccattggcacccgttacctcacccgtaatctgtaa

SEQ ID NO: 3776 - DNA, 2217 bp, synthetic construct
  misc_feature 1..2217: note = source = /note="Description of Artificial Sequence: Synthetic polynucleotide"
  source 1..2217: mol_type = other DNA
atggctgccgatggttatctcccagattggctcgaggacaacctctctgagggcattcgcgagtggtgggcactgaaacctggagccccgaagcccaaagccaaccagcaaaagcaggacgacggccggggtctggtgcttcctggctacaagtacctcggacccttcaacggactcgacaagggggagcccgtcaacgcggcggacgcggcggccctcgagcacgacaaggcctacgaccagcagctgcaggcgggtgacaatccgtacctgcggtataaccacgccgacgccgagtttcaggagcgtctgcaagaagatacgtcttttgggggcaacctcgggcgagcagtcttccaggccaagaagcgggttctcgaacctctcggtctggttgaggaaggcgctaagacggctcctggaaaggagagaccggtagagccatcaccccagcgttctccagactcctctacgggcatcggcaagaagggccaacagcctgccagaaaaagactcaattttggtcagactggcgactcagagtcagttccagaccctcaacctctcggagaacctccagcagcgccctctggtgtgggacctaatacaatggctgcaggcggtggcgcaccaatggcagacaataacgaaggcgccgacggagtgggtagttcctcgggaaattggcattgcgattccacatggctgggcgacagagtcatcaccaccagcacccgaacctgggccctgcccacctacaacaaccacctctacaagcaaatctccaacgggacatcgggaggagccaccaacgacaacacctacttcggctacagcaccccctgggggtattttgactttaacagattccactgccacttttcaccacgtgactggcagcgactcatcaacaacaactggggattccggcccaagagactcagcttcaagctcttcaacatccaggtcaaggaggtcacgcagaatgaaggcaccaagaccatcgccaataacctcaccagcaccatccaggtgtttacggactcggagtaccagctgccgtacgttctcggctctgcccaccagggctgcctgcctccgttcccggcggacgtgttcacgattccccagtacggctacctaacactcaacaacggtagtcaggccgtgggacgctcctccttctactgcctggaatactttccttcgcagatgctgagaaccggcaacaacttccagtttacttacaccttcgaggacgtgcctttccacagcagctacgcccacagccagagcttggaccggctgatgaatcctctgattgaccagtacctgtactacttgtctcggattcaaacaacaggaggcacggcaaatacgcagactctgggcttcagccaaggtgggcctaatacaatggccaatcaggcaaagaactggctgccaggaccctgttaccgccaacaacgcgtctcaacgacaaccgggcaaaacaacaatagcaactttgcctggactgctgggaccaaataccatctgaatggaagaaattcattggctaatcctggcatcgctatggcaacacacaaagacgacgaggagcgtttttttcccagtaacgggatcctgatttttggcaaacaaaatgctgccagagacaatgcggattacagcgatgtcatgcccaccagcgaggaagaaatcaaaaccactaaccctgtggccacagaggaatacggtatcgtggcagataacttgcagcagcaaaacacggctcctcaaattggaactgtcaacagccagggggccttacccggtatggtctggcagaaccgggacgtgtacctgcagggtcccatctgggccaagattcctcacacggacggcaacttccacccgtctccgctgatgggcggctttggcctgaaacatcctccgcctcagatcctgatcaagaacacgcctgtacctgcggatcctccgaccaccttcaaccagtcaaagctgaactctttcatcacgcaatacagtaccggacaggtcagcgtggaaattgaatgggagctgcagaaggaaaacagcaagcgctggaaccccgagatccagtacacctccaactactacaaatctacaagtgtggactttgctgttaatacagaaggcgtgtactctgaaccccgccccattggcacccgttacctcacccgtaatctgtaa

SEQ ID NO: 3777 - DNA, 2217 bp, synthetic construct
  misc_feature 1..2217: note = source = /note="Description of Artificial Sequence: Synthetic polynucleotide"
  source 1..2217: mol_type = other DNA
atggctgccgatggttatcttccagattggctcgaggacaacctctctgagggcattcgcgagtggtgggcgctgaaacctggagccccgaagcccaaagccaaccagcaaaagcaggacgacggccggggtctggtgcttcctggctacaagtacctcggacccttcaacggactcgacaagggggagcccgtcaacgcggcggacgcggcggccctcgagcacgacaaggcctacgaccagcagctgcaggcgggtgacaatccgtacctgcggtataaccacgccgacgccgagtttcaggagcgtctgcaagaagatacgtcttttgggggcaacctcgggcgagcagtcttccaggccaagaagcgggttctcgaacctctcggtctggttgaggaaggcgctaagacggctcctggaaagaagagaccggtagagccatcaccccagcgttctccagactcctctacgggcatcggcaagaagggccaacagcccgccagaaaaagactcaattttggtcagactggcgactcagagtcagttccagaccctcaacctctcggagaacctccagcagcgccctctggtgtgggacctaatacaatggctgcaggcggtggcgcaccaatggcagacaataacgaaggcgccgacggagtgggtagttcctcgggaaattggcattgcgattccacatggctgggcgacagagtcatcaccaccagcacccgaacctgggccctgcccacctacaacaaccacctctacaagcaaatctccaacgggacatcgggaggagccaccaacgacaacacctacttcggctacagcaccccctgggggtattttgactttaacagattccactgccacttttcaccacgtgactggcagcgactcatcaacaacaactggggattccggcccaagagactcagcttcaagctcttcaacatccaggtcaaggaggtcacgcagaatgaaggcaccaagaccatcgccaataacctcaccagcaccatccaggtgtttacggactcggagtacccgctgccgtacgttctcggctctgcccaccagggctgcctgcctccgttcccggcggacgtgttcacgattccccagtacggctacctaacactcaacaacggtagtcaggccgtgggacgctcctccttctactgcctggaatactttccttcgcagatgctgagaaccggcaacaacttccagtttacttacaccttcgaggacgtgcctttccacagcagctacgcccacagccagagcttggaccggctgatgaatcctctgattgaccagtacctgtactacttgtctcggattcaaacaacaggaggcacggcaaatacgcagactctgggcttcagccaaggtgggcctaatacaatggccaatcaggcaaagaactggctgccaggaccctgttaccgccaacaacgcgtctcaacgacaaccgggcaaaacaacaatagcaactttgcctggactgctgggaccaaataccatctgaatggaagaaattcattggctaatcctggcatcgctatggcaacacacaaagacgacgaggagcgtttttttcccagtaacgggatcctgatttttggcaaacaaaatgctgccagagacaatgcggattacagcgatgtcatgcccaccagcgaggaagaaatcaaaaccactaaccctgtggccacagaggaatacggtatcgtggcagataacttgcagcagcaaaacacggctcctcaaattggaactgtcaacagccagggggccttacccggtatggtctggcagaaccgggacgtgtacctgcagggtcccatctgggccaagattcctcacacggacggcaacttccacccgtctccgctgatgggcggctttggcctgaaacatcctccgcctcagatcctgatcaagaacacgcctgtacctgcggaccctccgaccaccttcaaccagtcaaagctgaactctttcatcacgcaatacagcaccggacaggtcagcgtggaaattgaatgggagctgcagaaggaaaacagcaagcgctggaaccccgagatccagtacacctccaactactacaaatctacaagtgtggactttgctgttaatacagaaggcgtgtactctgaaccccgccccattggcacccgttacctcacccgtaatctgtaa

SEQ ID NO: 3778 - DNA, 2217 bp, synthetic construct
  misc_feature 1..2217: note = source = /note="Description of Artificial Sequence: Synthetic polynucleotide"
  source 1..2217: mol_type = other DNA
atggctgccgatggttatcttccagattggctcgaggacaacctctctgagggcattcgcgagtggtgggcgctgaaacctggagccccgaagcccaaagccaaccagcaaaagcaggacgacggccggggtctggtgcttcctggctacaagtacctcggacccttcaacggactcgacaagggggagcccgtcaacgcggcggacgcggcggccctcgagcacgacaaggcctacgaccagcagctgcaggcgggtgacaatccgtacctgcggtataaccacgccgacgccgagtttcaggagcgtctgcaagaagatacgtcttttgggggcaacctcgggcgagcagtcttccaggccaagaagcgggttctcgaacctctcggtctggttgaggaaggcgctaagacggctcctggaaagaagagaccggtagagccatcaccccagcgttctccagactcctctacgggcatcggcaagaagggccaacagcccgccagaaaaagactcaattttggtcagactggcgactcagagtcagttccagaccctcaacctctcggagaacctccagcagcgccctctggtgtgggacctaatacaatggctgcaggcggtggcgcaccaatggcagacaataacgaaggcgccgacggagtgggtagttcctcgggaaattggcattgcgattccacatggctgggcgacagagtcatcaccaccagcacccgaacctgggccctgcccacctacaacaaccacctctacaagcaaatctccaacgggacatcgggaggagccaccaacgacaacacctacttcggctacagcaccccctgggggtattttgactttaacagattccactgccacttttcaccacgtgactggcagcgactcatcaacaacaactggggattccggcccaagagactcagcttcaagctcttcaacatccaggtcaaggaggtcacgcagaatgaaggcaccaagaccatcgccaataacctcaccagcaccatccaggtgtttacggactcggagtaccagctgccgtacgttctcggctctgcccaccagggctgcctgcctccgttcccggcggacgtgttcacgattccccagtacggctacctaacactcaacaacggtagtcaggccgtgggacgctcctccttctactgcctggaatactttccttcgcagatgctgagaaccggcaacaacttccagtttacttacaccttcgaggacgtgcctttccacagcagctacgcccacagccagagcttggaccggctgatgaatcctctgattgaccagtacctgtactacttgtctcggattcaaacaacaggaggcacggcaaatacgcagactctgggcttcagccaaggtgggcctaatacaatggccaatcaggcaaagaactggctgccaggaccctgttaccgccaacaacgcgtctcaacgacaaccgggcaaaacaacaatagcaactttgcctggactgctgggaccaaataccatctgaatggaagaaattcattggctaatcctggcatcgctatggcaacacacaaagacgacgaggagcgtttttttcccagtaacgggatcctgatttttggcaaacaaaatgctgccagagacaatgcggattacagcgatgtcatgcccaccagcgaggaagaaatcaaaaccactaaccctgtggccacagaggaatacggtatcgtggcagataacttgcagcagcaaaacacggctcctcaaattggaactgtcaacagccagggggccttacccggtatggtctggcagaaccgggacgtgtacctgcagggtcccatctgggccaagattcctcacacggacggcaacttccacccgtctccgctgatgggcggctttggcctgaaacatcctccgcctcagatcctgatcaagaacacgcctgtacctgcggatcctccgaccaccttcaaccagtcaaagctgaactctttcatcacgcaatacggcaccggacaggtcagcgtggaaattgaatgggagctgcagaaggaaaacagcaagcgctggaaccccgagatccagtacacctccaactactacaaatctacaagtgtggactttgctgttaatacagaaggcgtgtactctgaaccccgccccattggcacccgttacctcacccgtaatctgtaa

SEQ ID NO: 3779 - DNA, 2217 bp, synthetic construct
  misc_feature 1..2217: note = source = /note="Description of Artificial Sequence: Synthetic polynucleotide"
  source 1..2217: mol_type = other DNA
atggctgccgatggttatcttccagattggctcgaggacaacctctctgagggcattcgcgagtggtgggcgctgaaacctggagccccgaagcccaaagccaaccagcaaaagcaggacgacggccggggtctggtgcttcctggctacaagtacctcggacccttcaacggactcgacaagggggagcccgtcaacgcggcggacgcggcggccctcgagcacgacaaggcctacgaccagcagctgcaggcgggtgacaatccgtacctgcggtataaccacgccgacgccgagtttcaggagcgtctgcaagaagatacgtcttttgggggcaacctcgggcgagcagtcttccaggccaagaagcgggttctcgaacctctcggtctggttgaggaaggcgctaagacggctcctggaaagaagagaccggtagagccatcaccccagcgttctccagactcctctacgggcatcggcaagaagggccaacagcccgccagaaaaagactcaattttggtcagactggcgactcagagtcagttccagaccctcaacctctcggagaacctccagcagcgccctctggtgtgggacctaatacaatggctgcaggcggtggcgcaccaatggcagacaataacgaaggcgccgacggagtgggtagttcctcgggaaattggcattgcgattccacatggctgggcgacagagtcatcaccaccagcacccgaacctgggccctgcccacctacaacaaccacctctacaagcaaatctccaacgggacatcgggaggagccaccaacgacaacacctacttcggctacagcaccccctgggggtattttgactttaacagattccactgccacttttcaccacgtgactggcagcgactcatcaacaacaactggggattccggcccaagagactcagcttcaagcccttcaacatccaggtcaaggaggtcacgcagaatgaaggcaccaagaccatcgccaataacctcaccagcaccatccaggtgtttacggactcggagtaccagctgccgtacgttctcggctctgcccaccagggctgcctgcctccgttcccggcggacgtgttcacgattccccagtacggctacctaacactcaacaacggtagtcaggccgtgggacgctcctccttctactgcctggaatactttccttcgcagatgctgagaaccggcaacaacttccagtttacttacaccttcgaggacgtgcctttccacagcagctacgcccacagccagagcttggaccggctgatgaatcctctgattgaccagtacctgtactacttgtctcggattcaaacaacaggaggcacggcaaatacgcagactctgggcttcagccaaggtgggcctaatacaatggccaatcaggcaaagaactggctgccaggaccctgttaccgccaacaacgcgtctcaacgacaaccgggcaaaacaacaatagcaactttgcctggactgctgggaccaaataccatctgaatggaagaaattcattggctaatcctggcatcgctatggcaacacacaaagacgacgaggagcgtttttttcccagtaacgggatcctgatttttggcaaacaaaatgctgccagagacaatgcggattacagcgatgtcatgcccaccagcgaggaagaaatcaaaaccactaaccctgtggccacagaggaatacggtatcgtggcagataacttgcagcagcaaaacacggctcctcaaattggaactgtcaacagccagggggccttacccggtatggtctggcagaaccgggacgtgtacctgcagggtcccatctgggccaagattcctcacacggacggcaacttccacccgtctccgctgatgggcggctttggcctgaaacatcctccgcctcagatcctgatcaagaacacgcctgtacctgcggatcctccgaccaccttcaaccagtcaaagctgaactctttcatcacgcaatacagcaccggacaggtcagcgtggaaattgaatgggagctgcagaaggaaaacagcaagcgctggaaccccgagatccagtacacctccaactactacaaatctacaagtgtggactttgctgttaatacagaaggcgtgtactctgaaccccgccccattggcacccgttacctcacccgtaatctgtaa

SEQ ID NO: 3780 - DNA, 2217 bp, synthetic construct
  misc_feature 1..2217: note = source = /note="Description of Artificial Sequence: Synthetic polynucleotide"
  source 1..2217: mol_type = other DNA
atggctgccgatggttatcttccagattggctcgaggacaacctctctgagggcattcgcgagtggtgggcgctgaaacctggagccccgaagcccaaagccaaccagcaaaagcaggacgacggccggggtctggtgcttcctggctacaagtacctcggacccttcaacggactcgacaagggggagcccgtcaacgcggcggacgcggcggccctcgagcacgacaaggcctacgaccagcagctgcaggcgggtgacaatccgtacctgcggtataaccacgccgacgccgagtttcaggagcgtctgcaagaagatacgtcttttgggggcaacctcgggcgagcagtcttccaggccaagaagcgggttctcgaacctctcggtctggttgaggaaggcgctaagacggctcctggaaagaagagaccggtagagccatcaccccagcgttctccagactcctctacgggcatcggcaagaagggccaacagcccgccagaaaaagactcaattttggtcagactggcgactcagagtcagttccagaccctcaacctctcggagaacctccagcagcgccctctggtgtgggacctaatacaatggctgcaggcggtggcgcaccaatggcagacaataacgaaggcgccgacggagtgggtagttcctcgggaaattggcattgcgattccacatggctgggcgacagagtcatcaccaccagcacccgaacctgggccctgcccacctacaacaaccacctctacaagcaaatctccaacgggacatcgggaggagccaccaacgacaacacctacttcggctacagcaccccctgggggtattttgactttaacagattccactgccacttttcaccacgtgactggcagcgactcatcaacaacaactggggattccggcccaagagactcagcttcaagctcttcaacatccaggtcaaggaggtcacgcagaatgaaggcaccaagaccatcgccaataacctcaccagcaccatccaggtgtttacggactcggagtaccagctgccgtacgttctcggctctgcccaccagggctgcctgcctccgttcccggcggacgtgttcacgattccccagtacggctacctaacactcaacaacggtagtcaggccgtgggacgctcctccttctactgcctggaatactttccttcgcagatgctgagaaccggcaacaacttccagtttacttacaccttcgaggacgtgcctttccacagcagctacgcccacagccagagcttggaccggctgatgaatcctctgattgaccagtacctgtactacttgtctcggattcaaacaacaggaggcacggcaaatacgcaggctctgggcttcagccaaggtgggcctaatacaatggccaatcaggcaaagaactggctgccaggaccctgttaccgccaacaacgcgtctcaacgacaaccgggcaaaacaacaatagcaactttgcctggactgctgggaccaaataccatctgaatggaagaaattcattggctaatcctggcatcgctatggcaacacacaaagacgacgaggagcgtttttttcccagtaacgggatcctgatttttggcaaacaaaatgctgccagagacaatgcggattacagcgatgtcatgcccaccagcgaggaagaaatcaaaaccactaaccctgtggccacagaggaatacggtatcgtggcagataacttgcagcagcaaaacacggctcctcaaattggaactgtcaacagccagggggccttacccggtatggtctggcagaaccgggacgtgtacctgcagggtcccatctgggccaagattcctcacacggacggcaacttccacccgtctccgctgatgggcggctttggcctgaaacatcctccgcctcagatcctgatcaagaacacgcctgtacctgcggatcctccgaccaccttcaaccagtcaaagctgaactctttcatcacgcaatacagcaccggacaggtcagcgtggaaattgaatgggagctgcagaaggaaaacagcaagcgctggaaccccgagatccagtacacctccaactactacaaatctacaagtgtggactttgctgttaatacagaaggcgtgtactctgaaccccgccccattggcacccgttacctcacccgtaatctgtaa

SEQ ID NO: 3781 - DNA, 2217 bp, synthetic construct
  misc_feature 1..2217: note = source = /note="Description of Artificial Sequence: Synthetic polynucleotide"
  source 1..2217: mol_type = other DNA
atggctgccgatggttatcttccagattggctcgaggacaacctctctgagggcattcgcgagtggtgggcgctgaaacctggagccccgaagcccaaagccaaccagcaaaagcaggacgacggccggggtctggtgcttcctggctacaagtacctcggacccttcaacggactcgacaagggggagcccgtcaacgcggcggacgcggcggccctcgagcacgacaaggcctacgaccagcagctgcaggcgggtgacaatccgtacctgcggtataaccacgccgacgccgagtttcaggagcgtctgcaagaagatacgtcttttgggggcaacctcgggcgagcagtcttccaggccaagaagcgggttctcgaacctctcggtctggttgaggaaggcgctaagacggctcctggaaagaagagaccggtagagccatcaccccagcgttctccagactcctctacgggcatcggcaagaagggccaacagcccgccagaaaaagactcaattttggtcagactggcgactcagagtcagttccagaccctcaacctctcggagaacctccagcagcgccctctggtgtgggacctaatacaatggctgcaggcggtggcgcaccaatggcagacaataacgaaggcgccgacggagtgggtagttcctcgggaaattggcattgcgattccacatggctgggcgacagagtcatcaccaccagcacccgaacctgggccctgcccacctacaacaaccacctctacaagcaaatctccaacgggacatcgggaggagccaccaacgacaacacctacttcggctacagcaccccctgggggtattttgactttaacagattccactgccacttttcaccacgtgactggcagcgactcatcaacaacaactggggattccggcccaagagactcagcttcaagctcttcaacatccaggtcaaggaggtcacgcagaatgaaggcaccaagaccatcgccaataacctcaccagcaccatccaggtgtttacggactcggagtaccagctgccgtacgttctcggctctgcccaccagggctgcctgcctccgttcccggcggacgtgttcacgattccccagtacggctacctaacactcaacaacggtagtcaggccgtgggacgctcctccttctactgcctggaatactttccttcgcagatgctgagaaccggcaacaacttccagtttacttacaccttcgaggacgtgcctttccacagcagctacgcccacagccagagcttggaccggctgatgaatcctctgattgaccagtacctgtactacttgtctcggattcaaacaacaggaggcacggcaaatacgcagactctgggcttcagccaaggtgggcctaatacaatggccaatcaggcaaagaactggctgccaggaccctgttaccgccaacaacgcgtctcaacgacaaccgggcaaaacaacaatagcaactttgcctggactgctgggaccaaataccatctgaatggaagaaattcattggctaatcctggcatcgctatggcaacacacaaagacgacgaggagcgtttttttcccagtaacgggatcctgatttttggcaaacaaaatgctgccagagacaatgcggattacagcgatgtcatgcccaccagcgaggaagaaatcaaaaccactaaccctgtggccacagagggatacggtatcgtggcagataacttgcagcagcaaaacacggctcctcaaattggaactgtcaacagccagggggccttacccggtatggtctggcagaaccgggacgtgtacctgcagggtcccatctgggccaagattcctcacacggacggcaacttccacccgtctccgctgatgggcggctttggcctgaaacatcctccgcctcagatcctgatcaagaacacgcctgtacctgcggatcctccgaccaccttcaaccagtcaaagctgaactctttcatcacgcaatacagcaccggacaggtcagcgtggaaattgaatgggagctgcagaaggaaaacagcaagcgctggaaccccgagatccagtacacctccaactactacaaatctacaagtgtggactttgctgttaatacagaaggcgtgtactctgaaccccgccccattggcacccgttacctcacccgtaatctgtaa

SEQ ID NO: 3782 - DNA, 2217 bp, synthetic construct
  misc_feature 1..2217: note = source = /note="Description of Artificial Sequence: Synthetic polynucleotide"
  source 1..2217: mol_type = other DNA
atggctgccgatggttatcttccagattggctcgaggacaacctctctgagggcattcgcgagtggtgggcgctgaaacctggagccccgaagcccaaagccaaccagcaaaagcaggacgacggccggggtctggtgcttcctggctacaagtacctcggacccttcaacggactcgacaagggggagcccgtcaacgcggcggacgcggcggccctcgagcacgacaaggcctacgaccagcagctgcaggcgggtgacaatccgtacctgcggtataaccacgccgacgccgagtttcaggagcgtctgcaagaagatacgtcttttgggggcaacctcgggcgagcagtcttccaggccaagaagcgggttctcgaacctctcggtctggttgaggaaggcgctaagacggctcctggaaagaagagaccggtagagccatcaccccagcgttctccagactcctctacgggcatcggcaagaagggccaacagcccgccagaaaaagactcaattttggtcagactggcgactcagagtcagttccagaccctcaacctctcggagaacctccagcagcgccctctggtgtgggacctaatacaatggctgcaggcggtggcgcaccaatggcagacaataacgaaggcgccgacggagtgggtagttcctcgggaaattggcattgcgattccacatggctgggcgacagagtcatcaccaccagcacccgaacctgggccctgcccacctacaacaaccacctctacaagcaaatctccaacgggacatcgggaggagccaccaacgacaacacctacttcggctacagcaccccctgggggtattttgactttaacagattccactgccacttttcaccacgtgactggcagcgactcatcaacaacaactggggattccggcccaagagactcagcttcaagctcttcaacatccaggtcaaggaggtcacgcagaatgaaggcaccaagaccatcgccaataacctcaccagcaccatccaggtgtttacggactcggagtaccagctgccgtacgttctcggctctgcccaccagggctgcctgcctccgttcccggcggacgtgttcacgattccccagtacggctacctaacactcaacaacggtagtcaggccgtgggacgctcctccttctactgcctggaatactttccttcgcagatgctgagaaccggcaacaacttccagtttacttacaccttcgaggacgtgcctttccacagcagctacgcccacagccagagcttggaccggctgatgaatcctctgattgaccagtacctgtactacttgtctcggattcaaacaacaggaggcacggcaaatacgcagactctgggcttcagccaaggtgggcctaatacaatggccaatcaggcaaagaactggctgccaggaccctgttaccgccaacaacgcgtctcaacgacaaccgggcaaaacaacaatagcaactttgcctggactgctgggaccaaataccatctgaatggaagaaattcattggctaatcctggcatcgctatggcaacacgcaaagacgacgaggagcgtttttttcccagtaacgggatcctgatttttggcaaacaaaatgctgccagagacaatgcggattacagcgatgtcatgcccaccagcgaggaagaaatcaaaaccactaaccctgtggccacagaggaatacggtatcgtggcagataacttgcagcagcaaaacacggctcctcaaattggaactgtcaacagccagggggccttacccggtatggtctggcagaaccgggacgtgtacctgcagggtcccatctgggccaagattcctcacacggacggcaacttccacccgtctccgctgatgggcggctttggcctgaaacatcctccgcctcagatcctgatcaagaacacgcctgtacctgcggatcctccgaccaccttcaaccagtcaaagctgaactctttcatcacgcaatacagcaccggacaggtcagcgtggaaattgaatgggagctgcagaaggaaaacagcaagcgctggaaccccgagatccagtacacctccaactactacaaatctacaagtgtggactttgctgttaatacagaaggcgtgtactctgaaccccgccccattggcacccgttacctcacccgtaatctgtaa

SEQ ID NO: 3783 - DNA, 2217 bp, synthetic construct
  misc_feature 1..2217: note = source = /note="Description of Artificial Sequence: Synthetic polynucleotide"
  source 1..2217: mol_type = other DNA
atggctgccgatggttatcttccagattggctcgaggacaacctctctgagggcattcgcgagtggtgggcgctgaaacctggagccccgaagcccaaagccaaccagcaaaagcaggacgacggccggggtctggtgcttcctggctacaagtacctcggacccttcaacggactcgacaagggggagcccgtcaacgcggcggacgcggcggccctcgagcacgacaaggcctacgaccagcagctgcaggcgggtgacaatccgtacctgcggtataaccacgccgacgccgagtttcaggagcgtctgcaagaagatacgtcttttgggggcaacctcgggcgagcagtcttccaggccaagaagcgggttctcgaacctctcggtctggttgaggaaggcgctaagacggctcctggaaagaagagaccggtagagccatcaccccagcgttctccagactcctctacgggcatcggcaagaagggccaacagcccgccagaaaaagactcaattttggtcagactggcgactcagagtcagttccagaccctcaacctctcggagaacctccagcagcgccctctggtgtgggacctaatacaatggctgcaggcggtggcgcaccaatggcagacaataacgaaggcgccgacggagtgggtagttcctcgggaaattggcattgcgattccacatggctgggcgacagagtcatcaccaccagcacccgaacctgggccctgcccacctacaacaaccacctctacaagcaaatctccaacgggacatcgggaggagccaccaacgacaacacctacttcggctacagcaccccctgggggtattttgactttaacagattccactgccacttttcaccacgtgactggcagcgactcatcaacaacaactggggattccggcccaagagactcagcttcaagctcttcaacatccaggtcaaggaggtcacgcagaatgaaggcaccaagaccatcgccaataacctcaccagcaccatccaggtgtttacggactcggagtaccagctgccgtacgttctcggctctgcccaccagggctgcctgcctccgttcccggcggacgtgttcacgattccccagtacggctacctaacactcaacaacggtagtcaggccgtgggacgctcctccttctactgcctggaatactttccttcgcagatgctgagaaccggcaacaacttccagtttacttacaccttcgaggacgtgcctttccacagcagctacgcccacagccagagcttggaccggctgatgaatcctctgattgaccagtacctgtactacttgtctcggattcaaacaacaggaggcacggcaaatacgcagactctgggcttcagccaaggtgggcctaatacaatggccaatcaggcaaagaactggctgccaggaccctgttaccgccaacaacgcgtctcaacgacaaccgggcaaaacaacaatagcaactttgcctggactgctgggaccaaataccatctgaatggaagaaattcattggctaatcctggcatcgctatggcaacacacaaagacgacgaggagcgtttttttcccagtaacgggatcctgatttttggcaaacaaaatgctgccagagacaatgcggattacagcgatgtcatgcccaccagcgaggaagaaatcaaaaccactaaccctgtggccacagaggaatacggtatcgtggcagataacttgcagcagcaaaacacggctcctcaaattggaactgtcaacagccagggggccttacccggtatggtctggcagaaccgggacgtgtacctgcagggtcccatctgggccaagattcctcacacggacggcaacttccacccgtctccgctgatgggcggctttggcctgaaacatcctccgcctcagatcctgatcaagaacacgcctgtacctgcggatcctccgaccaccttcaaccagtcaaagccgaactctttcatcacgcaatacagcaccggacaggtcagcgtggaaattgaatgggagctgcagaaggaaaacagcaagcgctggaaccccgagatccagtacacctccaactactacaaatctacaagtgtggactttgctgttaatacagaaggcgtgtactctgaaccccgccccattggcacccgttacctcacccgtaatctgtaa

SEQ ID NO: 3784 - DNA, 2217 bp, synthetic construct
  misc_feature 1..2217: note = source = /note="Description of Artificial Sequence: Synthetic polynucleotide"
  source 1..2217: mol_type = other DNA
atggctgccgatggttatcttccagattggctcgaggacaacctctctgagggcattcgcgagtggtgggcgctgaaacctggagccccgaagcccaaagccaaccagcaaaagcaggacgacggccggggtctggtgcttcctggctacaagtacctcggacccttcaacggactcgacaagggggagcccgtcaacgcggcggacgcggcggccctcgagcacgacaaggcctacgaccagcagctgcaggcgggtgacaatccgtacctgcggtataaccacgccgacgccgagtttcaggagcgtctgcaagaagatacgtcttttgggggcaacctcgggcgagcagtcttccaggccaagaagcgggttctcgaacctctcggtctggttgaggaaggcgctaagacggctcctggaaagaagagaccggtagagccatcaccccagcgttctccagactcctctacgggcatcggcaagaagggccaacagcccgccagaaaaagactcaattttggtcagactggcgactcagagtcagttccagaccctcaacctctcggagaacctccagcagcgccctctggtgtgggacctaatacaatggctgcaggcggtggcgcaccaatggcagacaataacgaaggcgccgacggagtgggtagttcctcgggaaattggcattgcgattccacatggctgggcgacagagtcatcaccaccagcacccgaacctgggccctgcccacctacaacaaccacctctacaagcaaatctccaacgggacatcgggaggagccaccaacgacaacacctacttcggctacagcaccccctgggggtattttgactttaacagattccactgccacttttcaccacgtgactggcagcgactcatcaacaacaactggggattccggcccaagagactcagcttcaagctcttcaacatccaggtcaaggaggtcacgcagaatgaaggcaccaagaccatcgccaataacctcaccagcaccatccaggtgtttacggactcggagtaccagctgccgtacgttctcggctctgcccaccagggctgcctgcctccgttcccggcggacgtgttcacgattccccagtacggctacctaacactcaacaacggtagtcaggccgtgggacgctcctccttctactgcctggaatactttccttcgcagatgctgagaaccggcaacaacttccagtttacttacaccttcgaggacgtgcctttccacagcagctacgcccacagccagagcttggaccggctgatgaatcctctgattgaccagtacctgtactacttgtctcggattcaaacaacaggaggcacggcaaatacgcagactctgggcttcagccaaggtgggcctaatacaatggccaatcaggcaaagaactggctgccaggaccctgttaccgccaacaacgcgtctcaacgacaaccgggcaaaacaacaatagcaactttgcctggactgctgggaccaaataccatctgaatggaagaaattcattggctaatcctggcatcgctatggcaacacacaaagacgacgaggagcgttttttttccagtaacgggatcctgatttttggcaaacaaaatgctgccagagacaatgcggattacagcgatgtcatgcccaccagcgaggaagaaatcaaaaccactaaccctgtggccacagaggaatacggtatcgtggcagataacttgcagcagcaaaacacggctcctcaaattggaactgtcaacagccagggggccttacccggtatggtctggcagaaccgggacgtgtacctgcagggtcccatctgggccaagattcctcacacggacggcaacttccacccgtctccgctgatgggcggctttggcctgaaacatcctccgcctcagatcctgatcaagaacacgcctgtacctgcggatcctccgaccaccttcaaccagtcaaagctgaactctttcatcacgcaatacagcaccggacaggtcagcgtggaaattgaatgggagctgcagaaggaaaacagcaagcgctggaaccccgagatccagtacacctccaactactacaaatctacaagtgtggactttgctgttaatacagaaggcgtgtactctgaaccccgccccattggcacccgttacctcacccgtaatctgtaa

SEQ ID NO: 3785 - DNA, 2217 bp, synthetic construct
  misc_feature 1..2217: note = source = /note="Description of Artificial Sequence: Synthetic polynucleotide"
  source 1..2217: mol_type = other DNA
atggctgccgatggttatcttccagattggctcgaggacaacctctctgagggcattcgcgagtggtgggcgctgaaacctggagccccgaagcccaaagccaaccagcaaaagcaggacgacggccggggtctggtgcttcctggctacaagtacctcggacccttcaacggactcgacaagggggagcccgtcaacgcggcggacgcggcggccctcgagcacgacaaggcctacgaccagcagctgcaggcgggtgacaatccgtacctgcggtataaccacgccgacgccgagtttcaggagcgtctgcaagaagatacgtcttttgggggcaacctcgggcgagcagtcttccaggccaagaagcgggttctcgaacctctcggtctggttgaggaaggcgctaagacggctcctggaaagaagagaccggtagagccatcaccccagcgttctccagactcctctacgggcatcggcaagaagggccaacagcccgccagaaaaagactcaattttggtcagactggcgactcagagtcagttccagaccctcaacctctcggagaacctccagcagcgccctctggtgtgggacctaatacaatggctgcaggcggtggcgcaccaatggcagacaataacgaaggcgccgacggagtgggtagttcctcgggaaattggcattgcgattccacatggctgggcgacagagtcatcaccaccagcacccgaacctgggccctgcccacctacaacaaccacctctacaagcaaatctccaacgggacatcgggaggagccaccaacgacaacacctacttcggctacagcaccccctgggggtattttgactttaacagattccactgccacttttcaccacgtgactggcagcgactcatcaacaacaactggggattccggcccaagagactcagcttcaagctcttcaacatccaggtcaaggaggtcacgcagaatgaaggcaccaagaccatcgccaataacctcaccagcaccatccaggtgtttacggactcggagtaccagctgccgtacgttctcggctctgcccaccagggctgcctgcctccgttcccggcggacgtgttcacgattccccagtacggctacctaacactcaacaacggtagtcaggccgtgggacgctcctccttctactgcctggaatactttccttcgcagatgctgagaaccggcaacaacttccagtttacttacaccttcgaggacgtgcctttccacagcagctacgcccacagccagagcttggaccggctgatgaatcctctgattgaccagtacctgtactacttgtctcggattcaaacaacaggaggcacggcaaatacgcagactctgggcttcagccaaggtgggcctaatacaatggccaatcaggcaaagaactggctgccaggaccctgttaccgccaacaacgcgtctcaacgacaaccgggcaaaacaacaatagcaactttgcctgggctgctgggaccaaataccatctgaatggaagaaattcattggctaatcctggcatcgctatggcaacacacaaagacgacgaggagcgtttttttcccagtaacgggatcctgatttttggcaaacaaaatgctgccagagacaatgcggattacagcgatgtcatgcccaccagcgaggaagaaatcaaaaccactaaccctgtggccacagaggaatacggtatcgtggcagataacttgcagcagcaaaacacggctcctcaaattggaactgtcaacagccagggggccttacccggtatggtctggcagaaccgggacgtgtacctgcagggtcccatctgggccaagattcctcacacggacggcaacttccacccgtctccgctgatgggcggctttggcctgaaacatcctccgcctcagatcctgatcaagaacacgcctgtacctgcggatcctccgaccaccttcaaccagtcaaagctgaaccctttcatcacgcaatacagcaccggacaggtcagcgtggaaattgaatgggagctgcagaaggaaaacagcaagcgctggaaccccgagatccagtacacctccaactactacaaatctacaagtgtggactttgctgttaatacagaaggcgtgtactctgaaccccgccccattggcacccgttacctcacccgtaatctgtaa

SEQ ID NO: 3786 - DNA, 2217 bp, synthetic construct
  misc_feature 1..2217: note = source = /note="Description of Artificial Sequence: Synthetic polynucleotide"
  source 1..2217: mol_type = other DNA
atggctgccgatggttatcttccagattggctcgaggacaacctctctgagggcattcgcgagtggtgggcgctgaaacctggagccccgaagcccaaagccaaccagcaaaagcaggacgacggccggggtctggtgcttcctggctacaagtacctcggacccttcaacggactcgacaagggggagcccgtcaacgcggcggacgcggcggccctcgagcacgacaaggcctacgaccagcagctgcaggcgggtgacaatccgtacctgcggtataaccacgccgacgccgagtttcaggagcgtctgcaagaagatacgtcttttgggggcaacctcgggcgagcagtcttccaggccaagaagcgggttctcgaacctctcggtctggttgaggaaggcgctaagacggctcctggaaagaagagaccggtagagccatcaccccagcgttctccagactcctctacgggcatcggcaagaagggccaacagcccgccagaaaaagactcaattttggtcagactggcgactcagagtcagttccagaccctcaacctctcggagaacctccagcagcgccctctggtgtgggacctaatacaatggctgcaggcggtggcgcaccaatggcagacaataacgaaggcgccgacggagtgggtagttcctcgggaaattggcattgcgattccacatggctgggcgacagagtcatcaccaccagcacccgaacctgggccctgcccacctacaacaaccacctctacaagcaaatctccaacgggacatcgggaggagccaccaacgacaacacctacttcggctacagcaccccctgggggtattttgactttaacagattccactgccacttttcaccacgtgactggcagcgactcatcaacaacaactggggattccggcccaagagactcagcttcaagctcttcaacatccaggtcaaggaggtcacgcagaatgaaggcaccaagaccatcgccaataaccccaccagcaccatccaggtgtttacggactcggagtaccagctgccgtacgttctcggctctgcccaccagggctgcctgcctccgttcccggcggacgtgttcacgattccccagtacggctacctaacactcaacaacggtagtcaggccgtgggacgctcctccttctactgcctggaatactttccttcgcagatgctgagaaccggcaacaacttccagtttacttacaccttcgaggacgtgcctttccacagcagctacgcccacagccagagcttggaccggctgatgaatcctctgattgaccagtacctgtactacttgtctcggattcaaacaacaggaggcacggcaaatacgcagactctgggcttcagccaaggtgggcctaatacaatggccaatcaggcaaagaactggctgccaggaccctgttaccgccaacaacgcgtctcaacgacaaccgggcaaaacaacaatagcaactttgcctggactgctgggaccaaataccatctgaatggaagaaattcattggctaatcctggcatcgctatggcaacacacaaagacgacgaggagcgtttttttcccagtaacgggatcctgatttttggcaaacaaaatgctgccagagacaatgcggattacagcgatgtcatgcccaccagcgaggaagaaatcaaaaccactaaccctgtggccacagaggaatacggtatcgtggcggataacttgcagcagcaaaacacggctcctcaaattggaactgtcaacagccagggggccttacccggtatggtctggcagaaccgggacgtgtacctgcagggtcccatctgggccaagattcctcacacggacggcaacttccacccgtctccgctgatgggcggctttggcctgaaacatcctccgcctcagatcctgatcaagaacacgcctgtacctgcggatcctccgaccaccttcaaccagtcaaagctgaactctttcatcacgcaatacagcaccggacaggtcagcgtggaaattgaatgggagctgcagaaggaaaacagcaagcgctggaaccccgagatccagtacacctccaactactacaaatctacaagtgtggactttgctgttaatacagaaggcgtgtactctgaaccccgccccattggcacccgttacctcacccgtaatctgtaa

SEQ ID NO: 3787 - DNA, 2217 bp, synthetic construct
  misc_feature 1..2217: note = source = /note="Description of Artificial Sequence: Synthetic polynucleotide"
  source 1..2217: mol_type = other DNA
atggctgccgatggttatcttccagattggctcgaggacaacctctctgagggcattcgcgagtggtgggcgctgaaacctggagccccgaagcccaaagccaaccagcaaaagcaggacgacggccggggtctggtgcttcctggctacaagtacctcggacccttcaacggactcgacaagggggagcccgtcaacgcggcggacgcggcggccctcgagcacgacaaggcctacgaccagcagctgcaggcgggtgacaatccgtacctgcggtataaccacgccgacgccgagtttcaggagcgtctgcaagaagatacgtcttttgggggcaacctcgggcgagcagtcttccaggccaagaagcgggttctcgaacctctcggtctggttgaggaaggcgctaagacggctcctggaaagaagagaccggtagagccatcaccccagcgttctccagactcctctacgggcatcggcaagaagggccaacagcccgccagaaaaagactcaattttggtcagactggcgactcagagtcagttccagaccctcaacctctcggagaacctccagcagcgccctctggtgtgggacctaatacaatggctgcaggcggtggcgcaccaatggcagacaataacgaaggcgccgacggagtgggtagttcctcgggaaattggcattgcgattccacatggctgggcgacagagtcatcaccaccagcacccgaacctgggccctgcccacctacaacaaccacctctacaagcaaatctccaacgggacatcgggaggagccaccaacgacaacacctacttcggctacagcaccccctgggggtattttgactttaacagattccactgccgcttttcaccacgtgactggcagcgactcatcaacaacaactggggattccggcccaagagactcagcttcaagctcttcaacatccaggtcaaggaggtcacgcagaatgaaggcaccaagaccatcgccaataacctcaccagcaccatccaggtgtttacggactcggagtaccagctgccgtacgttctcggctctgcccaccagggctgcctgcctccgttcccggcggacgtgttcacgattccccagtacggctacctaacactcaacaacggtagtcaggccgtgggacgctcctccttctactgcctggaatactttccttcgcagatgctgagaaccggcaacaacttccagtttacttacaccttcgaggacgtgcctttccacagcagctacgcccacagccagagcttggaccggctgatgaatcctctgattgaccagtacctgtactacttgtctcggattcaaacaacaggaggcacggcaaatacgcagactctgggcttcagccaaggtgggcctaatacaatggccaatcaggcaaagaactggctgccaggaccctgttaccgccaacaacgcgtctcaacgacaaccgggcaaaacaacaatagcaactttgcctggactgctgggaccaaataccatctgaatggaagaaattcattggctaatcctggcatcgctatggcaacacacaaagacgacgaggagcgtttttttcccagtaacgggatcctgatttttggcaaacaaaatgctgccagagacaatgcggattacagcgatgtcatgcccaccagcgaggaagaaatcaaaaccactaaccctgtggccacagaggaatacggtatcgtggcagataacttgcagcagcaaaacacggctcctcaaattggaactgtcaacagccagggggccttacccggtatggtctggcagaaccgggacgtgtacctgcagggtcccatctgggccaagattcctcacacggacggcaacttccacccgtctccgctgatgggcggctttggcctgaaacatcctccgcctcagatcctgatcaagaacacgcctgtacctgcggatcctccgaccaccttcaaccagtcaaagctgaactctttcatcacgcaatacagcaccggacaggtcagcgtggaaattgaatgggagctgcagaaggaaaacagcaagcgctggaaccccgagatccagtacacctccaactactacaaatctacaagtgtggactttgctgttaatacagaaggcgtgtactctgaaccccgccccattggcacccgttacctcacccgtaatctgtaa

SEQ ID NO: 3788 - DNA, 2217 bp, synthetic construct
  misc_feature 1..2217: note = source = /note="Description of Artificial Sequence: Synthetic polynucleotide"
  source 1..2217: mol_type = other DNA
atggctgccgatggttatcttccagattggctcgaggacaacctctctgagggcattcgcgagtggtgggcgctgaaacctggagccccgaagcccaaagccaaccagcaaaagcaggacgacggccggggtctggtgcttcctggctacaagtacctcggacccttcaacggactcgacaagggggagcccgtcaacgcggcggacgcggcggccctcgagcacgacaaggcctacgaccagcagctgcaggcgggtgacaatccgtacctgcggtataaccacgccgacgccgagtttcaggagcgtctgcaagaagatacgtcttttgggggcaacctcgggcgagcagtcttccaggccaagaagcgggttctcgaacctctcggtctggttgaggaaggcgctaagacggctcctggaaagaagagaccggtagagccatcaccccagcgttctccagactcctctacgggcatcggcaagaagggccaacagcccgccagaaaaagactcaattttggtcagactggcgactcagagtcagttccagaccctcaacctctcggagaacctccagcagcgccctctggtgtgggacctaatacaatggctgcaggcggtggcgcaccaatggcagacaataacgaaggcgccgacggagtgggtagttcctcgggaaattggcattgcgattccacatggctgggcgacagagtcatcaccaccagcacccgaacctgggccctgcccacctacaacaaccacctctacaagcaaatctccaacgggacatcgggaggagccaccaacgacaacacctacttcggctacagcaccccctgggggtattttgactttaacagattccactgccacttttcaccacgtgactggcagcgactcatcaacaacaactggggattccggcccaagagactcagcttcaagctcttcaacatccaggtcaaggaggtcacgcagaatgaaggcaccaagaccatcgccaataacctcaccagcaccatccaggtgtttacggactcggagtaccagctgccgtacgttctcggctctgcccaccagggctgcctgcctccgttcccggcggacgtgttcacgattccccagtacggctacctaacactcaacaacggtagtcaggccgtgggacgctcctccttctactgcctggaatactttccttcgcagatgctgagaaccggcaacaacttccagtttacttacaccttcgaggacgtgcctttccacagcagctacgcccacagccagagcttggaccggctgatgaatcctctgattgaccagtacctgtactacttgtctcggattcaaacaacaggaggcacggcaaatacgcagactctgggcttcagccaaggtgggcctaatacaatggccaatcaggcaaagaactggctgccaggaccctgttaccgccaacaacgcgtctcaacgacaaccgggcaaaacaacaatagcaactttgcctggactgctgggaccaaataccatctgaatggaagaaattcattggctaatcctggcatcgctatggcaacacacaaagacgacgaggagcgtttttttcccagtaacgggatcctgatttttggcaaacaaaatgctgccagagacaatgcggattacagcgatgtcatgcccaccagcgaggaagaaatcaaaaccactaaccctgtggccacagaggaatacggtatcgtggcagataacttgcagcagcaaaacgcggctcctcaaattggaactgtcaacagccagggggccttacccggtatggtctggcagaaccgggacgtgtacctgcagggtcccatctgggccaagattcctcacacggacggcaacttccacccgtctccgctgatgggcggctttggcctgaaacatcctccgcctcagatcctgatcaagaacacgcctgtacctgcggatcctccgaccaccttcaaccagtcaaagctgaactctttcatcacgcaatacagcaccggacaggtcagcgtggaaattgaatgggagctgcagaaggaaaacagcaagcgctggaaccccgagatccagtacacctccaactactacaaatctacaagtgtggactttgctgttaatacagaaggcgtgtactctgaaccccgccccattggcacccgttacctcacccgtaatctgtaa

SEQ ID NO: 3789 - DNA, 2217 bp, synthetic construct
  misc_feature 1..2217: note = source = /note="Description of Artificial Sequence: Synthetic polynucleotide"
  source 1..2217: mol_type = other DNA
atggctgccgatggttatcttccagattggctcgaggacaacctctctgagggcattcgcgagtggtgggcgctgaaacctggagccccgaagcccaaagccaaccagcaaaagcaggacgacggccggggtctggtgcttcctggctacaagtacctcggacccttcaacggactcgacaagggggagcccgtcaacgcggcggacgcggcggccctcgagcacgacaaggcctacgaccagcagctgcaggcgggtgacaatccgtacctgcggtataaccacgccgacgccgagtttcaggagcgtctgcaagaagatacgtcttttgggggcaacctcgggcgagcagtcttccaggccaagaagcgggttctcgaacctctcggtctggttgaggaaggcgctaagacggctcctggaaagaagagaccggtagagccatcaccccagcgttctccagactcctctacgggcatcggcaagaagggccaacagcccgccagaaaaagactcaattttggtcagactggcgactcagagtcagttccagaccctcaacctctcggagaacctccagcagcgccctctggtgtgggacctaatacaatggctgcaggcggtggcgcaccaatggcagacaataacgaaggcgccgacggagtgggtagttcctcgggaaattggcattgcgattccacatggctgggcgacagagtcatcaccaccagcacccgaacctgggccctgcccacctacaacaaccacctctacaagcaaatctccaacgggacatcgggaggagccaccaacgacaacacctacttcggctacagcaccccctgggggtattttgactttaacagattccactgccacttttcaccacgtgactggcagcgactcatcaacaacaactggggattccggcccaagagactcagcttcaagctcttcaacatccaggtcaaggaggtcacgcagaatgaaggcaccaagaccatcgccaatagcctcaccagcaccatccaggtgtttacggactcggagtaccagctgccgtacgttctcggctctgcccaccagggctgcctgcctccgttcccggcggacgtgttcacgattccccagtacggctacctaacactcaacaacggtagtcaggccgtgggacgctcctccttctactgcctggaatactttccttcgcagatgctgagaaccggcaacaacttccagtttacttacaccttcgaggacgtgcctttccacagcagctacgcccacagccagagcttggaccggctgatgaatcctctgattgaccagtacctgtactacttgtctcggattcaaacaacaggaggcacggcaaatacgcagactctgggcttcagccaaggtgggcctaatacaatggccaatcaggcaaagaactggctgccaggaccctgttaccgccaacaacgcgtctcaacgacaaccgggcaaaacaacaatagcaactttgcctggactgctgggaccaaataccatctgaatggaagaaattcattggctaatcctggcatcgctatggcaacacacaaagacgacgaggagcgtttttttcccagtaacgggatcctgatttttggcaaacaaaatgctgccagagacaatgcggattacagcgatgtcatgcccaccagcgaggaagaaatcaaaaccactaaccctgtggccacagaggaatacggtatcgtggcagataacttgcagcagcaaaacacggctcctcaaattggaactgtcaacagccagggggccttacccggtatggtctggcagaaccgggacgtgtacctgcagggtcccatctgggccaagattcctcacacggacggcaacttccacccgtctccgctgatgggcggctttggcctgaaacatcctccgcctcagatcctgatcaagaacacgcctgtacctgcggatcctccgaccaccttcaaccagtcaaagctgaactctttcatcacgcaatacagcaccggacaggtcagcgtggaaattgaatgggagctgcagaaggaaaacagcaagcgctggaaccccgagatccagtacacctccaactactacaaatctgcaagtgtggactttgctgttaatacagaaggcgtgtactctgaaccccgccccattggcacccgttacctcacccgtaatctgtaa

SEQ ID NO: 3790 - DNA, 2217 bp, synthetic construct
  misc_feature 1..2217: note = source = /note="Description of Artificial Sequence: Synthetic polynucleotide"
  source 1..2217: mol_type = other DNA
atggctgccgatggttatcttccagattggctcgaggacaacctctctgagggcattcgcgagtggtgggcgctgaaacctggagccccgaagcccaaagccaaccagcaaaagcaggacgacggccggggtctggtgcttcctggctacaagtacctcggacccttcaacggactcgacaagggggagcccgtcaacgcggcggacgcggcggccctcgagcacgacaaggcctacgaccagcagctgcaggcgggtgacaatccgtacctgcggtataaccacgccgacgccgagtttcaggagcgtctgcaagaagatacgtcttttgggggcaacctcgggcgagcagtcttccaggccaagaagcgggttctcgaacctctcggtctggttgaggaaggcgctaagacggctcctggaaagaagagaccggtagagccatcaccccagcgttctccagactcctctacgggcatcggcaagaagggccaacagcccgccagaaaaagactcaattttggtcagactggcgactcagagtcagttccagaccctcaacctctcggagaacctccagcagcgccctctggtgtgggacctaatacaatggctgcaggcggtggcgcaccaatggcagacaataacgaaggcgccgacggagtgggtagttcctcgggaaattggcattgcgattccacatggctgggcgacagagtcatcaccaccagcacccgaacctgggccctgcccacctacaacaaccacctctacaagcaaatctccaacgggacatcgggaggagccaccaacgacaacacctacttcggctacagcaccccctgggggtattttgactttaacagattccactgccacttttcaccacgtgactggcagcgactcatcaacaacaactggggattccggcccaagagactcagcttcaagctcttcaacatccaggtcaaggaggtcacgcagaatgaaggcaccaagaccatcgccaataacctcaccagcaccatccaggtgtttacggactcggagtaccagctgccgtacgttctcggctctgcccaccagggctgcctgcctccgttcccggcggacgtgttcacgattccccagtacggctacctaacactcaacaacggtagtcaggccgtgggacgctcctccttctactgcctggaatactttccttcgcagatgctgagaaccggcaacaacttccagtttacttacaccttcgaggacgtgcctttccacagcagctacgcccacagccagagcttggaccggctgatgaatcctctgattgaccagtacctgtactacttgtctcggattcaaacaacaggaggcacggcaaatacgcagactctgggcttcagccaaggtgggcctaatacaatggccaatcaggcaaagaactggctgccaggaccctgttaccgccaacaacgcgtctcaacgacaaccgggcaaaacaacaatagcaactttgcctggactgctgggaccaaataccatctgaatggaggaaattcattggctaatcctggcatcgctatggcaacacacaaagacgacgaggagcgtttttttcccagtaacgggatcctgatttttggcaaacaaaatgctgccagagacaatgcggattacagcgatgtcatgcccaccagcgaggaagaaatcaaaaccactaaccctgtggccacagaggaatacggtatcgtggcagataacttgcagcagcaaaacacggctcctcaaattggaactgtcaacagccagggggccttacccggtatggtctggcagaaccgggacgtgtacctgcagggtcccatctgggccaagattcctcacacggacggcaacttccacccgtctccgctgatgggcggctttggcctgaaacatcctccgcctcagatcctgatcaagaacacgcctgtacctgcggatcctccgaccaccttcaaccagtcaaagctgaactctttcatcacgcaatacagcaccggacaggtcagcgtggaaattgaatgggagctgcagaaggaaaacagcaagcgctggaaccccgagatccagtacacctccaactactacaaatctacaagtgtggactttgctgttaatacagaaggcgtgtactctgaaccccgccccattggcacccgttacctcacccgtaatctgtaa

SEQ ID NO: 3791 - DNA, 2217 bp, synthetic construct
  misc_feature 1..2217: note = source = /note="Description of Artificial Sequence: Synthetic polynucleotide"
  source 1..2217: mol_type = other DNA
atggctgccgatggttatcttccagattggctcgaggacaacctctctgagggcattcgcgagtggtgggcgctgaaacctggagccccgaagcccaaagccaaccagcaaaagcaggacgacggccggggtctggtgcttcctggctacaagtacctcggacccttcaacggactcgacaagggggagcccgtcaacgcggcggacgcggcggccctcgagcacgacaaggcctacgaccagcagctgcaggcgggtgacaatccgtacctgcggtataaccacgccgacgccgagtttcaggagcgtctgcaagaagatacgtcttttgggggcaacctcgggcgagcagtcttccaggccaagaagcgggttctcgaacctctcggtctggttgaggaaggcgctaagacggctcctggaaagaagagaccggtagagccatcaccccagcgttctccagactcctctacgggcatcggcaagaagggccaacagcccgccagaaaaagactcaattttggtcagactggcgactcagagtcagttccagaccctcaacctctcggagaacctccagcagcgccctctggtgtgggacctaatacaatggctgcaggcggtggcgcaccaatggcagacaataacgaaggcgccgacggagtgggtagttcctcgggaaattggcattgcgattccacatggctgggcgacagagtcatcaccaccagcacccgaacctgggccctgcccacctacaacaaccacctctacaagcaaatctccaacgggacatcgggaggagccaccaacgacaacacctacttcggctacagcaccccctgggggtattttgactttaacagattccactgccacttttcaccacgtgactggcagcgactcatcaacaacaactggggattccggcccaagagactcagcttcaagctcttcaacatccaggtcaaggaggtcacgcagaatgaaggcaccaagaccatcgccaataacctcaccagcaccatccaggtgtttacggactcggagtaccagctgccgtacgttctcggctctgcccaccagggctgcctgcctccgttcccggcggacgtgttcacgattccccagtacggctacctaacactcaacaacggtagtcaggccgtgggacgctcctccttctactgcctggaatactttccttcgcagatgctgagaaccggcaacaacttccagtttacttacaccttcgaggacgtgcctttccacagcagctacgcccacagccagagcttggaccggctgatgaatcctctgattgaccagtacctgtactacttgtctcggattcaaacaacaggaggcacggcaaatacgcagactctgggcttcagccaaggtgggcctaatacaatggccaatcaggcaaagaactggctgccaggaccctgttaccgccaacaacgcgtctcaacgacaaccgggcaaaacaacaatagcaactttgcctggactgctgggaccaaataccatctgaatggaagaaattcattggctaatcctggcatcgctatggcaacacacaaagacgacgaggagcgtttttttcccagtaacgggatcctgatttttggcaaacaaaatgctgccagagacaatgcggattacagcgatgtcatgcccaccagcgaggaagaaatcaaaaccactaaccctgtggccacagaggaatacggtatcgtggcagataacttgcagcagcaaaacacggctcctcaaattggaactgtcaacagccagggggccttacccggtatggtctggcagaaccgggacgtgtacctgcagggtcccatctgggccaagattcctcacacggacggcaacttccacccgtctccgctgatgggcggctttggcctgaaacatcctccgcctcagatcctgatcaagaacacgcctgtacctgcggatcctccgaccaccttcaaccagtcaaggctgaactctttcatcacgcaatacagcaccggacaggtcagcgtggaaattgaatgggagctgcagaaggaaaacagcaagcgctggaaccccgagatccagtacacctccaactactacaaatctacaagtgtggactttgctgttaatacagaaggcgtgtactctgaaccccgccccattggcacccgttacctcacccgtaatctgtaa

SEQ ID NO: 3792 - DNA, 2217 bp, synthetic construct
  misc_feature 1..2217: note = source = /note="Description of Artificial Sequence: Synthetic polynucleotide"
  source 1..2217: mol_type = other DNA
atggctgccgatggttatcttccagattggctcgaggacaacctctctgagggcattcgcgagtggtgggcgctgaaacctggagccccgaagcccaaagccaaccagcaaaagcaggacgacggccggggtctggtgcttcctggctacaagtacctcggacccttcaacggactcgacaagggggagcccgtcaacgcggcggacgcggcggccctcgagcacgacaaggcctacgaccagcagctgcaggcgggtgacaatccgtacctgcggtataaccacgccgacgccgagtttcaggagcgtctgcaagaagatacgtcttttgggggcaacctcgggcgagcagtcttccaggccaagaagcgggttctcgaacctctcggtctggttgaggaaggcgctaagacggctcctggaaagaagagaccggtagagccatcaccccagcgttctccagactcctctacgggcatcggcaagaagggccaacagcccgccagaaaaagactcaattttggtcagactggcgactcagagtcagttccagaccctcaacctctcggagaacctccagcagcgccctctggtgtgggacctaatacaatggctgcaggcggtggcgcaccaatggcagacaataacgaaggcgccgacggagtgggtagttcctcgggaaattggcattgcgattccacatggctgggcgacagagtcatcaccaccagcacccgaacctgggccctgcccacctacaacaaccacctctacaagcaaatctccaacgggacatcgggaggagccgccaacgacaacacctacttcggctacagcaccccctgggggtattttgactttaacagattccactgccacttttcaccacgtgactggcagcgactcatcaacaacaactggggattccggcccaagagactcagcttcaagctcttcaacatccaggtcaaggaggtcacgcagaatgaaggcaccaagaccatcgccaataacctcaccagcaccatccaggtgtttacggactcggagtaccagctgccgtacgttctcggctctgcccaccagggctgcctgcctccgttcccggcggacgtgttcacgattccccagtacggctacctaacactcaacaacggtagtcaggccgtgggacgctcctccttctactgcctggaatactttccttcgcagatgctgagaaccggcaacaacttccagtttacttacaccttcgaggacgtgcctttccacagcagctacgcccacagccagagcttggaccggctgatgaatcctctgattgaccagtacctgtactacttgtctcggattcaaacaacaggaggcacggcaaatacgcagactctgggcttcagccaaggtgggcctaatacaatggccaatcaggcaaagaactggctgccaggaccctgttaccgccaacaacgcgtctcaacgacaaccgggcaaaacaacaatagcaactttgcctggactgctgggaccaaataccatctgaatggaagaaattcattggctaatcctggcatcgctatggcaacacacaaagacgacgaggagcgtttttttcccagtaacgggatcctgatttttggcaaacaaaatgctgccagagacaatgcggattacagcgatgtcatgcccaccagcgaggaagaaatcaaaaccactaaccctgtggccacagaggaatacggtatcgtggcagataacttgcagcagcaaaacacggctcctcaaattggaactgtcaacagccagggggccttacccggtatggtctggcagaaccgggacgtgtacctgcagggtcccatctgggccaagattcctcacacggacggcaacttccacccgtctccgctgatgggcggctttggcctgaaacatcctccgcctcagatcctgatcaagaacacgcctgtacctgcggatcctccgaccaccttcaaccagtcaaagctgaactctttcatcacgcaatacagcaccggacaggtcagcgtggaaattgaatgggagctgcagaaggaaaacagcaagcgctggaaccccgagatccagtacacctccaactactacaaatctacaagtgtggactttgctgttaatacagaaggcgtgtactctgaaccccgccccattggcacccgttacctcacccgtaatctgtaa

SEQ ID NO: 3793 - DNA, 2217 bp, synthetic construct
  misc_feature 1..2217: note = source = /note="Description of Artificial Sequence: Synthetic polynucleotide"
  source 1..2217: mol_type = other DNA
atggctgccgatggttatcttccagattggctcgaggacaacctctctgagggcattcgcgagtggtgggcgctgaaacctggagccccgaagcccaaagccaaccagcaaaagcaggacgacggccggggtctggtgcttcctggctacaagtacctcggacccttcaacggactcgacaagggggagcccgtcaacgcggcggacgcggcggccctcgagcacgacaaggcctacgaccagcagctgcaggcgggtgacaatccgtacctgcggtataaccacgccgacgccgagtttcaggagcgtctgcaagaagatacgtcttttgggggcaacctcgggcgagcagtcttccaggccaagaagcgggttctcgaacctctcggtctggttgaggaaggcgctaagacggctcctggaaagaagagaccggtagagccatcaccccagcgttctccagactcctctacgggcatcggcaagaagggccaacagcccgccagaaaaagactcaattttggtcagactggcgactcagagtcagttccagaccctcaacctctcggagaacctccagcagcgccctctggtgtgggacctaatacaatggctgcaggcggtggcgcaccaatggcaggcaataacgaaggcgccgacggagtgggtagttcctcgggaaattggcattgcgattccacatggctgggcgacagagtcatcaccaccagcacccgaacctgggccctgcccacctacaacaaccacctctacaagcaaatctccaacgggacatcgggaggagccaccaacgacaacacctacttcggctacagcaccccctgggggtattttgactttaacagattccactgccacttttcaccacgtgactggcagcgactcatcaacaacaactggggattccggcccaagagactcagcttcaagctcttcaacatccaggtcaaggaggtcacgcagaatgaaggcaccaagaccatcgccaataacctcaccagcaccatccaggtgtttacggactcggagtaccagctgccgtacgttctcggctctgcccaccagggctgcctgcctccgttcccggcggacgtgttcacgattccccagtacggctacctaacactcaacaacggtagtcaggccgtgggacgctcctccttctactgcctggaatactttccttcgcagatgctgagaaccggcaacaacttccagtttacttacaccttcgaggacgtgcctttccacagcagctacgcccacagccagagcttggaccggctgatgaatcctctgattgaccagtacctgtactacttgtctcggattcaaacaacaggaggcacggcaaatacgcagactctgggcttcagccaaggtgggcctaatacaatggccaatcaggcaaagaactggctgccaggaccctgttaccgccaacaacgcgtctcaacgacaaccgggcaaaacaacaatagcaactttgcctggactgctgggaccaaataccatctgaatggaagaaattcattggctaatcctggcatcgctatggcaacacacaaagacgacgaggagcgtttttttcccagtaacgggatcctgatttttggcaaacaaaatgctgccagagacaatgcggattacagcgatgtcatgcccaccagcgaggaagaaatcaaaaccactaaccctgtggccacagaggaatacggtatcgtggcagataacttgcagcagcaaaacacggctcctcaaattggaactgtcaacagccagggggccttacccggtatggtctggcagaaccgggacgtgtacctgcagggtcccatctgggccaagattcctcacacggacggcaacttccacccgtctccgctgatgggcggctttggcctgaaacatcctccgcctcagatcctgatcaagaacacgcctgtacctgcggatcctccgaccaccttcaaccagtcaaagctgaactctttcatcacgcaatacagcaccggacaggtcagcgtggaaattgaatgggagctgcagaaggaaaacagcaagcgctggaaccccgagatccagtacacctccaactactacaaatctacaagtgtggactttgctgttaatacagaaggcgtgtactctgaaccccgccccattggcacccgttacctcacccgtaatctgtaa

SEQ ID NO: 3794 - DNA, 2217 bp, synthetic construct
  misc_feature 1..2217: note = source = /note="Description of Artificial Sequence: Synthetic polynucleotide"
  source 1..2217: mol_type = other DNA
atggctgccgatggttatcttccagattggctcgaggacaacctctctgagggcattcgcgagtggtgggcgctgaaacctggagccccgaagcccaaagccaaccagcaaaagcaggacgacggccggggtctggtgcttcctggctacaagtacctcggacccttcaacggactcgacaagggggagcccgtcaacgcggcggacgcggcggccctcgagcacgacaaggcctacgaccagcagctgcaggcgggtgacaatccgtacctgcggtataaccacgccgacgccgagtttcaggagcgtctgcaagaagatacgtcttttgggggcaacctcgggcgagcagtcttccaggccaagaagcgggttctcgaacctctcggtctggttgaggaaggcgctaagacggctcctggaaagaagagaccggtagagccatcaccccagcgttctccagactcctctacgggcatcggcaggaagggccaacagcccgccagaaaaagactcaattttggtcagactggcgactcagagtcagttccagaccctcaacctctcggagaacctccagcagcgccctctggtgtgggacctaatacaatggctgcaggcggtggcgcaccaatggcagacaataacgaaggcgccgacggagtgggtagttcctcgggaaattggcattgcgattccacatggctgggcgacagagtcatcaccaccagcacccgaacctgggccctgcccacctacaacaaccacctctacaagcaaatctccaacgggacatcgggaggagccaccaacgacaacacctacttcggctacagcaccccctgggggtattttgactttaacagattccactgccacttttcaccacgtgactggcagcgactcatcaacaacaactggggattccggcccaagagactcagcttcaagctcttcaacatccaggtcaaggaggtcacgcagaatgaaggcaccaagaccatcgccaataacctcaccagcaccatccaggtgtttacggactcggagtaccagctgccgtacgttctcggctctgcccaccagggctgcctgcctccgttcccggcggacgtgttcacgattccccagtacggctacctaacactcaacaacggtagtcaggccgtgggacgctcctccttctactgcctggaatactttccttcgcagatgctgagaaccggcaacaacttccagtttacttacaccttcgaggacgtgcctttccacagcagctacgcccacagccagagcttggaccggctgatgaatcctctgattgaccagtacctgtactacttgtctcggattcaaacaacaggaggcacggcaaatacgcagactctgggcttcagccaaggtgggcctaatacaatggccaatcaggcaaagaactggctgccaggaccctgttaccgccaacaacgcgtctcaacgacaaccgggcaaaacaacaatagcaactttgcctggactgctgggaccaaataccatctgaatggaagaaattcattggctaatcctggcatcgctatggcaacacacaaagacgacgaggagcgtttttttcccagtaacgggatcctgatttttggcaaacaaaatgctgccagagacaatgcggattacagcgatgtcatgcccaccagcgaggaagaaatcaaaaccactaaccctgtggccacagaggaatacggtatcgtggcagataacttgcagcagcaaaacacggctcctcaaattggaactgtcaacagccagggggccttacccggtatggtctggcagaaccgggacgtgtacctgcagggtcccatctgggccaagattcctcacacggacggcaacttccacccgtctccgctgatgggcggctttggcctgaaacatcctccgcctcagatcctgatcaagaacacgcctgtacctgcggatcctccgaccaccttcaaccagtcaaagctgaactctttcatcacgcaatacagcaccggacaggtcagcgtggaaattgaatgggagctgcagaaggaaaacagcaagcgctggaaccccgagatccagtacacctccaactactacaaatctacaagtgtggactttgctgttaatacagaaggcgtgtactctgaaccccgccccattggcacccgttacctcacccgtaatctgtaa

SEQ ID NO: 3795 - DNA, 2217 bp, synthetic construct
  misc_feature 1..2217: note = source = /note="Description of Artificial Sequence: Synthetic polynucleotide"
  source 1..2217: mol_type = other DNA
atggctgccgatggttatcttccagattggctcgaggacaacctctctgagggcattcgcgagtggtgggcgctgaaacctggagccccgaagcccaaagccaaccagcaaaagcaggacgacggccggggtctggtgcttcctggctacaagtacctcggacccttcaacggactcgacaagggggagcccgtcaacgcggcggacgcggcggccctcgagcacgacaaggcctacgaccagcagctgcaggcgggtgacaatccgtacctgcggtataaccacgccgacgccgagtttcaggagcgtctgcaagaagatacgtcttttgggggcaacctcgggcgagcagtcttccaggccaagaagcgggttctcgaacctctcggtctggttgaggaaggcgctaagacggctcctggaaagaagagaccggtagagccatcaccccagcgttctccagactcctctacgggcatcggcaagaagggccaacagcccgccagaaaaagactcaattttggtcagactggcgactcagagtcagttccagaccctcaacctctcggagaacctccagcagcgccctctggtgtgggacctaatacaatggctgcaggcggtggcgcaccaatggcagacaataacgaaggcgccgacggagtgggtagttcctcgggaaattggcattgcgattccacatggctgggcgacagagtcatcaccaccagcacccgaacctgggccctgcccacctacaacaaccacctctacaagcaaatctccaacgggacatcgggaggagccaccaacgacaacacctacttcggctacggcaccccctgggggtattttgactttaacagattccactgccacttttcaccacgtgactggcagcgactcatcaacaacaactggggattccggcccaagagactcagcttcaagctcttcaacatccaggtcaaggaggtcacgcagaatgaaggcaccaagaccatcgccaataacctcaccagcaccatccaggtgtttacggactcggagtaccagctgccgtacgttctcggctctgcccaccagggctgcctgcctccgttcccggcggacgtgttcacgattccccagtacggctacctaacactcaacaacggtagtcaggccgtgggacgctcctccttctactgcctggaatactttccttcgcagatgctgagaaccggcaacaacttccagtttacttacaccttcgaggacgtgcctttccacagcagctacgcccacagccagagcttggaccggctgatgaatcctctgattgaccagtacctgtactacttgtctcggattcaaacaacaggaggcacggcaaatacgcagactctgggcttcagccaaggtgggcctaatacaatggccaatcaggcaaagaactggctgccaggaccctgttaccgccaacaacgcgtctcaacgacaaccgggcaaaacaacaatagcaactttgcctggactgctgggaccaaataccatctgaatggaagaaattcattggctaatcctggcatcgctatggcaacacacaaagacgacgaggagcgtttttttcccagtaacgggatcctgatttttggcaaacaaaatgctgccagagacaatgcggattacagcgatgtcatgcccaccagcgaggaagaaatcaaaaccactaaccctgtggccacagaggaatacggtatcgtggcagataacttgcagcagcaaaacacggctcctcaaattggaactgtcaacagccagggggccttacccggtatggtctggcagaaccgggacgtgtacctgcagggtcccatctgggccaagattcctcacacggacggcaacttccacccgtctccgctgatgggcggctttggcctgaaacatcctccgcctcagatcctgatcaagaacacgcctgtacctgcggatcctccgaccaccttcaaccagtcaaagctgaactctttcatcacgcaatacagcaccggacaggtcagcgtggaaattgaatgggagctgcagaaggaaaacagcaagcgctggaaccccgagatccagtacacctccaactactacaaatctacaagtgtggactttgctgttaatacagaaggcgtgtactctgaaccccgccccattggcacccgttacctcacccgtaatctgtaa

SEQ ID NO: 3796 - DNA, 2217 bp, synthetic construct
  misc_feature 1..2217: note = source = /note="Description of Artificial Sequence: Synthetic polynucleotide"
  source 1..2217: mol_type = other DNA
atggctgccgatggttatcttccagattggctcgaggacaacctctctgagggcattcgcgagtggtgggcgctgaaacctggagccccgaagcccaaagccaaccagcaaaagcaggacgacggccggggtctggtgcttcctggctacaagtacctcggacccttcaacggactcgacaagggggagcccgtcaacgcggcggacgcggcggccctcgagcacgacaaggcctacgaccagcagctgcaggcgggtgacaatccgtacctgcggtataaccacgccgacgccgagtttcaggagcgtctgcaagaagatacgtcttttgggggcaacctcgggcgagcagtcttccaggccaagaagcgggttctcgaacctctcggtctggttgaggaaggcgctaagacggctcctggaaagaagagaccggtagagccatcaccccagcgttctccagactcctctacgggcatcggcaagaagggccaacagcccgccagaaaaagactcaattttggtcagactggcgactcagagtcagttccagaccctcaacctctcggagaacctccagcagcgccctctggtgtgggacctaatacaatggctgcaggcggtggcgcaccaatggcagacaataacgaaggcgccgacggagtgggtagttcctcgggaaattggcattgcgattccacatggctgggcgacagagtcatcaccaccagcacccgaacctgggccctgcccacctacaacaaccacctctacaagcaaatctccaacgggacatcgggaggagccaccaacgacaacacctacttcggctacagcaccccctgggggtattttgactttaacagattccactgccacttttcaccacgtgactggcagcgactcatcaacaacaactggggattccggcccaagagactcagcttcaagctcttcaacatccaggtcaaggaggtcacgcagaatgaaggcaccaagaccatcgccaataacctcaccagcaccatccaggtgtttacggactcggagtaccagctgccgtacgttctcggctctgcccaccagggctgcctgcctccgttcccggcggacgtgttcacgattccccagtacggctacctaacactcaacaacggtagtcaggccgtgggacgctcctccttctactgcctggaatactttccttcgcagatgctgagaaccggcaacaacttccagtttacttacaccttcgaggacgtgcctttccacagcagctacgcccacagccagagcttggaccggccgatgaatcctctgattgaccagtacctgtactacttgtctcggattcaaacaacaggaggcacggcaaatacgcagactctgggcttcagccaaggtgggcctaatacaatggccaatcaggcaaagaactggctgccaggaccctgttaccgccaacaacgcgtctcaacgacaaccgggcaaaacaacaatagcaactttgcctggactgctgggaccaaataccatctgaatggaagaaattcattggctaatcctggcatcgctatggcaacacacaaagacgacgaggagcgtttttttcccagtaacgggatcctgatttttggcaaacaaaatgctgccagagacaatgcggattacagcgatgtcatgcccaccagcgaggaagaaatcaaaaccactaaccctgtggccacagaggaatacggtatcgtggcagataacttgcagcagcaaaacacggctcctcaaattggaactgtcaacagccagggggccttacccggtatggtctggcagaaccgggacgtgtacctgcagggtcccatctgggccaagattcctcacacggacggcaacttccacccgtctccgctgatgggcggctttggcctgaaacatcctccgcctcagatcctgatcaagaacacgcctgtacctgcggatcctccgaccaccttcaaccagtcaaagctgaactctttcatcacgcaatacagcaccggacaggtcagcgtggaaattgaatgggagctgcagaaggaaaacagcaagcgctggaaccccgagatccagtacacctccaactactacaaatctacaagtgtggactttgctgttaatacagaaggcgtgtactctgaaccccgccccattggcacccgttacctcacccgtaatctgtaa

SEQ ID NO: 3797 - DNA, 2217 bp, synthetic construct
  misc_feature 1..2217: note = source = /note="Description of Artificial Sequence: Synthetic polynucleotide"
  source 1..2217: mol_type = other DNA
atggctgccgatggttatcttccagattggctcgaggacaacctctctgagggcattcgcgagtggtgggcgctgaaacctggagccccgaagcccaaagccaaccagcaaaagcaggacgacggccggggtctggtgcttcctggctacaagtacctcggacccttcaacggactcgacaagggggagcccgtcaacgcggcggacgcggcggccctcgagcacgacaaggcctacgaccagcagctgcaggcgggtgacaatccgtacctgcggtataaccacgccgacgccgagtttcaggagcgtctgcaagaagatacgtcttttgggggcaacctcgggcgagcagtcttccaggccaagaagcgggttctcgaacctctcggtctggttgaggaaggcgctaagacggctcctggaaagaagagaccggtagagccatcaccccagcgttctccagactcctctacgggcatcggcaagaagggccaacagcccgccagaaaaagactcaattttggtcagactggcgactcagagtcagttccagaccctcaacctctcggagaacctccagcagcgccctctggtgtgggacctaatacaatggctgcaggcggtggcgcaccaatggcagacaataacgaaggcgccgacggagtgggtagttcctcgggaaattggcattgcgattccacatggctgggcgacagagtcatcaccaccagcacccgaacctgggccctgcccacctacaacaaccacctctacaagcaaatctccaacgggacatcgggaggagccaccaacgacaacacctacttcggctacagcaccccctgggggtattttgactttaacagattccactgccacttttcaccacgtgactggcagcgactcatcaacaacaactggggattccggcccaagagactcagcctcaagctcttcaacatccaggtcaaggaggtcacgcagaatgaaggcaccaagaccatcgccaataacctcaccagcaccatccaggtgtttacggactcggagtaccagctgccgtacgttctcggctctgcccaccagggctgcctgcctccgttcccggcggacgtgttcacgattccccagtacggctacctaacactcaacaacggtagtcaggccgtgggacgctcctccttctactgcctggaatactttccttcgcagatgctgagaaccggcaacaacttccagtttacttacaccttcgaggacgtgcctttccacagcagctacgcccacagccagagcttggaccggctgatgaatcctctgattgaccagtacctgtactacttgtctcggattcaaacaacaggaggcacggcaaatacgcagactctgggcttcagccaaggtgggcctaatacaatggccaatcaggcaaagaactggctgccaggaccctgttaccgccaacaacgcgtctcaacgacaaccgggcaaaacaacaatagcaactttgcctggactgctgggaccaaataccatctgaatggaagaaattcattggctaatcctggcatcgctatggcaacacacaaagacgacgaggagcgtttttttcccagtaacgggatcctgatttttggcaaacaaaatgctgccagagacaatgcggattacagcgatgtcatgcccaccagcgaggaagaaatcaaaaccactaaccctgtggccacagaggaatacggtatcgtggcagataacttgcagcagcaaaacacggctcctcaaattggaactgtcaacagccagggggccttacccggtatggtctggcagaaccgggacgtgtacctgcagggtcccatctgggccaagattcctcacacggacggcaacttccacccgtctccgctgatgggcggctttggcctgaaacatcctccgcctcagatcctgatcaagaacacgcctgtacctgcggatcctccgaccaccttcaaccagtcaaagctgaactctttcatcacgcaatacagcaccggacaggtcagcgtggaaattgaatgggagctgcagaaggaaaacagcaagcgctggaaccccgagatccagtacacctccaactactacaaatctacaagtgtggactttgctgttaatacagaaggcgtgtactctgaaccccgccccattggcacccgttacctcacccgtaatctgtaa

SEQ ID NO: 3798 - DNA, 2217 bp, synthetic construct
  misc_feature 1..2217: note = source = /note="Description of Artificial Sequence: Synthetic polynucleotide"
  source 1..2217: mol_type = other DNA
atggctgccgatggttatcttccagattggctcgaggacaacctctctgagggcattcgcgagtggtgggcgctgaaacctggagccccgaagcccaaagccaaccagcaaaagcaggacgacggccggggtctggtgcttcctggctacaagtacctcggacccttcaacggactcgacaagggggagcccgtcaacgcggcggacgcggcggccctcgagcacgacaaggcctacgaccagcagctgcaggcgggtgacaatccgtacctgcggtataaccacgccgacgccgagtttcaggagcgtctgcaagaagatacgtcttttgggggcaacctcgggcgagcagtcttccaggccaagaagcgggttctcgaacctctcggtctggttgaggaaggcgctaagacggctcctggaaagaagagaccggtagagccatcaccccagcgttctccagactcctctacgggcatcggcaagaagggccaacagcccgccagaaaaagactcaattttggtcagactggcgactcagagtcagttccagaccctcaacctctcggagaacctccagcagcgccctctggtgtgggacctaatacaatggctgcaggcggtggcgcaccaatggcagacaataacgaaggcgccgacggagtgggtagttcctcgggaaattggcattgcgattccacatggctgggcgacagagtcatcaccaccagcacccgaacctgggccctgcccacctacaacaaccacctctacaagcaaatctccaacgggacatcgggaggagccaccaacgacaacacctacttcggctacagcaccccctgggggtattttgactttaacagattccactgccacttttcaccacgtgactggcagcgactcatcaacaacaactggggattccggcccaagagactcagcttcaagctcttcaacatccaggtcaaggaggtcacgcagaatgaaggcaccaagaccatcgccaataacctcaccagcaccatccaggtgtttacggactcggagtaccagctgccgtacgttctcggctctgcccaccagggctgcctgcctccgttcccggcggacgtgttcacgattccccagtacggctacctaacactcaacaacggtagtcaggccgtgggacgctcctccttctactgcctggaatactttccttcgcagatgctgagaaccggcaacaacttccagtttacttacaccttcgaggacgtgcctttccacagcagctacgcccacagccagagcttggaccggctgatgaatcctctgattgaccagtacctgtactacttgtctcggattcaaacaacaggaggcacggcaaatacgcagactctgggcttcagccaaggtgggcctaatacaatggccaatcaggcaaagaactggctgccaggaccctgttaccgccaacaacgcgtctcaacgacaaccgggcaaaacaacaatagcaactttgcctggactgctgggaccaaataccatctgaatggaagaaattcattggctaatcctggcatcgctatggcaacacacaaagacgacgaggagcgtttttttcccagtaacgggatcctgatttttggcaaacaaaatgctgccagagacaatgcggattacagcgatgtcacgcccaccagcgaggaagaaatcaaaaccactaaccctgtggccacagaggaatacggtatcgtggcagataacttgcagcagcaaaacacggctcctcaaattggaactgtcaacagccagggggccttacccggtatggtctggcagaaccgggacgtgtacctgcagggtcccatctgggccaagattcctcacacggacggcaacttccacccgtctccgctgatgggcggctttggcctgaaacatcctccgcctcagatcctgatcaagaacacgcctgtacctgcggatcctccgaccaccttcaaccagtcaaagctgaactctttcatcacgcaatacagcaccggacaggtcagcgtggaaattgaatgggagctgcagaaggaaaacagcaagcgctggaaccccgagatccagtacacctccaactactacaaatctacaagtgtggactttgctgttaatacagaaggcgtgtactctgaaccccgccccattggcacccgttacctcacccgtaatctgtaa

SEQ ID NO: 3799 - DNA, 2217 bp, synthetic construct
  misc_feature 1..2217: note = source = /note="Description of Artificial Sequence: Synthetic polynucleotide"
  source 1..2217: mol_type = other DNA
atggctgccgatggttatcttccagattggctcgaggacaacctctctgagggcattcgcgagtggtgggcgctgaaacctggagccccgaagcccaaagccaaccagcaaaagcaggacgacggccggggtctggtgcttcctggctacaagtacctcggacccttcaacggactcgacaagggggagcccgtcaacgcggcggacgcggcggccctcgagcacgacaaggcctacgaccagcagctgcaggcgggtgacaatccgtacctgcggtataaccacgccgacgccgagtttcaggagcgtctgcaagaagatacgtcttttgggggcaacctcgggcgagcagtcttccaggccaagaagcgggttctcgaacctctcggtctggttgaggaaggcgctaagacggctcctggaaagaagagaccggtagagccatcaccccagcgttctccagactcctctacgggcatcggcaagaagggccaacagcccgccagaaaaagactcaattttggtcagactggcgactcagagtcagttccagaccctcaacctctcggagaacctccagcagcgccctctggtgtgggacctaatacaatggctgcaggcggtggcgcaccaatggcagacaataacgaaggcgccgacggagtgggtagttcctcgggaaattggcattgcgattccacatggctgggcgacagagtcatcaccaccagcacccgaacctgggccctgcccacctacaacaaccacctctacaagcaaatctccaacgggacatcgggaggagccaccaacgacaacacctacttcggctacagcaccccctgggggtattttgactttaacagattccactgccacttttcaccacgtgactggcagcgactcatcaacaacaactggggattccggcccaagagactcagcttcaagctcttcaacatccaggtcaaggaggtcacgcagaatgaaggcaccaagaccatcgccaataacctcaccagcaccatccaggtgtttacggactcggagtaccagctgccgtacgttctcggctctgcccaccagggctgcctgcctccgttcccggcggacgtgttcacgattccccagtacggctacctaacactcaacaacggtagtcaggccgtgggacgctcctccttctactgcctggaatactttccttcgcagatgctgagaaccggcaacaacttccagtttacttacaccttcgaggacgtgcctttccacagcagctacgcccacagccagagcttggaccggctgatgaatcctctgattgaccagtacctgtactacttgtctcggattcaaacaacaggaggcacggcaaatacgcagactctgggcttcagccaaggtgggcctaatacaatggccaatcaggcaaagaactggctgccaggaccctgttaccgccaacaacgcgtctcaacgacaaccgggcaaaacaacaatagcaactttgcctggactgctgggaccaaataccatctgaatggaagaaattcattggctaatcctggcatcgctatggcaacacacaaagacgacgaggagcgtttttttcccagtaacgggatcctgatttttggcaaacaaaatgctgccagagacaatgcggattacagcgatgtcatgcccaccagcgaggaagaaatcaaaaccactaaccctgtggccacagaggaatacggtatcgtggcagataacttgcagcagcaaaacacggctcctcaaattggaactgtcaacagccagggggccttacccggtatggtccggcagaaccgggacgtgtacctgcagggtcccatctgggccaagattcctcacacggacggcaacttccacccgtctccgctgatgggcggctttggcctgaaacatcctccgcctcagatcctgatcaagaacacgcctgtacctgcggatcctccgaccaccttcaaccagtcaaagctgaactctttcatcacgcaatacagcaccggacaggtcagcgtggaaattgaatgggagctgcagaaggaaaacagcaagcgctggaaccccgagatccagtacacctccaactactacaaatctacaagtgtggactttgctgttaatacagaaggcgtgtactctgaaccccgccccattggcacccgttacctcacccgtaatctgtaa

SEQ ID NO: 3800 - DNA, 2217 bp, synthetic construct
  misc_feature 1..2217: note = source = /note="Description of Artificial Sequence: Synthetic polynucleotide"
  source 1..2217: mol_type = other DNA
atggctgccgatggttatcttccagattggctcgaggacaacctctctgagggcattcgcgagtggtgggcgctgaaacctggagccccgaagcccaaagccaaccagcaaaagcaggacgacggccggggtctggtgcttcctggctacaagtacctcggacccttcaacggactcgacaagggggagcccgtcaacgcggcggacgcggcggccctcgagcacgacaaggcctacgaccagcagctgcaggcgggtgacaatccgtacctgcggtataaccacgccgacgccgagtttcaggagcgtctgcaagaagatacgtcttttgggggcaacctcgggcgagcagtcttccaggccaagaagcgggttctcgaacctctcggtctggttgaggaaggcgctaagacggctcctggaaagaagagaccggtagagccatcaccccagcgttctccagactcctctacggacatcggcaagaagggccaacagcccgccagaaaaagactcaattttggtcagactggcgactcagagtcagttccagaccctcaacctctcggagaacctccagcagcgccctctggtgtgggacctaatacaatggctgcaggcggtggcgcaccaatggcagacaataacgaaggcgccgacggagtgggtagttcctcgggaaattggcattgcgattccacatggctgggcgacagagtcatcaccaccagcacccgaacctgggccctgcccacctacaacaaccacctctacaagcaaatctccaacgggacatcgggaggagccaccaacgacaacacctacttcggctacagcaccccctgggggtattttgactttaacagattccactgccacttttcaccacgtgactggcagcgactcatcaacaacaactggggattccggcccaagagactcagcttcaagctcttcaacatccaggtcaaggaggtcacgcagaatgaaggcaccaagaccatcgccaataacctcaccagcaccatccaggtgtttacggactcggagtaccagctgccgtacgttctcggctctgcccaccagggctgcctgcctccgttcccggcggacgtgttcacgattccccagtacggctacctaacactcaacaacggtagtcaggccgtgggacgctcctccttctactgcctggaatactttccttcgcagatgctgagaaccggcaacaacttccagtttacttacaccttcgaggacgtgcctttccacagcagctacgcccacagccagagcttggaccggctgatgaatcctctgattgaccagtacctgtactacttgtctcggattcaaacaacaggaggcacggcaaatacgcagactctgggcttcagccaaggtgggcctaatacaatggccaatcaggcaaagaactggctgccaggaccctgttaccgccaacaacgcgtctcaacgacaaccgggcaaaacaacaatagcaactttgcctggactgctgggaccaaataccatctgaatggaagaaattcattggctaatcctggcatcgctatggcaacacacaaagacgacgaggagcgtttttttcccagtaacgggatcctgatttttggcaaacaaaatgctgccagagacaatgcggattacagcgatgtcatgcccaccagcgaggaagaaatcaaaaccactaaccctgtggccacagaggaatacggtatcgtggcagataacttgcagcagcaaaacacggctcctcaaattggaactgtcaacagccagggggccttacccggtatggtctggcagaaccgggacgtgtacctgcagggtcccatctgggccaagattcctcacacggacggcaacttccacccgtctccgctgatgggcggctttggcctgaaacatcctccgcctcagatcctgatcaagaacacgcctgtacctgcggatcctccgaccaccttcaaccagtcaaagctgaactctttcatcacgcaatacagcaccggacaggtcagcgtggaaattgaatgggagctgcagaaggaaaacagcaagcgctggaaccccgagatccagtacacctccaactactacaaatctacaagtgtggactttgctgttaatacagaaggcgtgtactctgaaccccgccccattggcacccgttacctcacccgtaatctgtaa

SEQ ID NO: 3801 - DNA, 2217 bp, synthetic construct
  misc_feature 1..2217: note = source = /note="Description of Artificial Sequence: Synthetic polynucleotide"
  source 1..2217: mol_type = other DNA
atggctgccgatggttatcttccagattggctcgaggacaacctctctgagggcattcgcgagtggtgggcgctgaaacctggagccccgaagcccaaagccaaccagcaaaagcaggacgacggccggggtctggtgcttcctggctacaagtacctcggacccttcaacggactcgacaagggggagcccgtcaacgcggcggacgcggcggccctcgagcacgacaaggcctacgaccagcagctgcaggcgggtgacaatccgtacctgcggtataaccacgccgacgccgagtttcaggagcgtctgcaagaagatacgtcttttgggggcaacctcgggcgagcagtcttccaggccaagaagcgggttctcgaacctctcggtctggttgaggaaggcgctaagacggctcctggaaagaagagaccggtagagccatcaccccagcgttctccagactcctctacgggcatcggcaagaagggccaacagcccgccggaaaaagactcaattttggtcagactggcgactcagagtcagttccagaccctcaacctctcggagaacctccagcagcgccctctggtgtgggacctaatacaatggctgcaggcggtggcgcaccaatggcagacaataacgaaggcgccgacggagtgggtagttcctcgggaaattggcattgcgattccacatggctgggcgacagagtcatcaccaccagcacccgaacctgggccctgcccacctacaacaaccacctctacaagcaaatctccaacgggacatcgggaggagccaccaacgacaacacctacttcggctacagcaccccctgggggtattttgactttaacagattccactgccacttttcaccacgtgactggcagcgactcatcaacaacaactggggattccggcccaagagactcagcttcaagctcttcaacatccaggtcaaggaggtcacgcagaatgaaggcaccaagaccatcgccaataacctcaccagcaccatccaggtgtttacggactcggagtaccagctgccgtacgttctcggctctgcccaccagggctgcctgcctccgttcccggcggacgtgttcacgattccccagtacggctacctaacactcaacaacggtagtcaggccgtgggacgctcctccttctactgcctggaatactttccttcgcagatgctgagaaccggcaacaacttccagtttacttacaccttcgaggacgtgcctttccacagcagctacgcccacagccagagcttggaccggctgatgaatcctctgattgaccagtacctgtactacttgtctcggattcaaacaacaggaggcacggcaaatacgcagactctgggcttcagccaaggtgggcctaatacaatggccaatcaggcaaagaactggctgccaggaccctgttaccgccaacaacgcgtctcaacgacaaccgggcaaaacaacaatagcaactttgcctggactgctgggaccaaataccatctgaatggaagaaattcattggctaatcctggcatcgctatggcaacacacaaagacgacgaggagcgtttttttcccagtaacgggatcctgatttttggcaaacaaaatgctgccagagacaatgcggattacagcgatgtcatgcccaccagcgaggaagaaatcaaaaccactaaccctgtggccacagaggaatacggtatcgtggcagataacttgcagcagcaaaacacggctcctcaaattggaactgtcaacagccagggggccttacccggtatggtctggcagaaccgggacgtgtacctgcagggtcccatctgggccaagattcctcacacggacggcaacttccacccgtctccgctgatgggcggctttggcctgaaacatcctccgcctcagatcctgatcaagaacacgcctgtacctgcggatcctccgaccaccttcaaccagtcaaagctgaactctttcatcacgcaatacagcaccggacaggtcagcgtggaaattgaatgggagctgcagaaggaaaacagcaagcgctggaaccccgagatccagtacacctccaactactacaaatctacaagtgtggactttgctgttaatacagaaggcgtgtactctgaaccccgccccattggcacccgttacctcacccgtaatctgtaa

SEQ ID NO: 3802 - DNA, 2217 bp, synthetic construct
  misc_feature 1..2217: note = source = /note="Description of Artificial Sequence: Synthetic polynucleotide"
  source 1..2217: mol_type = other DNA
atggctgccgatggttatcttccagattggctcgaggacaacctctctgagggcattcgcgagtggtgggcgctgaaacctggagccccgaagcccaaagccaaccagcaaaagcaggacgacggccggggtctggtgcttcctggctacaagtacctcggacccttcaacggactcgacaagggggagcccgtcaacgcggcggacgcggcggccctcgagcacgacaaggcctacgaccagcagctgcaggcgggtgacaatccgtacctgcggtataaccacgccgacgccgagtttcaggagcgtctgcaagaagatacgtcttttgggggcaacctcgggcgagcagtcttccaggccaagaagcgggttctcgaacctctcggtctggttgaggaaggcgctaagacggctcctggaaagaagagaccggtagagccatcaccccagcgttctccagactcctctacgggcatcggcaagaagggccaacagcccgccagaaaaagactcaattttggtcagactggcgactcagagtcagttccagaccctcaacctctcggagaacctccagcagcgccctctggtgtgggacctaatacaatggctgcaggcggtggcgcaccaatggcagacaataacgaaggcgccgacggagtgggtagttcctcgggaaattggcattgcgattccacatggctgggcgacagagtcatcaccaccagcacccgaacctgggccctgcccacctacaacaaccacctctacaagcaaatctccaacgggacatcgggaggagccaccaacgacaacacctacttcggctacagcaccccctgggggtattttgactttaacagattccactgccacttttcaccacgtgactggcagcgactcatcaacaacaactggggattccggcccaagagactcagcttcaagctcttcaacatccaggtcaaggaggtcacgcagaatgaaggcaccaagaccatcgccaataacctcaccagcaccatccaggtgtttacggactcggagtaccagctgccgtacgttctcggctctgcccaccagggctgcctgcctccgttcccggcggacgtgttcacgattccccagtacggctacctaacactcaacaacggtagtcaggccgtgggacgcccctccttctactgcctggaatactttccttcgcagatgctgagaaccggcaacaacttccagtttacttacaccttcgaggacgtgcctttccacagcagctacgcccacagccagagcttggaccggctgatgaatcctctgattgaccagtacctgtactacttgtctcggattcaaacaacaggaggcacggcaaatacgcagactctgggcttcagccaaggtgggcctaatacaatggccaatcaggcaaagaactggctgccaggaccctgttaccgccaacaacgcgtctcaacgacaaccgggcaaaacaacaatagcaactttgcctggactgctgggaccaaataccatctgaatggaagaaattcattggctaatcctggcatcgctatggcaacacacaaagacgacgaggagcgtttttttcccagtaacgggatcctgatttttggcaaacaaaatgctgccagagacaatgcggattacagcgatgtcatgcccaccagcgaggaagaaatcaaaaccactaaccctgtggccacagaggaatacggtatcgtggcagataacttgcagcagcaaaacacggctcctcaaattggaactgtcaacagccagggggccttacccggtatggtctggcagaaccgggacgtgtacctgcagggtcccatctgggccaagattcctcacacggacggcaacttccacccgtctccgctgatgggcggctttggcctgaaacatcctccgcctcagatcctgatcaagaacacgcctgtacctgcggatcctccgaccaccttcaaccagtcaaagctgaactctttcatcacgcaatacagcaccggacaggtcagcgtggaaattgaatgggagctgcagaaggaaaacagcaagcgctggaaccccgagatccagtacacctccaactactacaaatctacaagtgtggactttgctgttaatacagaaggcgtgtactctgaaccccgccccattggcacccgttacctcacccgtaatctgtaa

SEQ ID NO: 3803 - DNA, 2217 bp, synthetic construct
  misc_feature 1..2217: note = source = /note="Description of Artificial Sequence: Synthetic polynucleotide"
  source 1..2217: mol_type = other DNA
atggctgccgatggttatcttccagattggctcgaggacaacctctctgagggcattcgcgagtggtgggcgctgaaacctggagccccgaagcccaaagccaaccagcaaaagcaggacgacggccggggtctggtgcttcctggctacaagtacctcggacccttcaacggactcgacaagggggagcccgtcaacgcggcggacgcggcggccctcgagcacgacaaggcctacgaccagcagctgcaggcgggtgacaatccgtacctgcggtataaccacgccgacgccgagtttcaggagcgtctgcaagaagatacgtcttttgggggcaacctcgggcgagcagtcttccaggccaagaagcgggttctcgaacctctcggtctggttgaggaaggcgctaagacggctcctggaaagaagagaccggtagagccatcaccccagcgttctccagactcctctacgggcatcggcaagaagggccaacagcccgccagaaaaagactcaattttggtcagactggcgactcagagtcagttccagaccctcaacctctcggagaacctccagcagcgccctctggtgtgggacctaatacaatggctgcaggcggtggcgcaccaatggcagacaataacgaaggcgccgacggagtgggtagttcctcgggaaattggcattgcgattccacatggctgggcgacagagtcatcaccaccagcacccgaacctgggccctgcccacctacaacaaccacctctacaagcaaatctccaacgggacatcgggaggagccaccaacgacaacacctacttcggctacagcaccccctgggggtattttgactttaacagattccactgccacttttcaccacgtgactggcagcgactcatcaacaacaactggggattccggcccaagagactcagcttcaagctcttcaacatccaggtcaaggcggtcacgcagaatgaaggcaccaagaccatcgccaataacctcaccagcaccatccaggtgtttacggactcggagtaccagctgccgtacgttctcggctctgcccaccagggctgcctgcctccgttcccggcggacgtgttcacgattccccagtacggctacctaacactcaacaacggtagtcaggccgtgggacgctcctccttctactgcctggaatactttccttcgcagatgctgagaaccggcaacaacttccagtttacttacaccttcgaggacgtgcctttccacagcagctacgcccacagccagagcttggaccggctgatgaatcctctgattgaccagtacctgtactacttgtctcggattcaaacaacaggaggcacggcaaatacgcagactctgggcttcagccaaggtgggcctaatacaatggccaatcaggcaaagaactggctgccaggaccctgttaccgccaacaacgcgtctcaacgacaaccgggcaaaacaacaatagcaactttgcctggactgctgggaccaaataccatctgaatggaagaaattcattggctaatcctggcatcgctatggcaacacacaaagacgacgaggagcgtttttttcccagtaacgggatcctgatttttggcaaacaaaatgctgccagagacaatgcggattacagcgatgtcatgcccaccagcgaggaagaaatcaaaaccactaaccctgtggccacagaggaatacggtatcgtggcagataacttgcagcagcaaaacacggctcctcaaattggaactgtcaacagccagggggccttacccggtatggtctggcagaaccgggacgtgtacctgcagggtcccatctgggccaagattcctcacacggacggcaacttccacccgtctccgctgatgggcggctttggcctgaaacatcctccgcctcagatcctgatcaagaacacgcctgtacctgcggatcctccgaccaccttcaaccagtcaaagctgaactctttcatcacgcaatacagcaccggacaggtcagcgtggaaattgaatgggagctgcagaaggaaaacagcaagcgctggaaccccgagatccagtacacctccaactactacaaatctacaagtgtggactttgctgttaatacagaaggcgtgtactctgaaccccgccccattggcacccgttacctcacccgtaatctgtaa

SEQ ID NO: 3804 - DNA, 2217 bp, synthetic construct
  misc_feature 1..2217: note = source = /note="Description of Artificial Sequence: Synthetic polynucleotide"
  source 1..2217: mol_type = other DNA
atggctgccgatggttatcttccagattggctcgaggacaacctctctgagggcattcgcgagtggtgggcgctgaaacctggagccccgaagcccaaagccaaccagcaaaagcaggacgacggccggggtctggtgcttcctggctacaagtacctcggacccttcaacggactcgacaagggggagcccgtcaacgcggcggacgcggcggccctcgagcacgacaaggcctacgaccagcagctgcaggcgggtgacaatccgtacctgcggtataaccacgccgacgccgagtttcaggagcgtctgcaagaagatacgtcttttgggggcaacctcgggcgagcagtcttccaggccaagaagcgggttctcgaacctctcggtctggttgaggaaggcgctaagacggctcctggaaagaagagaccggtagagccatcaccccagcgttctccagactcctctacgggcatcggcaagaagggccaacagcccgccagaaaaagactcaattttggtcagactggcgactcagagtcagttccagaccctcaacctctcggagaacctccagcagcgccctctggtgtgggacctaatacaatggctgcaggcggtggcgcaccaatggcagacaataacgaaggcgccgacggagtgggtagttcctcgggaaattggcattgcgattccacatggctgggcgacagagtcatcaccaccagcacccgaacctgggccctgcccacctacaacaaccacctctacaagcaaatctccaacgggacatcgggaggagccaccaacgacaacacctacttcggctacagcaccccctgggggtattttgactttaacagattccactgccacttttcaccacgtgactggcagcgactcatcaacaacaactggggattccggcccaagagactcagcttcaagctcttcaacatccaggtcaaggaggtcacgcagaatgaaggcaccaagaccatcgccaataacctcaccagcaccatccaggtgtttacggactcggagtaccagctgccgtacgttctcggctctgcccaccagggctgcctgcctccgttcccggcggacgtgttcacgattccccagtacggctacctaacactcaacaacggtagtcaggccgtgggacgctcctccttctactgcctggaatactttccttcgcagatgctgagaaccggcaacaacttccagtttacttacaccttcgaggacgtgcctttccacagcagctacgcccacagccagagcttggaccggctgatgaatcctctgattgaccagtacctgtactacttgtctcggattcaaacaacaggaggcacggcaaatacgcagactctgggcttcagccaaggtgggcctaatacaatggccaatcaggcaaagaactggctgccaggaccctgttaccgccaacaacgcgtctcaacgacaaccgggcaaaacaacaatagcaactttgcctggactgctgggaccaaataccatctgaatggaagaaattcattggctaatcctggcatcgctatggcaacacacaaagacgacgaggagcgtttttttcccagtaacgggatcctgatttttggcaaacaaaatgctgccagagacaatgcggattacagcgatgtcatgcccaccagcgaggaagaaatcaaaaccactaaccctgtggccacagaggaatacggtatcgtggcagataacttgcagcagcaaaacacggctcctcaaattggaactgtcaacagccagggggccttacccggtatggtctggcagaaccgggacgtgtacctgcagggtcccatctgggccaagattcctcacacggacggcaacttccacccgtctccgctgatgggcggctttggcctgaaacatcctccgcctcagatcctgatcaagaacacgcctgtacctgcggatcctccgaccgccttcaaccagtcaaagctgaactctttcatcacgcaatacagcaccggacaggtcagcgtggaaattgaatgggagctgcagaaggaaaacagcaagcgctggaaccccgagatccagtacacctccaactactacaaatctacaagtgtggactttgctgttaatacagaaggcgtgtactctgaaccccgccccattggcacccgttacctcacccgtaatctgtaa

SEQ ID NO: 3805 - DNA, 2217 bp, synthetic construct
  misc_feature 1..2217: note = source = /note="Description of Artificial Sequence: Synthetic polynucleotide"
  source 1..2217: mol_type = other DNA
atggctgccgatggttatcttccagattggctcgaggacaacctctctgagggcattcgcgagtggtgggcgctgaaacctggagccccgaagcccaaagccaaccagcaaaagcaggacgacggccggggtctggtgcttcctggctacaagtacctcggacccttcaacggactcgacaagggggagcccgtcaacgcggcggacgcggcggccctcgagcacgacaaggcctacgaccagcagctgcaggcgggtgacaatccgtacctgcggtataaccacgccgacgccgagtttcaggagcgtctgcaagaagatacgtcttttgggggcaacctcgggcgagcagtcttccaggccaagaagcgggttctcgaacctctcggtctggttgaggaaggcgctaagacggctcctggaaagaagagaccggtagagccatcaccccagcgttctccagactcctctacgggcatcggcaagaagggccaacagcccgccagaaaaagactcaattttggtcagactggcgactcagagtcagttccagaccctcaacctctcggagaacctccagcagcgccctctggtgtgggacctaatacaatggctgcaggcggtggcgcaccaatggcagacaataacgaaggcgccgacggagtgggtagttcctcgggaaattggcattgcgattccacatggctgggcgacagagtcatcaccaccagcacccgaacctgggccctgcccacctacaacaaccacctctacaagcaaatctccaacgggacatcgggaggagccaccaacgacaacacctacttcggctacagcaccccctgggggtattttgactttaacagattccgctgccacttttcaccacgtgactggcagcgactcatcaacaacaactggggattccggcccaagagactcagcttcaagctcttcaacatccaggtcaaggaggtcacgcagaatgaaggcaccaagaccatcgccaataacctcaccagcaccatccaggtgtttacggactcggagtaccagctgccgtacgttctcggctctgcccaccagggctgcctgcctccgttcccggcggacgtgttcacgattccccagtacggctacctaacactcaacaacggtagtcaggccgtgggacgctcctccttctactgcctggaatactttccttcgcagatgctgagaaccggcaacaacttccagtttacttacaccttcgaggacgtgcctttccacagcagctacgcccacagccagagcttggaccggctgatgaatcctctgattgaccagtacctgtactacttgtctcggattcaaacaacaggaggcacggcaaatacgcagactctgggcttcagccaaggtgggcctaatacaatggccaatcaggcaaagaactggctgccaggaccctgttaccgccaacaacgcgtctcaacgacaaccgggcaaaacaacaatagcaactttgcctggactgctgggaccaaataccatctgaatggaagaaattcattggctaatcctggcatcgctatggcaacacacaaagacgacgaggagcgtttttttcccagtaacgggatcctgatttttggcaaacaaaatgctgccagagacaatgcggattacagcgatgtcatgcccaccagcgaggaagaaatcaaaaccactaaccctgtggccacagaggaatacggtatcgtggcagataacttgcagcagcaaaacacggctcctcaaattggaactgtcaacagccagggggccttacccggtatggtctggcagaaccgggacgtgtacctgcagggtcccatctgggccaagattcctcacacggacggcaacttccacccgtctccgctgatgggcggctttggcctgaaacatcctccgcctcagatcctgatcaagaacacgcctgtacctgcggatcctccgaccaccttcaaccagtcaaagctgaactctttcatcacgcaatacagcaccggacaggtcagcgtggaaattgaatgggagctgcagaaggaaaacagcaagcgctggaaccccgagatccagtacacctccaactactacaaatctacaagtgtggactttgctgttaatacagaaggcgtgtactctgaaccccgccccattggcacccgttacctcacccgtaatctgtaa

SEQ ID NO: 3806 - DNA, 2217 bp, synthetic construct
  misc_feature 1..2217: note = source = /note="Description of Artificial Sequence: Synthetic polynucleotide"
  source 1..2217: mol_type = other DNA
atggctgccgatggttatcttccagattggctcgaggacaacctctctgagggcattcgcgagtggtgggcgctgaaacctggagccccgaagcccaaagccaaccagcaaaagcaggacgacggccggggtctggtgcttcctggctacaagtacctcggacccttcaacggactcgacaagggggagcccgtcaacgcggcggacgcggcggccctcgagcacgacaaggcctacgaccagcagctgcaggcgggtgacaatccgtacctgcggtataaccacgccgacgccgagtttcaggagcgtctgcaagaagatacgtcttttgggggcaacctcgggcgagcagtcttccaggccaagaagcgggttctcgaacctctcggtctggttgaggaaggcgctaagacggctcctggaaagaagagaccggtagagccatcaccccagcgttctccagactcctctacgggcatcggcaagaagggccaacagcccgccagaaaaagactcaattttggtcagactggcgactcagagtcagttccagaccctcaacctctcggagaacctccagcagcgccctctggtgtgggacctaatacaatggctgcaggcggtggcgcaccaatggcagacaataacgaaggcgccgacggagtgggtagttcctcgggaaattggcattgcgattccacatggctgggcgacagagtcatcaccaccagcacccgaacctgggccctgcccacctacaacaaccacctctacaagcaaatctccaacgggacatcgggaggagccaccaacgacaacacctacttcggctacagcaccccctgggggtattttgactttaacagattccactgccacttttcaccacgtgactggcagcgactcatcaacaacaactggggattccggcccaagagactcagcttcaagctcttcaacatccaggtcaaggaggtcacgcagaatgaaggcaccaagaccatcgccaataacctcaccagcaccatccaggtgtttacggactcggagtaccagctgccgtacgttctcggctctgcccaccagggctgcctgcctccgttcccggcggacgtgttcacgattccccagtacggctacctaacactcaacaacggtagtcaggccgtgggacgctcctccttctactgcctggaatactttccttcgcagatgctgagaaccggcaacaacttccagtttacttacaccctcgaggacgtgcctttccacagcagctacgcccacagccagagcttggaccggctgatgaatcctctgattgaccagtacctgtactacttgtctcggattcaaacaacaggaggcacggcaaatacgcagactctgggcttcagccaaggtgggcctaatacaatggccaatcaggcaaagaactggctgccaggaccctgttaccgccaacaacgcgtctcaacgacaaccgggcaaaacaacaatagcaactttgcctggactgctgggaccaaataccatctgaatggaagaaattcattggctaatcctggcatcgctatggcaacacacaaagacgacgaggagcgtttttttcccagtaacgggatcctgatttttggcaaacaaaatgctgccagagacaatgcggattacagcgatgtcatgcccaccagcgaggaagaaatcaaaaccactaaccctgtggccacagaggaatacggtatcgtggcagataacttgcagcagcaaaacacggctcctcaaattggaactgtcaacagccagggggccttacccggtatggtctggcagaaccgggacgtgtacctgcagggtcccatctgggccaagattcctcacacggacggcaacttccacccgtctccgctgatgggcggctttggcctgaaacatcctccgcctcagatcctgatcaagaacacgcctgtacctgcggatcctccgaccaccttcaaccagtcaaagctgaactctttcatcacgcaatacagcaccggacaggtcagcgtggaaattgaatgggagctgcagaaggaaaacagcaagcgctggaaccccgagatccagtacacctccaactactacaaatctacaagtgtggactttgctgttaatacagaaggcgtgtactctgaaccccgccccattggcacccgttacctcacccgtaatctgtaa

SEQ ID NO: 3807 - DNA, 2217 bp, synthetic construct
  misc_feature 1..2217: note = source = /note="Description of Artificial Sequence: Synthetic polynucleotide"
  source 1..2217: mol_type = other DNA
atggctgccgatggttatcttccagattggctcgaggacaacctctctgagggcattcgcgagtggtgggcgctgaaacctggagccccgaagcccaaagccaaccagcaaaagcaggacgacggccggggtctggtgcttcctggctacaagtacctcggacccttcaacggactcgacaagggggagcccgtcaacgcggcggacgcggcggccctcgagcacgacaaggcctacgaccagcagctgcaggcgggtgacaatccgtacctgcggtataaccacgccgacgccgagtttcaggagcgtctgcaagaagatacgtcttttgggggcaacctcgggcgagcagtcttccaggccaagaagcgggttctcgaacctctcggtctggttgaggaaggcgctaagacggctcctggaaagaagagaccggtagagccatcaccccagcgttctccagactcctctacgggcatcggcaagaagggccaacagcccgccagaaaaagactcaattttggtcagactggcgactcagagtcagttccagaccctcaacctctcggagaacctccagcagcgccctctggtgtgggacctaatacaatggctgcaggcggtggcgcaccaatggcagacaataacgaaggcgccgacggagtgggtagttcctcgggaaattggcattgcgattccacatggctgggcgacagagtcatcaccaccagcacccgaacctgggccctgcccacctacaacaaccacctctacaagcaaatctccaacgggacatcgggaggagccaccaacgacaacacctacttcggctacagcaccccctgggggtattttgactttaacagattccactgccacttttcaccacgtgactggcagcgactcatcaacaacaactggggattccggcccaagagactcagcttcaagctcttcaacatccaggtcaaggaggtcacgcagaatgaaggcaccaagaccatcgccaataacctcaccagcaccatccaggtgtttacggactcggagtaccagctgccgtacgttctcggctctgcccaccagggctgcctgcctccgttcccggcggacgtgttcacgattccccagtacggctacctaacactcaacaacggtagtcaggccgtgggacgctcctccttctactgcctggaatactttccttcgcagatgctgagaaccggcaacaacttccagtttacttacaccttcgaggacgtgcctttccacagcagctacgcccacagccagagcttggaccggctgatgaatcctctgattgaccagtacctgtactacttgtctcggattcaaacaacaggaggcacggcaaatacgcagactctgggcttcagccaaggtgggcctaatacaatggccaatcaggcaaagaactggctgccaggaccctgttaccgccaacaacgcgtctcaacgacaaccgggcaaaacaacaatagcaactttgcctggactgctgggaccaaataccatctgaatggaagaaattcattggctaatcctggcatcgctatggcaacacacaaagacgacgaggagcgtttttttcccagtaacgggatcctgatttttggcaaacaaaatgctgccagagacaatgcggattacagcgatgtcatgcccaccagcgaggaagaaatcaaaaccactaaccctgtggccacagaggaatacggtatcgtggcagataacttgcagcagcaaagcacggctcctcaaattggaactgtcaacagccagggggccttacccggtatggtctggcagaaccgggacgtgtacctgcagggtcccatctgggccaagattcctcacacggacggcaacttccacccgtctccgctgatgggcggctttggcctgaaacatcctccgcctcagatcctgatcaagaacacgcctgtacctgcggatcctccgaccaccttcaaccagtcaaagctgaactctttcatcacgcaatacagcaccggacaggtcagcgtggaaattgaatgggagctgcagaaggaaaacagcaagcgctggaaccccgagatccagtacacctccaactactacaaatctacaagtgtggactttgctgttaatacagaaggcgtgtactctgaaccccgccccattggcacccgttacctcacccgtaatctgtaa

SEQ ID NO: 3808 - DNA, 2217 bp, synthetic construct
  misc_feature 1..2217: note = source = /note="Description of Artificial Sequence: Synthetic polynucleotide"
  source 1..2217: mol_type = other DNA
atggctgccgatggttatcttccagattggctcgaggacaacctctctgagggcattcgcgagtggtgggcgctgaaacctggagccccgaagcccaaagccaaccagcaaaagcaggacgacggccggggtctggtgcttcctggctacaagtacctcggacccttcaacggactcgacaagggggagcccgtcaacgcggcggacgcggcggccctcgagcacgacaaggcctacgaccagcagctgcaggcgggtgacaatccgtacctgcggtataaccacgccgacgccgagtttcaggagcgtctgcaagaagatacgtcttttgggggcaacctcgggcgagcagtcttccaggccaagaagcgggttctcgaacctctcggtctggttgaggaaggcgctaagacggctcctggaaagaagagacyggtagagccatcaccccagcgttctccagactcctctacgggcatcggcaagaagggccaacagcccgccagaaaaagactcaattttggtcagactggcgactcagagtcagttccagaccctcaacctctcggagaacctccagcagcgccctctggtgtgggacctaatacaatggctgcaggcggtggcgcaccaatggcagacaataacgaaggcgccgacggagtgggtagttcctcgggaaattggcattgcgattccacatggctgggcgacagagtcatcaccaccagcacccgaacctgggccctgcccacctacaacaaccacctctacaagcaaatctccaacgggacatcgggaggagccaccaacgacaacacctacttcggctacagcaccccctgggggtattttgactttaacagattccactgccacttttcaccacgtgactggcagcgactcatcaacaacaactggggattccggcccaagagactcagcttcaagctcttcaacatccaggtcaaggaggtcacgcagaatgaaggcaccaagaccatcgccaataacctcaccagcaccatccaggtgtttacggactcggagtaccagctgccgtacgttctcggctctgcccaccagggctgcctgcctccgttcccggcggacgtgttcacgattccccagtacggctacctaacactcaacaacggtagtcaggccgtgggacgctcctccttctactgcctggaatactttccttcgcagatgctgagaaccggcaacaacttccagtttacttacaccttcgaggacgtgcctttccacagcagctacgcccacagccagagcttggaccggctgatgaatcctctgattgaccagtacctgtactacttgtctcggattcaaacaacaggaggcacggcaaatacgcagactctgggcttcagccaaggtgggcctaatacaatggccaatcaggcaaagaactggctgccaggaccctgttaccgccaacaacgcgtctcaacgacaaccgggcaaaacaacaatagcaactttgcctggactgctgggaccaaataccatctgaatggaagaaattcattggctaatcctggcatcgctatggcaacacacaaagacgacgaggagcgtttttttcccagtaacgggatcctgatttttggcaaacaaaatgctgccagagacaatgcggattacagcgatgtcatgcccaccagcgaggaagaaatcaaaaccactaaccctgtggccacagaggaatacggtatcgtggcagataacttgcagcagcaaaacacggctcctcaaattggaactgtcagcagccagggggccttacccggtatggtctggcagaaccgggacgtgtacctgcagggtcccatctgggccaagattcctcacacggacggcaacttccacccgtctccgctgatgggcggctttggcctgaaacatcctccgcctcagatcctgatcaagaacacgcctgtacctgcggatcctccgaccaccttcaaccagtcaaagctgaactctttcatcacgcaatacagcaccggacaggtcagcgtggaaattgaatgggagctgcagaaggaaaacagcaagcgctggaaccccgagatccagtacacctccaactactacaaatctacaagtgtggactttgctgttaatacagaaggcgtgtactctgaaccccgccccattggcacccgttacctcacccgtaatctgtaa

SEQ ID NO: 3809 - DNA, 2217 bp, synthetic construct
  misc_feature 1..2217: note = source = /note="Description of Artificial Sequence: Synthetic polynucleotide"
  source 1..2217: mol_type = other DNA
atggctgccgatggttatcttccagattggctcgaggacaacctctctgagggcattcgcgagtggtgggcgctgaaacctggagccccgaagcccaaagccaaccagcaaaagcaggacgacggccggggtctggtgcttcctggctacaagtacctcggacccttcaacggactcgacaagggggagcccgtcaacgcggcggacgcggcggccctcgagcacgacaaggcctacgaccagcagctgcaggcgggtgacaatccgtacctgcggtataaccacgccgacgccgagtttcaggagcgtctgcaagaagatacgtcttttgggggcaacctcgggcgagcagtcttccaggccaagaagcgggttctcgaacctctcggtctggttgaggaaggcgctaagacggctcctggaaagaagagaccggtagagccatcaccccagcgttctccagactcctctacgggcatcggcaagaagggccaacagcccgccagaaaaagactcaattttggtcagactggcgactcagagtcagttccagaccctcaacctctcggagaacctccagcagcgccctctggtgtgggacctaatacaatggctgcaggcggtggcgcaccaatggcagacaataacgaaggcgccgacggagtgggtagttcctcgggaaattggcattgcgattccacatggctgggcgacagagtcatcaccaccagcacccgaacctgggccctgcccacctacaacaaccacctctacaagcaaatctccaacgggacatcgggaggagccaccaacgacaacacctacttcggctacagcaccccctgggggtattttgactttaacagattccactgccacttttcaccacgtgactggcagcgactcatcaacaacaactggggattccggcccaagagactcagcttcaagctcttcaacatccaggtcaaggaggtcacgcagaatgaaggcaccaagaccatcgccaataacctcaccagcaccatccaggtgtttacggactcggagtaccagctgccgtacgttctcggctctgcccaccagggctgcctgcctccgttcccggcggacgtgttcacgattccccagtacggctacctaacactcaacaacggtagtcaggccgtgggacgctcctccttctactgcctggaatactttccttcgcagatgctgagaaccggcaacaacttccagtttacttacaccttcgaggacgtgcctttccacagcagctacgcccacagccagagcttggaccggctgatgaatcctctgattgaccagtacctgtactacttgtctcggattcaaacaacaggaggcacggcaaatacgcagactctgggcttcagccaaggtgggcctaatacaatggccaatcaggcaaagaactggctgccaggaccctgttaccgccaacaacgcgtctcaacgacaaccgggcaaaacaacaatagcaactttgcctggactgctgggaccaaataccatctgaatggaagaaattcattggctaatcctggcatcgctatggcaacacacaaagacgacgaggagcgtttttttcccagtaacgggatcctgatttttggcaaacaaagtgctgccagagacaatgcggattacagcgatgtcatgcccaccagcgaggaagaaatcaaaaccactaaccctgtggccacagaggaatacggtatcgtggcagataacttgcagcagcaaaacacggctcctcaaattggaactgtcaacagccagggggccttacccggtatggtctggcagaaccgggacgtgtacctgcagggtcccatctgggccaagattcctcacacggacggcaacttccacccgtctccgctgatgggcggctttggcctgaaacatcctccgcctcagatcctgatcaagaacacgcctgtacctgcggatcctccgaccaccttcaaccagtcaaagctgaactctttcatcacgcaatacagcaccggacaggtcagcgtggaaattgaatgggagctgcagaaggaaaacagcaagcgctggaaccccgagatccagtacacctccaactactacaaatctacaagtgtggactttgctgttaatacagaaggcgtgtactctgaaccccgccccattggcacccgttacctcacccgtaatctgtaa

SEQ ID NO: 3810 - DNA, 2217 bp, synthetic construct
  misc_feature 1..2217: note = source = /note="Description of Artificial Sequence: Synthetic polynucleotide"
  source 1..2217: mol_type = other DNA
atggctgccgatggttatcttccagattggctcgaggacaacctctctgagggcattcgcgagtggtgggcgctgaaacctggagccccgaagcccaaagccaaccagcaaaagcaggacgacggccggggtctggtgcttcctggctacaagtacctcggacccttcaacggactcgacaagggggagcccgtcaacgcggcggacgcggcggccctcgagcacgacaaggcctacgaccagcagctgcaggcgggtgacaatccgtacctgcggtataaccacgccgacgccgagtttcaggagcgtctgcaagaagatacgtcttttgggggcaacctcgggcgagcagtcttccaggccaagaagcgggttctcgaacctctcggtctggttgaggaaggcgctaagacggctcctggaaagaagagaccggtagagccatcaccccagcgttctccagactcctctacgggcatcggcaagaagggccaacagcccgccagaaaaagactcaattttggtcagactggcgactcagagtcagttccagaccctcaacctctcggagaacctccagcagcgccctctggtgtgggacctaatacaatggctgcaggcggtggcgcaccaatggcagacaataacgaaggcgccgacggagtgggtagttcctcgggaaattggcattgcgattccacatggctgggcgacagagtcatcaccaccagcacccgaacctgggccctgcccacctacaacaaccacctctacaagcaaatctccaacgggacatcgggaggagccaccaacgacaacacctacttcggctacagcaccccctgggggtattttgactttaacagattccactgccacttttcaccacgtgactggcagcgactcatcaacaacaactggggattccggcccaagagactcagcttcaagctcttcaacatccaggtcaaggaggtcacgcagaatgaaggcaccaagaccatcgccaataacctcaccagcaccatccaggtgtttacggactcggagtaccagctgccgtacgttctcggctctgcccaccagggctgcctgcctccgttcccggcggacgtgttcacgattccccagtacggctacctaacactcaacaacggtagtcaggccgtgggacgctcctccttctactgcctggaatactttccttcgcagatgctgagaaccggcaacaacttccagtttacttacaccttcgaggacgtgcctttccacagcagctacgcccacagccagagcttggaccggctgatgaatcctctgattgaccagtacctgtactacttgtctcggattcaaacagcaggaggcacggcaaatacgcagactctgggcttcagccaaggtgggcctaatacaatggccaatcaggcaaagaactggctgccaggaccctgttaccgccaacaacgcgtctcaacgacaaccgggcaaaacaacaatagcaactttgcctggactgctgggaccaaataccatctgaatggaagaaattcattggctaatcctggcatcgctatggcaacacacaaagacgacgaggagcgtttttttcccagtaacgggatcctgatttttggcaaacaaaatgctgccagagacaatgcggattacagcgatgtcatgcccaccagcgaggaagaaatcaaaaccactaaccctgtggccacagaggaatacggtatcgtggcagataacttgcagcagcaaaacacggctcctcaaattggaactgtcaacagccagggggccttacccggtatggtctggcagaaccgggacgtgtacctgcagggtcccatctgggccaagattcctcacacggacggcaacttccacccgtctccgctgatgggcggctttggcctgaaacatcctccgcctcagatcctgatcaagaacacgcctgtacctgcggatcctccgaccaccttcaaccagtcaaagctgaactctttcatcacgcaatacagcaccggacaggtcagcgtggaaattgaatgggagctgcagaaggaaaacagcaagcgctggaaccccgagatccagtacacctccaactactacaaatctacaagtgtggactttgctgttaatacagaaggcgtgtactctgaaccccgccccattggcacccgttacctcacccgtaatctgtaa

SEQ ID NO: 3811 - DNA, 2217 bp, synthetic construct
  misc_feature 1..2217: note = source = /note="Description of Artificial Sequence: Synthetic polynucleotide"
  source 1..2217: mol_type = other DNA
atggctgccgatggttatcttccagattggctcgaggacaacctctctgagggcattcgcgagtggtgggcgctgaaacctggagccccgaagcccaaagccaaccagcaaaagcaggacgacggccggggtctggtgcttcctggctacaagtacctcggacccttcaacggactcgacaagggggagcccgtcaacgcggcggacgcggcggccctcgagcacgacaaggcctacgaccagcagctgcaggcgggtgacaatccgtacctgcggtataaccacgccgacgccgagtttcaggagcgtctgcaagaagatacgtcttttgggggcaacctcgggcgagcagtcttccaggccaagaagcgggttctcgaacctctcggtctggttgaggaaggcgctaagacggctcctggaaagaagagaccggtagagccatcaccccagcgttctccagactcctctacgggcatcggcaagaagggccaacagcccgccagaaaaagactcaattttggtcagactggcgactcagagtcagttccagaccctcaacctctcggagaacctccagcagcgccctctggtgtgggacctaatacaatggctgcaggcggtggcgcaccaatggcagacaataacgaaggcgccgacggagtgggtagttcctcgggaaattggcattgcgattccacatggctgggcgacagagtcatcaccaccagcacccgaacctgggccctgcccacctacaacaaccacctctacaagcaaatctccaacgggacatcgggaggagccaccaacgacaacacctacttcggctacagcaccccctgggggtattttgactttaacagattccactgccacttttcaccacgtgactggcagcgactcatcaacaacaactggggattccggcccaagagactcagcttcaagctcttcaacatccaggtcaaggaggtcacgcagaatgaaggcaccaagaccatcgccaataacctcaccagcaccatccaggtgtttacggactcggagtaccagctgccgtacgttctcggctctgcccaccagggctgcctgcctccgttcccggcggacgtgttcacgattccccagtacggctacctaacactcaacaacggtagtcaggccgtgggacgctcctccttctactgcctggaatactttccttcgcagatgctgagaaccggcaacaacttccagtttacttacaccttcgaggacgtgcctttccacagcagctacgcccacagccagaacttggaccggctgatgaatcctctgattgaccagtacctgtactacttgtctcggattcaaacaacaggaggcacggcaaatacgcagactctgggcttcagccaaggtgggcctaatacaatggccaatcaggcaaagaactggctgccaggaccctgttaccgccaacaacgcgtctcaacgacaaccgggcaaaacaacaatagcaactttgcctggactgctgggaccaaataccatctgaatggaagaaattcattggctaatcctggcatcgctatggcaacacacaaagacgacgaggagcgtttttttcccagtaacgggatcctgatttttggcaaacaaaatgctgccagagacaatgcggattacagcgatgtcatgcccaccagcgaggaagaaatcaaaaccactaaccctgtggccacagaggaatacggtatcgtggcagataacttgcagcagcaaaacacggctcctcaaattggaactgtcaacagccagggggccttacccggtatggtctggcagaaccgggacgtgtacctgcagggtcccatctgggccaagattcctcacacggacggcaacttccacccgtctccgctgatgggcggctttggcctgaaacatcctccgcctcagatcctgatcaagaacacgcctgtacctgcggatcctccgaccaccttcaaccagtcaaagctgaactctttcatcacgcaatacagcaccggacaggtcagcgtggaaattgaatgggagctgcagaaggaaaacagcaagcgctggaaccccgagatccagtacacctccaactactacaaatctacaagtgtggactttgctgttaatacagaaggcgtgtactctgaaccccgccccattggcacccgttacctcacccgtaatctgtaa

SEQ ID NO: 3812 - DNA, 2217 bp, synthetic construct
  misc_feature 1..2217: note = source = /note="Description of Artificial Sequence: Synthetic polynucleotide"
  source 1..2217: mol_type = other DNA
atggctgccgatggttatcttccagattggctcgaggacaacctctctgagggcattcgcgagtggtgggcgctgaaacctggagccccgaagcccaaagccaaccagcaaaagcaggacgacggccggggtctggtgcttcctggctacaagtacctcggacccttcaacggactcgacaagggggagcccgtcaacgcggcggacgcggcggccctcgagcacgacaaggcctacgaccagcagctgcaggcgggtgacaatccgtacctgcggtataaccacgccgacgccgagtttcaggagcgtctgcaagaagatacgtcttttgggggcaacctcgggcgagcagtcttccaggccaagaagcgggttctcgaacctctcggtctggttgaggaaggcgctaagacggctcctggaaagaagagaccggtagagccatcaccccagcgttctccagactcctctacgggcatcggcaagaagggccaacagcccgccagaaaaagactcaattttggtcagactggcgactcagagtcagttccagaccctcaacctctcggagaacctccagcagcgccctctggtgtgggacctaatacaatggctgcaggcggtggcgcaccaatggcagacaataacgaaggcgccgacggagtgggtagttcctcgggaaattggcattgcgattccacatggctgggcgacagagtcatcaccaccagcacccgaacctgggccctgcccacctacaacaaccacctctacaagcaaatctccaacgggacatcgggaggagccaccaacgacaacacctacttcggctacagcaccccctgggggtattttgactttaacagattccactgccacttttcaccacgtgactggcagcgactcatcaacaacaactggggattccggcccaagagactcagcttcaagctcttcaacatccaggtcaaggcggtcacgcagaatgaaggcaccaagaccatcgccaataacctcaccagcaccatccaggtgtttacggactcggagtaccagctgccgtacgttctcggctctgcccaccagggctgcctgcctccgttcccggcggacgtgttcacgattccccagtacggctacctaacactcaacaacggtagtcaggccgtgggacgctcctccttctactgcctggaatactttccttcgcagatgctgagaaccggcaacaacttccagtttacttacaccttcgaggacgtgcctttccacagcagctacgcccacagccagagcttggaccggctgatgaatcctctgattgaccagtacctgtactacttgtctcggattcaaacaacaggaggcacggcaaatacgcagactctgggcttcagccaaggtgggcctaatacaatggccaatcaggcaaagaactggctgccaggaccctgttaccgccaacaacgcgtctcaacgacaaccgggcaaaacaacaatagcaactttgcctggactgctgggaccaaataccatctgaatggaagaaattcattggctaatcctagcatcgctatggcaacacacaaagacgacgaggagcgtttttttcccagtaacgggatcctgatttttggcaaacaaaatgctgccagagacaatgcggattacagcgatgtcatgcccaccagcgaggaagaaatcaaaaccactaaccctgtggccacagaggaatacggtatcgtggcagataacttgcagcagcaaaacacggctcctcaaattggaactgtcaacagccagggggccttacccggtatggtctggcagaaccgggacgtgtacctgcagggtcccatctgggccaagattcctcacacggacggcaacttccacccgtctccgctgatgggcggctttggcctgaaacatcctccgcctcagatcctgatcaagaacacgcctgtacctgcggatcctccgaccaccttcaaccagtcaaagctgaactctttcatcacgcaatacagcaccggacaggtcagcgtggaaattgaatgggagctgcagaaggaaaacagcaagcgctggaaccccgagatccagtacacctccaactactacaaatctacaagtgtggactttgctgttaatacagaaggcgtgtactctgaaccccgccccattggcacccgttacctcacccgtaatctgtaa

SEQ ID NO: 3813 - DNA, 2217 bp, synthetic construct
  misc_feature 1..2217: note = source = /note="Description of Artificial Sequence: Synthetic polynucleotide"
  source 1..2217: mol_type = other DNA
atggctgccgatggttatcttccagattggctcgaggacaacctctctgagggcattcgcgagtggtgggcgctgaaacctggagccccgaagcccaaagccaaccagcaaaagcaggacgacggccggggtctggtgcttcctggctacaagtacctcggacccttcaacggactcgacaagggggagcccgtcaacgcggcggacgcggcggccctcgagcacgacaaggcctacgaccagcagctgcaggcgggtgacaatccgtacctgcggtataaccacgccgacgccgagtttcaggagcgtctgcaagaagatacgtcttttgggggcaacctcgggcgagcagtcttccaggccaagaagcgggttctcgaacctctcggtctggttgaggaaggcgctaagacggctcctggaaagaagagaccggtagagccatcaccccagcgttctccagactcctctacgggcatcggcaagaagggccaacagcccgccagaaaaagactcaattttggtcagactggcgactcagagtcagttccagaccctcaacctctcggagaacctccagcagcgccctctggtgtgggacctaatacaatggctgcaggcggtggcgcaccaatggcagacaataacgaaggcgccgacggagtgggtagttcctcgggaaattggcattgcgattccacatggctgggcgacagagtcatcaccaccagcacccgaacctgggccctgcccacctacaacaaccacctctacaagcaaatctccaacgggacatcgggaggagccaccaacgacaacacctacttcggctacagcaccccctgggggtattttgactttaacagattccactgccacttttcaccacgtgactggcagcgactcatcaacaacaactggggattccggcccaagagactcagcttcaagctcttcaacatccaggtcaaggaggtcacgcagaatgaaggcaccaagaccatcgccaataacctcaccagcaccatccaggtgtttacggactcggagtaccagctgccgtacgttctcggctctgcccaccagggctgcctgcctccgttcccggcggacgtgttcacgattccccagtacggctacctaacactcaacaacggtagtcaggccgtgggacgctcctccttctactgcctggaatactttccttcgcagatgctgagaaccggcaacaacttccagtttacttacaccttcgaggacgtgcctttccacagcagctacgcccacagccagagcttggaccggctgatgaatcctctgattgaccagtacctgtactacttgtctcggattcaaacaacaggaggcacggcaaatacgcagactctgggcttcagccaaggtgggcctaatacaatggccaatcaggcaaagaactggctgccaggaccctgttaccgccaacaacgcgtctcaacgacaaccgggcaaaacaacaatagcaactttgcctggactgctgggaccaaataccatctgaatggaagaaattcattggctaatcctggcatcgctatggcaacacacaaagacgacgaggagcgtttttttcccagtaacgggatcctgatttttggcaaacaaaatgctgccagagacaatgcggattacagcgatgtcatgcccaccagcgaggaagaaatcaaaaccactaaccctgtggccacagaggaatacgatatcgtggcagataacttgcagcagcaaaacacggctcctcaaattggaactgtcaacagccagggggccttacccggtatggtctggcagaaccgggacgtgtacctgcagggtcccatctgggccaagattcctcacacggacggcaacttccacccgtctccgctgatgggcggctttggcctgaaacatcctccgcctcagatcctgatcaagaacacgcctgtacctgcggatcctccgaccaccttcaaccagtcaaagctgaactctttcatcacgcaatacagcaccggacaggtcagcgtggaaattgaatgggagctgcagaaggaaaacagcaagcgctggaaccccgagatccagtacacctccaactactacaaatctacaagtgtggactttgctgttaatacagaaggcgtgtactctgaaccccgccccattggcacccgttacctcacccgtaatctgtaa

SEQ ID NO: 3814 - DNA, 2217 bp, synthetic construct
  misc_feature 1..2217: note = source = /note="Description of Artificial Sequence: Synthetic polynucleotide"
  source 1..2217: mol_type = other DNA
atggctgccgatggttatcttccagattggctcgaggacaacctctctgagggcattcgcgagtggtgggcgctgaaacctggagccccgaagcccaaagccaaccagcaaaagcaggacgacggccggggtctggtgcttcctggctacaagtacctcggacccttcaacggactcgacaagggggagcccgtcaacgcggcggacgcggcggccctcgagcacgacaaggcctacgaccagcagctgcaggcgggtgacaatccgtacctgcggtataaccacgccgacgccgagtttcaggagcgtctgcaagaagatacgtcttttgggggcaacctcgggcgagcagtcttccaggccaagaagcgggttctcgaacctctcggtctggttgaggaaggcgctaagacggctcctggaaagaagagaccggtagagccatcaccccagcgttctccagactcctctacgggcatcggcaagaagggccaacagcccgccagaaaaagactcaattttggtcagactggcgactcagagtcagttccagaccctcaacctctcggagaacctccagcagcgccctctggtgtgggacctaatacaatggctgcaggcggtggcgcaccaatggcagacaataacgaaggcgccgacggagtgggtagttcctcgggaaattggcattgcgattccacatggctgggcgacagagtcatcaccaccagcacccgaacctgggccctgcccacctacaacaaccacctctacaagcaaatctccaacgggacatcgggaggagccaccaacgacaacacctacttcggctacagcaccccctgggggtattttgactttaacagattccactgccacttttcaccacgtgactggcagcgactcatcaacaacaactggggattccggcccaagagactcagcttcaagctcttcaacatccaggtcaaggaggtcacgcagaatgaaggcaccaagaccatcgccaataacctcaccagcaccatccaggtgtttacggactcggagtaccagctgccgtacgttctcggctctgcccaccagggctgcctgcctccgttcccggcggacgtgttcacgattccccagtacggctacctaacactcaacaacggtagtcaggccgtgggacgctcctccttctactgcctggaatactttccttcgcagatgctgagaaccggcaacaacttccagtttacttacaccttcgaggacgtgcctttccacagcagctacgcccacagccagagcttggaccggctgatgaatcctctgattgaccagtacctgtactacttgtctcggattcaaacaacaggaggcacggcaaatacgcagactccgggcttcagccaaggtgggcctaatacaatggccaatcaggcaaagaactggctgccaggaccctgttaccgccaacaacgcgtctcaacgacaaccgggcaaaacaacaatagcaactttgcctggactgctgggaccaaataccatctgaatggaagaaattcattggctaatcctggcatcgctatggcaacacacaaagacgacgaggagcgtttttttcccagtaacgggatcctgatttttggcaaacaaaatgctgccagagacaatgcggattacagcgatgtcatgcccaccagcgaggaagaaatcaaaaccactaaccctgtggccacagaggaatacggtatcgtggcagataacttgcagcagcaaaacacggctcctcaaattggaactgtcaacagccagggggccttacccggtatggtctggcagaaccgggacgtgtacctgcagggtcccatctgggccaagattcctcacacggacggcaacttccacccgtctccgctgatgggcggctttggcctgaaacatcctccgcctcagatcctgatcaagaacacgcctgtacctgcggatcctccgaccaccttcaaccagtcaaagctgaactctttcatcacgcaatacagcaccggacaggtcagcgtggaaattgaatgggagctgcagaaggaaaacagcaagcgctggaaccccgagatccagtacacctccaactactacaaatctacaagtgtggactttgctgttaatacagaaggcgtgtactctgaaccccgccccattggcacccgttacctcacccgtaatctgtaa

SEQ ID NO: 3815 - DNA, 2217 bp, synthetic construct
  misc_feature 1..2217: note = source = /note="Description of Artificial Sequence: Synthetic polynucleotide"
  source 1..2217: mol_type = other DNA
atggctgccgatggttatcttccagattggctcgaggacaacctctctgagggcattcgcgagtggtgggcgctgaaacctggagccccgaagcccaaagccaaccagcaaaagcaggacgacggccggggtctggtgcttcctggctacaagtacctcggacccttcaacggactcgacaagggggagcccgtcaacgcggcggacgcggcggccctcgagcacgacaaggcctacgaccagcagctgcaggcgggtgacaatccgtacctgcggtataaccacgccgacgccgagtttcaggagcgtctgcaagaagatacgtcttttgggggcaacctcgggcgagcagtcttccaggccaagaagcgggttctcgaacctctcggtctggttgaggaaggcgctaagacggctcctggaaagaagagaccggtagagccatcaccccagcgttctccagactcctctacgggcatcggcaagaagggccaacagcccgccagaaaaagactcaattttggtcagactggcgactcagagtcagttccagaccctcaacctctcggagaacctccagcagcgccctctggtgtgggacctaatacaatggctgcaggcggtggcgcaccaatggcagacaataacgaaggcgccgacggagtgggtagttcctcgggaaattggcattgcgattccacatggctgggcgacagagtcatcaccaccagcacccgaacctgggccctgcccacctacaacaaccacctctacaagcaaatctccaacgggacatcgggaggagccaccaacgacaacacctacttcggctacagcaccccctgggggtattttgactttaacagattccactgccacttttcaccacgtgactggcagcgactcatcaacaacaactggggattccggcccaagagactcagcttcaagctcttcaacatccaggtcaaggaggtcacgcagaatgaaggcaccaagaccatcgccaataacctcaccagcaccatccaggtgtttacggactcggagtaccagctgccgtacgttctcggctctgcccaccagggctgcctgcctccgttcccggcggacgtgttcacgattccccagtacggctacctaacactcaacaacggtagtcaggccgtgggacgctcctcctcctactgcctggaatactttccttcgcagatgctgagaaccggcaacaacttccagtttacttacaccttcgaggacgtgcctttccacagcagctacgcccacagccagagcttggaccggctgatgaatcctctgattgaccagtacctgtactacttgtctcggattcaaacaacaggaggcacggcaaatacgcagactctgggcttcagccaaggtgggcctaatacaatggccaatcaggcaaagaactggctgccaggaccctgttaccgccaacaacgcgtctcaacgacaaccgggcaaaacaacaatagcaactttgcctggactgctgggaccaaataccatctgaatggaagaaattcattggctaatcctggcatcgctatggcaacacacaaagacgacgaggagcgtttttttcccagtaacgggatcctgatttttggcaaacaaaatgctgccagagacaatgcggattacagcgatgtcatgcccaccagcgaggaagaaatcaaaaccactaaccctgtggccacagaggaatacggtatcgtggcagataacttgcagcagcaaaacacggctcctcaaattggaactgtcaacagccagggggccttacccggtatggtctggcagaaccgggacgtgtacctgcagggtcccatctgggccaagattcctcacacggacggcaacttccacccgtctccgctgatgggcggctttggcctgaaacatcctccgcctcagatcctgatcaagaacacgcctgtacctgcggatcctccgaccaccttcaaccagtcaaagctgaactctttcatcacgcaatacagcaccggacaggtcagcgtggaaattgaatgggagctgcagaaggaaaacagcaagcgctggaaccccgagatccagtacacctccaactactacaaatctacaagtgtggactttgctgttaatacagaaggcgtgtactctgaaccccgccccattggcacccgttacctcacccgtaatctgtaa

SEQ ID NO: 3816 - DNA, 2217 bp, synthetic construct
  misc_feature 1..2217: note = source = /note="Description of Artificial Sequence: Synthetic polynucleotide"
  source 1..2217: mol_type = other DNA
atggctgccgatggttatcttccagattggctcgaggacaacctctctgagggcattcgcgagtggtgggcgctgaaacctggagccccgaagcccaaagccaaccagcaaaagcaggacgacggccggggtctggtgcttcctggctacaagtacctcggacccttcaacggactcgacaagggggagcccgtcaacgcggcggacgcggcggccctcgagcacgacaaggcctacgaccagcagctgcaggcgggtgacaatccgtacctgcggtataaccacgccgacgccgagtttcaggagcgtctgcaagaagatacgtcttttgggggcaacctcgggcgagcagccttccaggccaagaagcgggttctcgaacctctcggtctggttgaggaaggcgctaagacggctcctggaaagaagagaccggtagagccatcaccccagcgttctccagactcctctacgggcatcggcaagaagggccaacagcccgccagaaaaagactcaattttggtcagactggcgactcagagtcagttccagaccctcaacctctcggagaacctccagcagcgccctctggtgtgggacctaatacaatggctgcaggcggtggcgcaccaatggcagacaataacgaaggcgccgacggagtgggtagttcctcgggaaattggcattgcgattccacatggctgggcgacagagtcatcaccaccagcacccgaacctgggccctgcccacctacaacaaccacctctacaagcaaatctccaacgggacatcgggaggagccaccaacgacaacacctacttcggctacagcaccccctgggggtattttgactttaacagattccactgccacttttcaccacgtgactggcagcgactcatcaacaacaactggggattccggcccaagagactcagcttcaagctcttcaacatccaggtcaaggaggtcacgcagaatgaaggcaccaagaccatcgccaataacctcaccagcaccatccaggtgtttacggactcggagtaccagctgccgtacgttctcggctctgcccaccagggctgcctgcctccgttcccggcggacgtgttcacgattccccagtacggctacctaacactcaacaacggtagtcaggccgtgggacgctcctccttctactgcctggaatactttccttcgcagatgctgagaaccggcaacaacttccagtttacttacaccttcgaggacgtgcctttccacagcagctacgcccacagccagagcttggaccggctgatgaatcctctgattgaccagtacctgtactacttgtctcggattcaaacaacaggaggcacggcaaatacgcagactctgggcttcagccaaggtgggcctaatacaatggccaatcaggcaaagaactggctgccaggaccctgttaccgccaacaacgcgtctcaacgacaaccgggcaaaacaacaatagcaactttgcctggactgctgggaccaaataccatctgaatggaagaaattcattggctaatcctggcatcgctatggcaacacacaaagacgacgaggagcgtttttttcccagtaacgggatcctgatttttggcaaacaaaatgctgccagagacaatgcggattacagcgatgtcatgcccaccagcgaggaagaaatcaaaaccactaaccctgtggccacagaggaatacggtatcgtggcagataacttgcagcagcaaaacacggctcctcaaattggaactgtcaacagccagggggccttacccggtatggtctggcagaaccgggacgtgtacctgcagggtcccatctgggccaagattcctcacacggacggcaacttccacccgtctccgctgatgggcggctttggcctgaaacatcctccgcctcagatcctgatcaagaacacgcctgtacctgcggatcctccgaccaccttcaaccagtcaaagctgaactctttcatcacgcaatacagcaccggacaggtcagcgtggaaattgaatgggagctgcagaaggaaaacagcaagcgctggaaccccgagatccagtacacctccaactactacaaatctacaagtgtggactttgctgttaatacagaaggcgtgtactctgaaccccgccccattggcacccgttacctcacccgtaatctgtaa

SEQ ID NO: 3817 - DNA, 2217 bp, synthetic construct
  misc_feature 1..2217: note = source = /note="Description of Artificial Sequence: Synthetic polynucleotide"
  source 1..2217: mol_type = other DNA
atggctgccgatggttatcttccagattggctcgaggacaacctctctgagggcattcgcgagtggtgggcgctgaaacctggagccccgaagcccaaagccaaccagcaaaagcaggacgacggccggggtctggtgcttcctggctacaagtacctcggacccttcaacggactcgacaagggggagcccgtcaacgcggcggacgcggcggccctcgagcacgacaaggcctacgaccagcagctgcaggcgggtgacaatccgtacctgcggtataaccacgccgacgccgagtttcaggagcgtctgcaagaagatacgtcttttgggggcaacctcgggcgagcagtcttccaggccaagaagcgggttctcgaacctctcggtctggttgaggaaggcgctaagacggctcctggaaagaagagaccggtagagccatcaccccagcgttctccagactcctctacgggcatcggcaagaagggccaacagcccgccagaaaaagactcaattttggtcagactggcgactcagagtcagttccagaccctcaacctctcggagaacctccagcagcgccctctggtgtgggacctaatacaatggctgcaggcggtggcgcaccaatggcagacaataacgaaggcgccgacggagtgggtagttcctcgggaaattggcattgcgattccacatggctgggcgacagagtcatcaccaccagcacccgaacctgggccctgcccacctacaacaaccacctctacaagcaaatctccaacgggacatcgggaggagccaccgacgacaacacctacttcggctacagcaccccctgggggtattttgactttaacagattccactgccacttttcaccacgtgactggcagcgactcatcaacaacaactggggattccggcccaagagactcagcttcaagctcttcaacatccaggtcaaggaggtcacgcagaatgaaggcaccaagaccatcgccaataacctcaccagcaccatccaggtgtttacggactcggagtaccagctgccgtacgttctcggctctgcccaccagggctgcctgcctccgttcccggcggacgtgttcacgattccccagtacggctacctaacactcaacaacggtagtcaggccgtgggacgctcctccttctactgcctggaatactttccttcgcagatgctgagaaccggcaacaacttccagtttacttacaccttcgaggacgtgcctttccacagcagctacgcccacagccagagcttggaccggctgatgaatcctctgattgaccagtacctgtactacttgtctcggattcaaacaacaggaggcacggcaaatacgcagactctgggcttcagccaaggtgggcctaatacaatggccaatcaggcaaagaactggctgccaggaccctgttaccgccaacaacgcgtctcaacgacaaccgggcaaaacaacaatagcaactttgcctggactgctgggaccaaataccatctgaatggaagaaattcattggctaatcctggcatcgctatggcaacacacaaagacgacgaggagcgtttttttcccagtaacgggatcctgatttttggcaaacaaaatgctgccagagacaatgcggattacagcgatgtcatgcccaccagcgaggaagaaatcaaaaccactaaccctgtggccacagaggaatacggtatcgtggcagataacttgcagcagcaaaacacggctcctcaaattggaactgtcaacagccagggggccttacccggtatggtctggcagaaccgggacgtgtacctgcagggtcccatctgggccaagattcctcacacggacggcaacttccacccgtctccgctgatgggcggctttggcctgaaacatcctccgcctcagatcctgatcaagaacacgcctgtacctgcggatcctccgaccaccttcaaccagtcaaagctgaactctttcatcacgcaatacagcaccggacaggtcagcgtggaaattgaatgggagctgcagaaggaaaacagcaagcgctggaaccccgagatccagtacacctccaactactacaaatctacaagtgtggactttgctgttaatacagaaggcgtgtactctgaaccccgccccattggcacccgttacctcacccgtaatctgtaa

SEQ ID NO: 3818 - DNA, 2217 bp, synthetic construct
  misc_feature 1..2217: note = source = /note="Description of Artificial Sequence: Synthetic polynucleotide"
  source 1..2217: mol_type = other DNA
atggctgccgatggttatcttccagattggctcgaggacaacctctctgagggcattcgcgagtggtgggcgctgaaacctggagccccgaagcccaaagccaaccagcaaaagcaggacgacggccggggtctggtgcttcctggctacaagtacctcggacccttcaacggactcgacaagggggagcccgtcaacgcggcggacgcggcggccctcgagcacgacaaggcctacgaccagcagctgcaggcgggtgacaatccgtacctgcggtataaccacgccgacgccgagtttcaggagcgtctgcaagaagatacgtcttttgggggcaacctcgggcgagcagtcttccaggccaagaagcgggttctcgaacctctcggtctggttgaggaaggcgctaagacggctcctggaaagaagagaccggtagagccatcaccccagcgttctccagactcctctacgggcatcggcaagaagggccaacagcccgccagaaaaagactcaattttggtcagactggcgactcagagtcagttccagaccctcaacctctcggagaacctccagcagcgccctctggtgtgggacctaatacaatggctgcaggcggtggcgcaccaatggcagacaataacgaaggcgccgacggagtgggtagttcctcgggaaattggcattgcgattccacatggctgggcgacagagtcatcaccaccagcacccgaacctgggccctgcccacctacaacaaccacctctacaagcaaatctccaacgggacatcgggaggagccaccaacgacaacacctacttcggctacagcaccccctgggggtattttgactttaacagattccactgccacttttcaccacgtgactggcagcgactcatcaacaacaactggggattccggcccaagagactcagcttcaagctcttcaacatccaggtcaaggaggtcacgcagaatgaaggcaccaagaccatcgccaataacctcaccagcaccatccaggtgtttacggactcggagtaccagctgccgtacgttctcggctctgcccaccagggctgcctgcctccgttcccggcggacgtgttcacgattccccagtacggctacctaacactcaacaacggtagtcaggccgtgggacgctcctccttctactgcctggaatactttccttcgcagatgctgagaaccggcaacaacttccagtttacttacaccttcgaggacgtgcctttccacagcagctacgcccacagccagagcttggaccggctgatgaatcctctgattgaccagtacctgtactacttgtctcggattcaaacaacaggaggcacggcaaatacgcagactctgggcttcagccaaggtgggcctaatacaatggccaatcaggcaaagaactggctgccaggaccctgttaccgccaacaacgcgtctcaacgacaaccgggcaaaacaacaatagcaactttgcctggactgctgggaccaaataccatctgaatggaagaaattcattggctaatcctggcatcgctatggcaacacacaaagacgacgaggagcgtttttttcccagtaacgggatcctgatttttggcaaacaaaatgctaccagagacaatgcggattacagcgatgtcatgcccaccagcgaggaagaaatcaaaaccactaaccctgtggccacagaggaatacggtatcgtggcagataacttgcagcagcaaaacacggctcctcaaattggaactgtcaacagccagggggccttacccggtatggtctggcagaaccgggacgtgtacctgcagggtcccatctgggccaagattcctcacacggacggcaacttccacccgtctccgctgatgggcggctttggcctgaaacatcctccgcctcagatcctgatcaagaacacgcctgtacctgcggatcctccgaccaccttcaaccagtcaaagctgaactctttcatcacgcaatacagcaccggacaggtcagcgtggaaattgaatgggagctgcagaaggaaaacagcaagcgctggaaccccgagatccagtacacctccaactactacaaatctacaagtgtggactttgctgttaatacagaaggcgtgtactctgaaccccgccccattggcacccgttacctcacccgtaatctgtaa

SEQ ID NO: 3819 - DNA, 2217 bp, synthetic construct
  misc_feature 1..2217: note = source = /note="Description of Artificial Sequence: Synthetic polynucleotide"
  source 1..2217: mol_type = other DNA
atggctgccgatggttatcttccagattggctcgaggacaacctctctgagggcattcgcgagtggtgggcgctgaaacctggagccccgaagcccaaagccaaccagcaaaagcaggacgacggccggggtctggtgcttcctggctacaagtacctcggacccttcaacggactcgacaagggggagcccgtcaacgcggcggacgcggcggccctcgagcacgacaaggcctacgaccagcagctgcaggcgggtgacaatccgtacctgcggtataaccacgccgacgccgagtttcaggagcgtctgcaagaagatacgtcttttgggggcaacctcgggcgagcagtcttccaggccaagaagcgggttctcgaacctctcggtctggttgaggaaggcgctaagacggctcctggaaagaagagaccggtagagccatcaccccagcgttctccagactcctctacgggcatcggcaagaagggccaacagcccgccagaaaaagactcaattttggtcagactggcgactcagagtcagttccagaccctcaacctctcggagaacctccagcagcgccctctggtgtgggacctaatacaatggctgcaggcggtggcgcaccaatggcagacaataacgaaggcgccgacggagtgggtagttcctcgggaaattggcattgcgattccacatggctgggcgacagagtcatcaccaccagcacccgaacctgggccctgcccacctacaacaaccacctctacaagcaaatctccaacgggacatcgggaggagccaccaacgacaacacctacttcggctacagcaccccctgggggtattttgactttaacagattccactgccacttttcaccacgtgactggcagcgactcatcaacaacaactggggattccggcccaagagactcagcttcaagctcttcaacatccaggtcaaggaggtcacgcagaatgaaggcaccaagaccatcgccaataacctcaccagcaccatccaggtgtttacggactcggagtaccagctgccgtacgttctcggctctgcccaccagggctgcctgcctccgttcccggcggacgtgttcacgattccccagtacggctacctaacactcaacaacggtagtcaggccgtgggacgctcctccttctactgcctggaatactttccttcgcagatgctgagaaccggcaacaacttccagtttacttacaccttcgaggacgtgcctttccacagcagctacgcccacagccagagcttggaccggctgatgaatcctctgattgaccagtacctgtactacttgtctcggattcaaacaacaggaggcacggcaaatacgcagactctgggcttcagccaaggtgggcctaatacaatggccaatcaggcaaagaactggctgccaggaccctgttaccgccaacaacgcgtctcaacgacaaccgggcaaaacaacaatagcaactttgcctggactgctgggaccaaataccatctgaatggaagaaattcattggctaatcctggcatcgctatggcaacacacaaagacgacgaggagcgtttttttcccagtaacgggatcctgatttttggcaaacaaaatgctgccagagacaatgcggattacagcgatgtcatgcccaccagcgaggaagaaatcaaaaccactaaccctgtggccacagaggaacacggtatcgtggcagataacttgcagcagcaaaacacggctcctcaaattggaactgtcaacagccagggggccttacccggtatggtctggcagaaccgggacgtgtacctgcagggtcccatctgggccaagattcctcacacggacggcaacttccacccgtctccgctgatgggcggctttggcctgaaacatcctccgcctcagatcctgatcaagaacacgcctgtacctgcggatcctccgaccaccttcaaccagtcaaagctgaactctttcatcacgcaatacagcaccggacaggtcagcgtggaaattgaatgggagctgcagaaggaaaacagcaagcgctggaaccccgagatccagtacacctccaactactacaaatctacaagtgtggactttgctgttaatacagaaggcgtgtactctgaaccccgccccattggcacccgttacctcacccgtaatctgtaa

SEQ ID NO: 3820 - DNA, 2217 bp, synthetic construct
  misc_feature 1..2217: note = source = /note="Description of Artificial Sequence: Synthetic polynucleotide"
  source 1..2217: mol_type = other DNA
atggctgccgatggttatcttccagattggctcgaggacaacctctctgagggcattcgcgagtggtgggcgctgaaacctggagccccgaagcccaaagccaaccagcaaaagcaggacgacggccggggtctggtgcttcctggctacaagtacctcggacccttcaacggactcgacaagggggagcccgtcaacgcggcggacgcggcggccctcgagcacgacaaggcctacgaccagcagctgcaggcgggtgacaatccgtacctgcggtataaccacgccgacgccgagtttcaggagcgtctgcaagaagatacgtcttttgggggcaacctcgggcgagcagtcttccaggccaagaagcgggttctcgaacctctcggtctggttgaggaaggcgctaagacggctcctggaaagaagagaccggtagagccatcaccccagcgttctccagactcctctacgggcatcggcaagaagggccaacagcccgccagaaaaagactcaattttggtcagactggcgactcagagtcagttccagaccctcaacctctcggagaacctccagcagcgccctctggtgtgggacctaatacaatggctgcaggcggtggcgcaccaatggcagacaataacgaaggcgccgacggagtgggtagttcctcgggaaattggcattgcgattccacatggctgggcgacagagtcatcaccaccagcacccgaacctgggccctgcccacctacaacaaccacctctacaagcaaatctccaacgggacatcgggaggagccaccaacgacaacacctacttcggctacagcaccccctgggggtattttgactttaacagattccactgccacttttcaccacgtgactggcagcgactcatcaacaacaactggggattccggcccaagagactcagcttcaagctcttcaacatccaggtcaaggaggtcacgcagaatgaaggcaccaagaccatcgccaataacctcaccagcaccatccaggtgtttacggactcggagtaccagctgccgtacgttctcggctctgcccaccagggctgcctgcctccgttcccggcggacgtgttcacgattccccagtacggctacctaacactcaacaacggtagtcaggccgtgggacgctcctccttctactgcctggaatactttccttcgcagatgctgagaaccggcaacaacttccagtttacttacaccttcgaggacgtgcctttccacagcagctacgcccgcagccagagcttggaccggctgatgaatcctctgattgaccagtacctgtactacttgtctcggattcaaacaacaggaggcacggcaaatacgcagactctgggcttcagccaaggtgggcctaatacaatggccaatcaggcaaagaactggctgccaggaccctgttaccgccaacaacgcgtctcaacgacaaccgggcaaaacaacaatagcaactttgcctggactgctgggaccaaataccatctgaatggaagaaattcattggctaatcctggcatcgctatggcaacacacaaagacgacgaggagcgtttttttcccagtaacgggatcctgatttttggcaaacaaaatgctgccagagacaatgcggattacagcgatgtcatgcccaccagcgaggaagaaatcaaaaccactaaccctgtggccacagaggaatacggtatcgtggcagataacttgcagcagcaaaacacggctcctcaaattggaactgtcaacagccagggggccttacccggtatggtctggcagaaccgggacgtgtacctgcagggtcccatctgggccaagattcctcacacggacggcaacttccacccgtctccgctgatgggcggctttggcctgaaacatcctccgcctcagatcctgatcaagaacacgcctgtacctgcggatcctccgaccaccttcaaccagtcaaagctgaactctttcatcacgcaatacagcaccggacaggtcagcgtggaaattgaatgggagctgcagaaggaaaacagcaagcgctggaaccccgagatccagtacacctccaactactacaaatctacaagtgtggactttgctgttaatacagaaggcgtgtactctgaaccccgccccattggcacccgttacctcacccgtaatctgtaa

SEQ ID NO: 3821 - DNA, 2217 bp, synthetic construct
  misc_feature 1..2217: note = source = /note="Description of Artificial Sequence: Synthetic polynucleotide"
  source 1..2217: mol_type = other DNA
atggctgccgatggttatcttccagattggctcgaggacaacctctctgagggcattcgcgagtggtgggcgctgaaacctggagccccgaagcccaaagccaaccagcaaaagcaggacgacggccggggtctggtgcttcctggctacaagtacctcggacccttcaacggactcgacaagggggagcccgtcaacgcggcggacgcggcggccctcgagcacgacaaggcctacgaccagcagctgcaggcgggtgacaatccgtacctgcggtataaccacgccgacgccgagtttcaggagcgtctgcaagaagatacgtcttttgggggcaacctcgggcgagcagtcttccaggccaagaagcgggttctcgaacctctcggtctggttgaggaaggcgctaagacggctcctggaaagaagagaccggtagagccatcaccccagcgttctccagactcctctacgggcatcggcaagaagggccaacagcccgccagaaaaagactcaattttggtcagactggcgactcagagtcagttccagaccctcaacctctcggagaacctccagcagcgccctctggtgtgggacctaatacaatggctgcaggcggtggcgcaccaatggcagacaataacgaaggcgccgacggagtgggtagttcctcgggaaattggcattgcgattccacatggctgggcgacagagtcatcaccaccagcacccgaacctgggccctgcccacctacaacaaccacctctacaagcaaatctccaacgggacatcgggaggagccaccaacgacaacacctacttcggctacagcaccccctgggggtattttgactttaacagattccactgccacttttcaccacgtgactggcagcgactcatcaacaacaactggggattccggcccaagagactcagcttcaagctcttcaacatccaggtcaaggaggtcacgcagaatgaaggcaccaagaccatcgccaataacctcaccagcaccatccaggtgtttacggactcggagtaccagctgccgtacgttctcggctctgcccaccagggctgcctgcctccgctcccggcggacgtgttcacgattccccagtacggctacctaacactcaacaacggtagtcaggccgtgggacgctcctccttctactgcctggaatactttccttcgcagatgctgagaaccggcaacaacttccagtttacttacaccttcgaggacgtgcctttccacagcagctacgcccacagccagagcttggaccggctgatgaatcctctgattgaccagtacctgtactacttgtctcggattcaaacaacaggaggcacggcaaatacgcagactctgggcttcagccaaggtgggcctaatacaatggccaatcaggcaaagaactggctgccaggaccctgttaccgccaacaacgcgtctcaacgacaaccgggcaaaacaacaatagcaactttgcctggactgctgggaccaaataccatctgaatggaagaaattcattggctaatcctggcatcgctatggcaacacacaaagacgacgaggagcgtttttttcccagtaacgggatcctgatttttggcaaacaaaatgctgccagagacaatgcggattacagcgatgtcatgcccaccagcgaggaagaaatcaaaaccactaaccctgtggccacagaggaatacggtatcgtggcagataacttgcagcagcaaaacacggctcctcaaattggaactgtcaacagccagggggccttacccggtatggtctggcagaaccgggacgtgtacctgcagggtcccatctgggccaagattcctcacacggacggcaacttccacccgtctccgctgatgggcggctttggcctgaaacatcctccgcctcagatcctgatcaagaacacgcctgtacctgcggatcctccgaccaccttcaaccagtcaaagctgaactctttcatcacgcaatacagcaccggacaggtcagcgtggaaattgaatgggagctgcagaaggaaaacagcaagcgctggaaccccgagatccagtacacctccaactactacaaatctacaagtgtggactttgctgttaatacagaaggcgtgtactctgaaccccgccccattggcacccgttacctcacccgtaatctgtaa

SEQ ID NO: 3822 - DNA, 2217 bp, synthetic construct
  misc_feature 1..2217: note = source = /note="Description of Artificial Sequence: Synthetic polynucleotide"
  source 1..2217: mol_type = other DNA
atggctgccgatggttatcttccagattggctcgaggacaacctctctgagggcattcgcgagtggtgggcgctgaaacctggagccccgaagcccaaagccaaccagcaaaagcaggacgacggccggggtctggtgcttcctggctacaagtacctcggacccttcaacggactcgacaagggggagcccgtcaacgcggcggacgcggcggccctcgagcacgacaaggcctacgaccagcagctgcaggcgggtgacaatccgtacctgcggtataaccacgccgacgccgagtttcaggagcgtctgcaagaagatacgtcttttgggggcaacctcgggcgagcagtcttccaggccaagaagcgggttctcgaacctctcggtctggttgaggaaggcgctaagacggctcctggaaagaagagaccggtagagccatcaccccagcgttctccagactcctctacgggcatcggcaagaagggccaacagcccgccagaaaaagactcaattttggtcagactggcgactcagagtcagttccagaccctcaacctctcggagaacctccagcagcgccctctggtgtgggacctaatacaatggctgcaggcggtggcgcaccaatggcagacaataacgaaggcgccgacggagtgggtagttcctcgggaaattggcattgcgattccacatggctgggcgacagagtcatcaccaccagcacccgaacccgggccctgcccacctacaacaaccacctctacaagcaaatctccaacgggacatcgggaggagccaccaacgacaacacctacttcggctacagcaccccctgggggtattttgactttaacagattccactgccacttttcaccacgtgactggcagcgactcatcaacaacaactggggattccggcccaagagactcagcttcaagctcttcaacatccaggtcaaggaggtcacgcagaatgaaggcaccaagaccatcgccaataacctcaccagcaccatccaggtgtttacggactcggagtaccagctgccgtacgttctcggctctgcccaccagggctgcctgcctccgttcccggcggacgtgttcacgattccccagtacggctacctaacactcaacaacggtagtcaggccgtgggacgctcctccttctactgcctggaatactttccttcgcagatgctgagaaccggcaacaacttccagtttacttacaccttcgaggacgtgcctttccacagcagctacgcccacagccagagcttggaccggctgatgaatcctctgattgaccagtacctgtactacttgtctcggattcaaacaacaggaggcacggcaaatacgcagactctgggcttcagccaaggtgggcctaatacaatggccaatcaggcaaagaactggctgccaggaccctgttaccgccaacaacgcgtctcaacgacaaccgggcaaaacaacaatagcaactttgcctggactgctgggaccaaataccatctgaatggaagaaattcattggctaatcctggcatcgctatggcaacacacaaagacgacgaggagcgtttttttcccagtaacgggatcctgatttttggcaaacaaaatgctgccagagacaatgcggattacagcgatgtcatgcccaccagcgaggaagaaatcaaaaccactaaccctgtggccacagaggaatacggtatcgtggcagataacttgcagcagcaaaacacggctcctcaaattggaactgtcaacagccagggggccttacccggtatggtctggcagaaccgggacgtgtacctgcagggtcccatctgggccaagattcctcacacggacggcaacttccacccgtctccgctgatgggcggctttggcctgaaacatcctccgcctcagatcctgatcaagaacacgcctgtacctgcggatcctccgaccaccttcaaccagtcaaagctgaactctttcatcacgcaatacagcaccggacaggtcagcgtggaaattgaatgggagctgcagaaggaaaacagcaagcgctggaaccccgagatccagtacacctccaactactacaaatctacaagtgtggactttgctgttaatacagaaggcgtgtactctgaaccccgccccattggcacccgttacctcacccgtaatctgtaa

SEQ ID NO: 3823 - DNA, 2217 bp, synthetic construct
  misc_feature 1..2217: note = source = /note="Description of Artificial Sequence: Synthetic polynucleotide"
  source 1..2217: mol_type = other DNA
atggctgccgatggttatcttccagattggctcgaggacaacctctctgagggcattcgcgagtggtgggcgctgaaacctggagccccgaagcccaaagccaaccagcaaaagcaggacgacggccggggtctggtgcttcctggctacaagtacctcggacccttcaacggactcgacaagggggagcccgtcaacgcggcggacgcggcggccctcgagcacgacaaggcctacgaccagcagctgcaggcgggtgacaatccgtacctgcggtataaccacgccgacgccgagtttcaggagcgtctgcaagaagatacgtcttttgggggcaacctcgggcgagcagtcttccaggccaagaagcgggttctcgaacctctcggtctggttgaggaaggcgctaagacggctcctggaaagaagagaccggtagagccatcaccccagcgttctccagactcctctacgggcatcggcaagaagggccaacagcccgccagaaaaagactcaattttggtcagactggcgactcagagtcagttccagaccctcaacctctcggagaacctccagcagcgccctctggtgtgggacctaatacaatggctgcaggcggtggcgcaccaatggcagacaataacgaaggcgccgacggagtgggtagttcctcgggaaattggcattgcgattccacatggctgggcgacagagtcatcaccaccagcacccgaacctgggccctgcccacctacaacaaccacctctacaagcaaatctccaacgggacatcgggaggagccaccaacgacaacacctacttcggctacagcaccccctgggggtattttgactttaacagattccactgccacttttcaccacgtgactggcagcgactcatcaacaacaactggggattccggcccaagagactcagcttcaagctcttcaacatccaggtcaaggaggtcacgcagaatgaaggcaccaagaccatcgccaataacctcaccagcaccatccaggtgtttacggactcggagtaccagctgccgtacgttctcggctctgcccaccagggctgcctgcctccgttcccggcggacgtgttcacgattccccagtacggctacctaacactcaacaacggtagtcaggccgtgggacgctcctccttctactgcctggaatactttccttcgcagatgctgagaaccggcaacaacttccagtttacttacaccttcgaggacgtgcctttccacagcagctacgcccacagccagagcttggaccggctgatgaatcctctgattgaccagtacctgtactacttgtctcggattcaaacaacaggaggcacggcaaatacgcagactctgggcttcagccaaggtgggcctaatacaatggccaatcaggcaaagaactggctgccaggaccctgttaccgccaacaacgcgtctcaacgacaaccgggcaaaacaacaatagcaactttgcctggactgctgggaccaaataccatctgaatggaagaaattcattggctaatcctggcatcgctatgacaacacacaaagacgacgaggagcgtttttttcccagtaacgggatcctgatttttggcaaacaaaatgctgccagagacaatgcggattacagcgatgtcatgcccaccagcgaggaagaaatcaaaaccactaaccctgtggccacagaggaatacggtatcgtggcagataacttgcagcagcaaaacacggctcctcaaattggaactgtcaacagccagggggccttacccggtatggtctggcagaaccgggacgtgtacctgcagggtcccatctgggccaagattcctcacacggacggcaacttccacccgtctccgctgatgggcggctttggcctgaaacatcctccgcctcagatcctgatcaagaacacgcctgtacctgcggatcctccgaccaccttcaaccagtcaaagctgaactctttcatcacgcaatacagcaccggacaggtcagcgtggaaattgaatgggagctgcagaaggaaaacagcaagcgctggaaccccgagatccagtacacctccaactactacaaatctacaagtgtggactttgctgttaatacagaaggcgtgtactctgaaccccgccccattggcacccgttacctcacccgtaatctgtaa

SEQ ID NO: 3824 - DNA, 2217 bp, synthetic construct
  misc_feature 1..2217: note = source = /note="Description of Artificial Sequence: Synthetic polynucleotide"
  source 1..2217: mol_type = other DNA
atggctgccgatggttatcttccagattggctcgaggacaacctctctgagggcattcgcgagtggtgggcgctgaaacctggagccccgaagcccaaagccaaccagcaaaagcaggacgacggccggggtctggtgcttcctggctacaagtacctcggacccttcaacggactcgacaagggggagcccgtcaacgcggcggacgcggcggccctcgagcacgacaaggcctacgaccagcagctgcaggcgggtgacaatccgtacctgcggtataaccacgccgacgccgagtttcaggagcgtctgcaagaagatacgtcttttgggggcaacctcgggcgagcagtcttccaggccaagaagcgggttctcgaacctctcggtctggttgaggaaggcgctaagacggctcctggaaagaagagaccggtagagccatcaccccagcgttctccagactcctctacgggcatcggcaagaagggccaacagcccgccagaaaaagactcaattttggtcagactggcgactcagagtcagttccagaccctcaacctctcggagaacctccagcagcgccctctggtgtgggacctaatacaatggctgcaggcggtggcgcaccaatggcagacaataacgaaggcgccgacggagtgggtagttcctcgggaaattggcattgcgattccacatggctgggcgacagagtcatcaccaccagcacccgaacctgggccctgcccacctacaacaaccacctctacaagcaaatctccaacgggacatcgggaggagccaccaacgacaacacctacttcggctacagcaccccctgggggtattttgactttaacagattccactgccacttttcaccacgtgactggcagcgactcatcaacaacaactggggattccggcccaagagactcagcttcaagctcttcaacatccaggtcaaggaggtcacgcagaatgaaggcaccaagaccatcgccaataacctcaccagcaccatccaggtgtttacggactcggagtaccagctgccgtacgttctcggctctgcccaccagggctgcctgcctccgttcccggcggacgtgttcacgattccccagtacggctacctaacactcaacaacggtagtcaggccgtgggacgctcctccttctactgcctggaatactttccttcgcagatgctgagaaccggcaacaacttccagtttacttacaccttcgaggacgtgcctttccacagcagctacgcccacagccagagcttggaccggctgatgaatcctctgattgaccagtacctgtactacttgtctcggattcaaacaacaggaggcacggcaaatacgcagactctgggcttcagccaaggtgggcctaatacaatggccaatcaggcaaagaactggctgccaggaccctgttaccgccaacaacgcgtctcaacgacaaccgggcaaaacaacaatagcaactttgcctggactgctgggaccaaataccatctgaatggaagaaattcattggctaatcctggcatcgctatggcaacacacaaagacgacgaggagcgtttttttcccagtaacgggatcctgatttttggcaaacaaaatgctgccagagacaatgcggattacagcgatgtcatgcccaccagcgaggaagaaatcaaaaccactaaccctgtggccacagaggaatacggtatcgtggcagataacttgcagcagcaaaacacggctcctcaaattggaactgtcaacagccagggggtcttacccggtatggtctggcagaaccgggacgtgtacctgcagggtcccatctgggccaagattcctcacacggacggcaacttccacccgtctccgctgatgggcggctttggcctgaaacatcctccgcctcagatcctgatcaagaacacgcctgtacctgcggatcctccgaccaccttcaaccagtcaaagctgaactctttcatcacgcaatacagcaccggacaggtcagcgtggaaattgaatgggagctgcagaaggaaaacagcaagcgctggaaccccgagatccagtacacctccaactactacaaatctacaagtgtggactttgctgttaatacagaaggcgtgtactctgaaccccgccccattggcacccgttacctcacccgtaatctgtaa

SEQ ID NO: 3825 - DNA, 2217 bp, synthetic construct
  misc_feature 1..2217: note = source = /note="Description of Artificial Sequence: Synthetic polynucleotide"
  source 1..2217: mol_type = other DNA
atggctgccgatggttatcttccagattggctcgaggacaacctctctgagggcattcgcgagtggtgggcgctgaaacctggagccccgaagcccaaagccaaccagcaaaagcaggacgacggccggggtctggtgcttcctggctacaagtacctcggacccttcaacggactcgacaagggggagcccgtcaacgcggcggacgcggcggccctcgagcacgacaaggcctacgaccagcagctgcaggcgggtgacaatccgtacctgcggtataaccacgccgacgccgagtttcaggagcgtctgcaagaagatacgtcttttgggggcaacctcgggcgagcagtcttccaggccaagaagcgggttctcgaacctctcggtctggttgaggaaggcgctaagacggctcctggaaagaagagaccggtagagccatcaccccagcgttctccagactcctctacgggcatcggcaagaagggccaacagcccgccagaaaaagactcaattttggtcagactggcgactcagagtcagttccagaccctcaacctctcggagaacctccagcagcgccctctggtgtgggacctaatacaatggctgcaggcggtggcgcaccaatggcagacaataacgaaggcgccgacggagtgggtagttcctcgggaaattggcattgcgattccacatggctgggcgacagagtcatcaccaccagcacccgaacctgggccctgcccacctacaacaaccacctctacaagcaaatctccaacgggacatcgggaggagccaccaacgacaacacctacttcggctacagcaccccctgggggtattttgactttaacagattccactgccacttttcaccacgtgactggcagcgactcgtcaacaacaactggggattccggcccaagagactcagcttcaagctcttcaacatccaggtcaaggaggtcacgcagaatgaaggcaccaagaccatcgccaataacctcaccagcaccatccaggtgtttacggactcggagtaccagctgccgtacgttctcggctctgcccaccagggctgcctgcctccgttcccggcggacgtgttcacgattccccagtacggctacctaacactcaacaacggtagtcaggccgtgggacgctcctccttctactgcctggaatactttccttcgcagatgctgagaaccggcaacaacttccagtttacttacaccttcgaggacgtgcctttccacagcagctacgcccacagccagagcttggaccggctgatgaatcctctgattgaccagtacctgtactacttgtctcggattcaaacaacaggaggcacggcaaatacgcagactctgggcttcagccaaggtgggcctaatacaatggccaatcaggcaaagaactggctgccaggaccctgttaccgccaacaacgcgtctcaacgacaaccgggcaaaacaacaatagcaactttgcctggactgctgggaccaaataccatctgaatggaagaaattcattggctaatcctggcatcgctatggcaacacacaaagacgacgaggagcgtttttttcccagtaacgggatcctgatttttggcaaacaaaatgctgccagagacaatgcggattacagcgatgtcatgcccaccagcgaggaagaaatcaaaaccactaaccctgtggccacagaggaatacggtatcgtggcrgataacttgcagcagcaaaacacggctcctcaaattggaactgtcaacagccagggggccttacccggtatggtctggcagaaccgggacgtgtacctgcagggtcccatctgggccaagattcctcacacggacggcaacttccacccgtctccgctgatgggcggctttggcctgaaacatcctccgcctcagatcctgatcaagaacacgcctgtacctgcggatcctccgaccaccttcaaccagtcaaagctgaactctttcatcacgcaatacagcaccggacaggtcagcgtggaaattgaatgggagctgcagaaggaaaacagcaagcgctggaaccccgagatccagtacacctccaactactacaaatctacaagtgtggactttgctgttaatacagaaggcgtgtactctgaaccccgccccattggcacccgttacctcacccgtaatctgtaa

SEQ ID NO: 3826 - DNA, 2217 bp, synthetic construct
  misc_feature 1..2217: note = source = /note="Description of Artificial Sequence: Synthetic polynucleotide"
  source 1..2217: mol_type = other DNA
atggctgccgatggttatcttccagattggctcgaggacaacctctctgagggcattcgcgagtggtgggcgctgaaacctggagccccgaagcccaaagccaaccagcaaaagcaggacgacggccggggtctggtgcttcctggctacaagtacctcggacccttcaacggactcgacaagggggagcccgtcaacgcggcggacgcggcggccctcgagcacgacaaggcctacgaccagcagctgcaggcgggtgacaatccgtacctgcggtataaccacgccgacgccgagtttcgggagcgtctgcaagaagatacgtcttttgggggcaacctcgggcgagcagtcttccaggccaagaagcgggttctcgaacctctcggtctggttgaggaaggcgctaagacggctcctggaaagaagagaccggtagagccatcaccccagcgttctccagactcctctacgggcatcggcaagaagggccaacagcccgccagaaaaagactcaattttggtcagactggcgactcagagtcagttccagaccctcaacctctcggagaacctccagcagcgccctctggtgtgggacctaatacaatggctgcaggcggtggcgcaccaatggcagacaataacgaaggcgccgacggagtgggtagttcctcgggaaattggcattgcgattccacatggctgggcgacagagtcatcaccaccagcacccgaacctgggccctgcccacctacaacaaccacctctacaagcaaatctccaacgggacatcgggaggagccaccaacgacaacacctacttcggctacagcaccccctgggggtattttgactttaacagattccactgccacttttcaccacgtgactggcagcgactcatcaacaacaactggggattccggcccaagagactcagcttcaagctcttcaacatccaggtcaaggaggtcacgcagaatgaaggcaccaagaccatcgccaataacctcaccagcaccatccaggtgtttacggactcggagtaccagctgccgtacgttctcggctctgcccaccagggctgcctgcctccgttcccggcggacgtgttcacgattccccagtacggctacctaacactcaacaacggtagtcaggccgtgggacgctcctccttctactgcctggaatactttccttcgcagatgctgagaaccggcaacaacttccagtttacttacaccttcgaggacgtgcctttccacagcagctacgcccacagccagagcttggaccggctgatgaatcctctgattgaccagtacctgtactacttgtctcggattcaaacaacaggaggcacggcaaatacgcagactctgggcttcagccaaggtgggcctaatacaatggccaatcaggcaaagaactggctgccaggaccctgttaccgccaacaacgcgtctcaacgacaaccgggcaaaacaacaatagcaactttgcctggactgctgggaccaaataccatctgaatggaagaaattcattggctaatcctggcatcgctatggcaacacacaaagacgacgaggagcgtttttttcccagtaacgggatcctgatttttggcaaacaaaatgctgccagagacaatgcggattacagcgatgtcatgcccaccagcgaggaagaaatcaaaaccactaaccctgtggccacagaggaatacggtatcgtggcagataacttgcagcagcaaaacacggctcctcaaattggaactgtcaacagccagggggccttacccggtatggtctggcagaaccgggacgtgtacctgcagggtcccatctgggccaagattcctcacacggacggcaacttccacccgtctccgctgatgggcggctttggcctgaaacatcctccgcctcagatcctgatcaagaacacgcctgtacctgcggatcctccgaccaccttcaaccagtcaaagctgaactctttcatcacgcaatacagcaccggacaggtcagcgtggaaattgaatgggagctgcagaaggaaaacagcaagcgctggaaccccgagatccagtacacctccaactactacaaatctacaagtgtggactttgctgttaatacagaaggcgtgtactctgaaccccgccccattggcacccgttacctcacccgtaatctgtaa

SEQ ID NO: 3827 - DNA, 2217 bp, synthetic construct
  misc_feature 1..2217: note = source = /note="Description of Artificial Sequence: Synthetic polynucleotide"
  source 1..2217: mol_type = other DNA
atggctgccgatggttatcttccagattggctcgaggacaacctctctgagggcattcgcgagtggtgggcgctgaaacctggagccccgaagcccaaagccaaccagcaaaagcaggacgacggccggggtctggtgcttcctggctacaagtacctcggacccttcaacggactcgacaagggggagcccgtcaacgcggcggacgcggcggccctcgagcacgacaaggcctacgaccagcagctgcaggcgggtgacaatccgtacctgcggtataaccacgccgacgccgagtttcaggagcgtctgcaagaagatacgtcttttgggggcaacctcgggcgagcagtcttccaggccaagaagcgggttctcgaacctctcggtctggttgaggaaggcgctaagacggctcctggaaagaagagaccggtagagccatcaccccagcgttctccagactcctctacgggcatcggcaagaagggccaacagcccgccagaaaaagactcaattttggtcagactggcgactcagagtcagttccagaccctcaacctctcggagaacctccagcagcgccctctggtgtgggacctaatacaatggctgcaggcggtggcgcaccaatggcagacaataacgaaggcgccgacggagtgggtagttcctcgggaaattggcattgcgattccacatggctgggcgacagagtcatcaccaccagcacccgaacctgggccctgcccacctacaacaaccacctctacaagcaaatctccaacgggacatcgggaggagccaccaacgacaacacctacttcggctacagcaccccctgggggtattttgactttaacagattccactgccacttttcaccacgtgactggcagcgactcatcaacaacaactggggattccggcccaagagactcagcttcaagctcttcaacatccaggtcaaggaggtcacgcagaatgaaggcaccaagaccatcgccaataacctcaccagcaccatccaggtgtttacggactcggagtaccagctgccgtacgttctcggctctgcccaccagggctgcctgcctccgttcccggcggacgtgttcacgattccccagtacggctacccaacactcaacaacggtagtcaggccgtgggacgctcctccttctactgcctggaatactttccttcgcagatgctgagaaccggcaacaacttccagtttacttacaccttcgaggacgtgcctttccacagcagctacgcccacagccagagcttggaccggctgatgaatcctctgattgaccagtacctgtactacttgtctcggattcaaacaacaggaggcacggcaaatacgcagactctgggcttcagccaaggtgggcctaatacaatggccaatcaggcaaagaactggctgccaggaccctgttaccgccaacaacgcgtctcaacgacaaccgggcaaaacaacaatagcaactttgcctggactgctgggaccaaataccatctgaatggaagaaattcattggctaatcctggcatcgctatggcaacacacaaagacgacgaggagcgtttttttcccagtaacgggatcctgatttttggcaaacaaaatgctgccagagacaatgcggattacagcgatgtcatgcccaccagcgaggaagaaatcaaaaccactaaccctgtggccacagaggaatacggtatcgtggcagataacttgcagcagcaaaacacggctcctcaaattggaactgtcaacagccagggggccttacccggtatggtctggcagaaccgggacgtgtacctgcagggtcccatctgggccaagattcctcacacggacggcaacttccacccgtctccgctgatgggcggctttggcctgaaacatcctccgcctcagatcctgatcaagaacacgcctgtacctgcggatcctccgaccaccttcaaccagtcaaagctgaactctttcatcacgcaatacagcaccggacaggtcagcgtggaaattgaatgggagctgcagaaggaaaacagcaagcgctggaaccccgagatccagtacacctccaactactacaaatctacaagtgtggactttgctgttaatacagaaggcgtgtactctgaaccccgccccattggcacccgttacctcacccgtaatctgtaa

SEQ ID NO: 3828 - DNA, 2217 bp, synthetic construct
  misc_feature 1..2217: note = source = /note="Description of Artificial Sequence: Synthetic polynucleotide"
  source 1..2217: mol_type = other DNA
atggctgccgatggttatcttccagattggctcgaggacaacctctctgagggcattcgcgagtggtgggcgctgaaacctggagccccgaagcccaaagccaaccagcaaaagcaggacgacggccggggtctggtgcttcctggctacaagtacctcggacccttcaacggactcgacaagggggagcccgtcaacgcggcggacgcggcggccctcgagcacgacaaggcctacgaccagcagctgcaggcgggtgacaatccgtacctgcggtataaccacgccgacgccgagtttcaggagcgtctgcaagaagatacgtcttttgggggcaacctcgggcgagcagtcttccaggccaagaagcgggttctcgaacctctcggtctggttgaggaaggcgctaagacggctcctggaaagaagagaccggtagagccatcaccccagcgttctccagactcctctacgggcatcggcaagaagggccaacagcccgccagaaaaagactcaattttggtcagactggcgactcagagtcagttccagaccctcaacctctcggagaacctccagcagcgccctctggtgtgggacctaatacaatgactgcaggcggtggcgcaccaatggcagacaataacgaaggcgccgacggagtgggtagttcctcgggaaattggcattgcgattccacatggctgggcgacagagtcatcaccaccagcacccgaacctgggccctgcccacctacaacaaccacctctacaagcaaatctccaacgggacatcgggaggagccaccaacgacaacacctacttcggctacagcaccccctgggggtattttgactttaacagattccactgccacttttcaccacgtgactggcagcgactcatcaacaacaactggggattccggcccaagagactcagcttcaagctcttcaacatccaggtcaaggaggtcacgcagaatgaaggcaccaagaccatcgccaataacctcaccagcaccatccaggtgtttacggactcggagtaccagctgccgtacgttctcggctctgcccaccagggctgcctgcctccgttcccggcggacgtgttcacgattccccagtacggctacctaacactcaacaacggtagtcaggccgtgggacgctcctccttctactgcctggaatactttccttcgcagatgctgagaaccggcaacaacttccagtttacttacaccttcgaggacgtgcctttccacagcagctacgcccacagccagagcttggaccggctgatgaatcctctgattgaccagtacctgtactacttgtctcggattcaaacaacaggaggcacggcaaatacgcagactctgggcttcagccaaggtgggcctaatacaatggccaatcaggcaaagaactggctgccaggaccctgttaccgccaacaacgcgtctcaacgacaaccgggcaaaacaacaatagcaactttgcctggactgctgggaccaaataccatctgaatggaagaaattcattggctaatcctggcatcgctatggcaacacacaaagacgacgaggagcgtttttttcccagtaacgggatcctgatttttggcaaacaaaatgctgccagagacaatgcggattacagcgatgtcatgcccaccagcgaggaagaaatcaaaaccactaaccctgtggccacagaggaatacggtatcgtggcagataacttgcagcagcaaaacacggctcctcaaattggaactgtcaacagccagggggccttacccggtatggtctggcagaaccgggacgtgtacctgcagggtcccatctgggccaagattcctcacacggacggcaacttccacccgtctccgctgatgggcggctttggcctgaaacatcctccgcctcagatcctgatcaagaacacgcctgtacctgcggatcctccgaccaccttcaaccagtcaaagctgaactctttcatcacgcaatacagcaccggacaggtcagcgtggaaattgaatgggagctgcagaaggaaaacagcaagcgctggaaccccgagatccagtacacctccaactactacaaatctacaagtgtggactttgctgttaatacagaaggcgtgtactctgaaccccgccccattggcacccgttacctcacccgtaatctgtaa

SEQ ID NO: 3829 - DNA, 2217 bp, synthetic construct
  misc_feature 1..2217: note = source = /note="Description of Artificial Sequence: Synthetic polynucleotide"
  source 1..2217: mol_type = other DNA
atggctgccgatggttatcttccagattggctcgaggacaacctctctgagggcattcgcgagtggtgggcgctgaaacctggagccccgaagcccaaagccaaccagcaaaagcaggacgacggccggggtctggtgcttcctggctacaagtacctcggacccttcaacggactcgacaagggggagcccgtcaacgcggcggacgcggcggccctcgagcacgacaaggcctacgaccagcagctgcaggcgggtgacaatccgtacctgcggtataaccacgccgacgccgagtttcaggagcgtctgcaagaagatacgtcttttgggggcaacctcgggcgagcagtcttccaggccaagaagcgggttctcgaacctctcggtctggttgaggaaggcgctaagacggctcctggaaagaagagaccggtagagccatcaccccagcgttctccagactcctctacgggcatcggcaagaagggccaacagcccgccagaaaaagactcaattttggtcagactggcgactcagagtcagttccagaccctcaacctctcggagaacctccagcagcgccctctggtgtgggacctaatacaatggctgcaggcggtggcgcaccaatggcagacaataacgaaggcgccgacggagtgggtagttcctcgggaaattggcattgcgattccacatggctgggcgacagagtcatcaccaccagcacccgaacctgggccctgcccacctacaacaaccacctctacaagcaaatctccaacgggacatcgggaggagccaccaacgacaacacctacttcggctacagcaccccctgggggtattttgactttaacagattccactgccacttttcaccacgtgactggcagcgactcatcaacaacaactggggattccggcccaagagactcagcttcaagctcttcaacatccaggtcaaggaggtcacgcagaatgaaggcaccaagaccatcgccaataacctcaccagcaccatccaggtgtttacggactcggagtaccagctgccgtacgttctcggctctgcccaccagggctgcctgcctccgttcccggcggacgtgttcacgattccccagtacggctacctaacactcaacaacggtagtcaggccgtgggacgctcctccttctactgcctggaatactttccttcgcagatgctgagaaccggcaacaacttccagtttacttacaccttcgaggacgtgcctttccacagcagctacgcccacagccagagcttggaccggctgatgaatcctctgattgaccagtacctgtactacttgtctcggattcaaacaacaggaggcacggcaaatacgcagactctgggcttcagccaaggtgggcctaatacaatggccaatcaggcaaagaactggctgccaggaccctgttaccgccaacaacgcgtctcaacgacaaccgggcaaaacaacaatagcaactttgcctggactgctgggaccaaataccatctgaatggaagaaattcattggctaatcctggcatcgctatggcaacacacaaagacgacgaggagcgtttttttcccagtaacgggatcctgatttttggcaaacaaaatgctgccagagacaatgcggattacagcgatgtcatgcccaccagcgaggaagaaatcaaaaccactaaccctgtggccacagaggaatacggtatcgtgacagataacttgcagcagcaaaacacggctcctcaaattggaactgtcaacagccagggggccttacccggtatggtctggcagaaccgggacgtgtacctgcagggtcccatctgggccaagattcctcacacggacggcaacttccacccgtctccgctgatgggcggctttggcctgaaacatcctccgcctcagatcctgatcaagaacacgcctgtacctgcggatcctccgaccaccttcaaccagtcaaagctgaactctttcatcacgcaatacagcaccggacaggtcagcgtggaaattgaatgggagctgcagaaggaaaacagcaagcgctggaaccccgagatccagtacacctccaactactacaaatctacaagtgtggactttgctgttaatacagaaggcgtgtactctgaaccccgccccattggcacccgttacctcacccgtaatctgtaa

SEQ ID NO: 3830 - DNA, 2217 bp, synthetic construct
  misc_feature 1..2217: note = source = /note="Description of Artificial Sequence: Synthetic polynucleotide"
  source 1..2217: mol_type = other DNA
atggctgccgatggttatcttccagattggctcgaggacaacctctctgagggcattcgcgagtggtgggcgctgaaacctggagccccgaagcccaaagccaaccagcaaaagcaggacgacggccggggtctggtgcttcctggctacaagtacctcggacccttcaacggactcgacaagggggagcccgtcaacgcggcggacgcggcggccctcgagcacgacaaggcctacgaccagcagctgcaggcgggtgacaatccgtacctgcggtataaccacgccgacgccgagtttcaggagcgtctgcaagaagatacgtcttttgggggcaacctcgggcgagcagtcttccaggccaagaagcgggttctcgaacctctcggtctggttgaggaaggcgctaagacggctcctggaaagaagagaccggtagagccatcaccccagcgttctccagactcctctacgggcatcggcaagaagggccaacagcccgccagaaaaagactcaattttggtcagactggcgactcagagtcagttccagaccctcaacctctcggagaacctccagcagcgccctctggtgtgggacctaatacaatggctgcaggcggtggcgcaccaatggcagacaataacgaaggcgccgacggagtgggtagttcctcgggaaattggcattgcgattccacatggctgggcgacagagtcatcaccaccagcacccgaacctgggccctgcccacctacaacaaccacctctacaagcaaatctccaacgggacatcgggaggagccaccaacgacaacacctacttcggctacagcaccccctgggggtattttgactttaacagattccactgccacttttcaccacgtgactggcagcgactcatcaacaacaactggggattccggcccaagagactcagcttcaagctcttcaacatccaggtcaaggaggtcacgcagaatgaaggcaccaagaccatcgccaataacctcaccagcaccatccaggtgtttacggactcggagtaccagctgccgtacgttctcggctctgcccaccagggctgcctgcctccgttcccggcggacgtgttcacgattccccagtacggctacctaacactcaacaacggtagtcaggccgtgggacgctcctccttctactgcctggaatactttccttcgcagatgctgagaaccggcaacaacttccagtttacttacaccttcgaggacgtgcctttccacagcagctacgcccacagccagagcttggaccggctgatgaatcctctgattgaccagtacctgtactacttgtctcggattcaaacaacaggaggcacggcaaatacgcagactctgggcttcagccaaggtgggcctaatacaatggccaatcaggcaaagaactggctgccaggaccctgttaccgccaacaacgcgtctcaacgacaaccgggcaaaacaacaatagcaactttgcctggactgctgggaccaaataccatctgaatggaagaaattcattggctaatcctggcatcgctatggcaacacacaaagacgacgaggagcgtttttttcccagtaacgggatcctgatttttggcaaacaaaatgctgccagagacaatgcggattacagcgatgtcatgcccaccagcgaggaagaaatcaaaaccactaaccctgtggccacagaggaatacggtatcgtggcagataacttgcagcagcaaaacacggctcctcaaattggaactgtcaacagccagggggccttacccggtatggtctggcagaaccgggacgtgtacctgcagggtcccatctgggccaagattcctcacacggacggcaacttccacccgtctccgctgatgggcggctttggcctgaaacatcctccgcctcagatcctgatcaagaacacgcctgtacctgcggatcctccgaccaccttcaaccagtcaaagctgaactctttcatcacgcaatacagcaccggacaggtcagcgtggaaattgaatgggagctgcagaaggaaaacagcaagcgctggaaccccgagatccagtacacctccaactactacaaatctacaagtgtggactttgctattaatacagaaggcgtgtactctgaaccccgccccattggcacccgttacctcacccgtaatctgtaa

SEQ ID NO: 3831 - DNA, 2217 bp, synthetic construct
  misc_feature 1..2217: note = source = /note="Description of Artificial Sequence: Synthetic polynucleotide"
  source 1..2217: mol_type = other DNA
atggctgccgatggttatcttccagattggctcgaggacaacctctctgagggcattcgcgagtggtgggcgctgaaacctggagccccgaagcccaaagccaaccagcaaaagcaggacgacggccggggtctggtgcttcctggctacaagtacctcggacccttcaacggactcgacaagggggagcccgtcaacgcggcggacgcggcggccctcgagcacgacaaggcctacgaccagcagctgcaggcgggtgacaatccgtacctgcggtataaccacgccgacgccgagtttcaggagcgtctgcaagaagatacgtcttttgggggcaacctcgggcgagcagtcttccaggccaagaagcgggttctcgaacctctcggtctggttgaggaaggcgctaagacggctcctggaaagaagagaccggtagagccatcaccccagcgttctccagactcctctacgggcatcggcaagaagggccaacagcccgccagaaaaagactcaattttggtcagactggcgactcagagtcagttccagaccctcaacctctcggagaacctccagcagcgccctctggtgtgggacctaatacaatggctgcaggcggtggcgcaccaatggcagacaataacgaaggcgccgacggagtgggtagttcctcgggaaattggcattgcgattccacatggctgggcgacagagtcatcaccaccagcacccgaacctgggccctgcccacctacaacaaccacctctacaagcaaatctccaacgggacatcgggaggagccaccaacgacaacacctacttcggctacagcaccccctgggggtattttgactttaacagattccactgccacttttcaccacgtgactggcagcgactcatcaacaacaactggggattccggcccaagagactcagcttcaagctcttcaacatccaggtcaaggaggtcacgcagaatgaaggcaccaagaccatcgccaataacctcaccagcaccatccaggtgtttacggactcggagtaccagctgccgtacgttctcggctctgcccaccagggctgcctgcctccgttcccggcggacgtgttcacgattccccagtacggctacctaacactcaacaacggtagtcaggccgtgggacgctcctccttctactgcctggaatactttccttcgcagatgctgagaaccggcaacaacttccagtttacttacaccttcgaggacgtgcctttccacagcagctacgcccacagccagagcttggaccggctgatgaatcctctgattgaccagtacctgtactacttgtctcggattcaaacaacaggaggcacggcaaatacgcagactctgggcttcagccaaggtgggcctaatacaatggccaatcaggcaaagaactggctgccaggaccctgttaccgccaacaacgcgtctcaacgacaaccgggcaaaacaacaatagcaactttgcctggactgctgggaccaaataccatctgaatggaagaaattcattggctaatcctggcatcgctatggcaacacacaaagacgacgaggagcgtttttttcccagtaacgggatcctgatttttggcaaacaaaatgctgccagagacaatgcggattacagcgatgtcatgcccaccagcgaggaagaaatcaaaaccactaaccctgtggccacagaggaatacggtatcgtggcagataacttgcagcagcaaaacacggctcctcaaattggaactgtcaacagccagggggccttacccggtatggtctggcagaaccgggacgtgtacctgcagggtcccatctgggccaagattcctcacgcggacggcaacttccacccgtctccgctgatgggcggctttggcctgaaacatcctccgcctcagatcctgatcaagaacacgcctgtacctgcggatcctccgaccaccttcaaccagtcaaagctgaactctttcatcacgcaatacagcaccggacaggtcagcgtggaaattgaatgggagctgcagaaggaaaacagcaagcgctggaaccccgagatccagtacacctccaactactacaaatctacaagtgtggactttgctgttaatacagaaggcgtgtactctgaaccccgccccattggcacccgttacctcacccgtaatctgtaa

SEQ ID NO: 3832 - DNA, 2217 bp, synthetic construct
  misc_feature 1..2217: note = source = /note="Description of Artificial Sequence: Synthetic polynucleotide"
  source 1..2217: mol_type = other DNA
atggctgccgatggttatcttccagattggctcgaggacaacctctctgagggcattcgcgagtggtgggcgctgaaacctggagccccgaagcccaaagccaaccagcaaaagcaggacgacggccggggtctggtgcttcctggctacaagtacctcggacccttcaacggactcgacaagggggagcccgtcaacgcggcggacgcggcggccctcgagcacgacaaggcctacgaccagcagctgcaggcgggtgacaatccgtacctgcggtataaccacgccgacgccgagtttcaggagcgtctgcaagaagatacgtcttttgggggcaacctcgggcgagcagtcttccaggccaagaagcgggttctcgaacctctcggtctggttgaggaaggcgctaagacggctcctggaaagaagagaccggtagagccatcaccccagcgttctccagactcctctacgggcatcggcaagaagggccaacagcccgccagaaaaagactcaattttggtcagactggcgactcagagtcagttccagaccctcaacctctcggagaacctccagcagcgccctctggtgtgggacctaatacaatggctgcaggcggtggcgcaccaatggcagacaataacgaaggcgccgacggagtgggtagttcctcgggaaattggcattgcaattccacatggctgggcgacagagtcatcaccaccagcacccgaacctgggccctgcccacctacaacaaccacctctacaagcaaatctccaacgggacatcgggaggagccaccaacgacaacacctacttcggctacagcaccccctgggggtattttgactttaacagattccactgccacttttcaccacgtgactggcagcgactcatcaacaacaactggggattccggcccaagagactcagcttcaagctcttcaacatccaggtcaaggaggtcacgcagaatgaaggcaccaagaccatcgccaataacctcaccagcaccatccaggtgtttacggactcggagtaccagctgccgtacgttctcggctctgcccaccagggctgcctgcctccgttcccggcggacgtgttcacgattccccagtacggctacctaacactcaacaacggtagtcaggccgtgggacgctcctccttctactgcctggaatactttccttcgcagatgctgagaaccggcaacaacttccagtttacttacaccttcgaggacgtgcctttccacagcagctacgcccacagccagagcttggaccggctgatgaatcctctgattgaccagtacctgtactacttgtctcggattcaaacaacaggaggcacggcaaatacgcagactctgggcttcagccaaggtgggcctaatacaatggccaatcaggcaaagaactggctgccaggaccctgttaccgccaacaacgcgtctcaacgacaaccgggcaaaacaacaatagcaactttgcctggactgctgggaccaaataccatctgaatggaagaaattcattggctaatcctggcatcgctatggcaacacacaaagacgacgaggagcgtttttttcccagtaacgggatcctgatttttggcaaacaaaatgctgccagagacaatgcggattacagcgatgtcatgcccaccagcgaggaagaaatcaaaaccactaaccctgtggccacagaggaatacggtatcgtggcagataacttgcagcagcaaaacacggctcctcaaattggaactgtcaacagccagggggccttacccggtatggtctggcagaaccgggacgtgtacctgcagggtcccatctgggccaagattcctcacacggacggcaacttccacccgtctccgctgatgggcggctttggcctgaaacatcctccgcctcagatcctgatcaagaacacgcctgtacctgcggatcctccgaccaccttcaaccagtcaaagctgaactctttcatcacgcaatacagcaccggacaggtcagcgtggaaattgaatgggagctgcagaaggaaaacagcaagcgctggaaccccgagatccagtacacctccaactactacaaatctacaagtgtggactttgctgttaatacagaaggcgtgtactctgaaccccgccccattggcacccgttacctcacccgtaatctgtaa

SEQ ID NO: 3833 - DNA, 2217 bp, synthetic construct
  misc_feature 1..2217: note = source = /note="Description of Artificial Sequence: Synthetic polynucleotide"
  source 1..2217: mol_type = other DNA
atggctgccgatggttatcttccagattggctcgaggacaacctctctgagggcattcgcgagtggtgggcgctgaaacctggagccccgaagcccaaagccaaccagcaaaagcaggacgacggccggggtctggtgcttcctggctacaagtacctcggacccttcaacggactcgacaagggggagcccgtcaacgcggcggacgcggcggccctcgagcacgacaaggcctacgaccagcagctgcaggcgggtgacaatccgtacctgcggtataaccacgccgacgccgagtttcaggagcgtctgcaagaagatacgtcttttgggggcaacctcgggcgagcagtcttccaggccaagaagcgggttctcgaacctctcggtctggttgaggaaggcgctaagacggctcctggaaagaagagaccggtagagccatcaccccagcgttctccagactcctctacgggcatcggcaagaagggccaacagcccgccagaaaaagactcaattttggtcagactggcgactcagagtcagttccagaccctcaacctctcggagaacctccagcagcgccctctggtgtgggacctaatacaatggctgcaggcggtggcgcaccaatggcagacaataacgaaggcgccgacggagtgggtagttcctcgggaaattggcattgcgattccacatggctgggcgacagagtcatcaccaccagcacccgaacctgggccctgcccacctacaacaaccacctctacaagcaaatctccaacgggacatcgggaggagccaccaacgacaacacctacttcggctacagcaccccctgggggtattttgactttaacagattccactgccacttttcaccacgtgactggcagcgactcatcaacaacaactggggattccggcccaagagactcagcttcaagctcttcaacatccaggtcaaggaggtcacgcagaatgaaggcaccaagaccatcgccaataacctcaccagcaccatccaggtgtttacggactcggagtaccagctgccgtacgttctcggctctgcccaccagggctgcctgcctccgttcccggcggacgtgttcacgattccccagtacggctacctaacactcaacaacggtagtcaggccgtgggacgctcctccttctactgcctggaatactttccttcgcagatgctgagaaccggcaacaacttccagtttacttacaccttcgaggacgtgcctttccacagcagctacgcccacagccagagcttggaccggctgatgaatcctctgattgaccagtacctgtactacttgtctcggattcaaacaacaggaggcacggcaaatacgcagactctgggcttcagccaaggtgggcctaatacaatggccaatcaggcaaagaactggctgccaggaccctgttaccgccaacaacgcgtctcaacgacaaccgggcaaaacaacaatagcaactttgcctggactgctgggaccaaataccatctgaatggaagaaattcattggctaatcctggcatcgctatggcaacacacaaagacgacgaggagcgtttttttcccagtaacgggatcctgatttttggcaaacaaaatgctgccagagacaatgcggattacagcgatgtcatgcccaccagcgaggaagaaatcaaaaccactaaccctgtggccacagaggaatacggtatcgtggcagataacttgcagcagcaaaacacggctcctcaaattggaactgtcaacagccagggggccttacccggtatggtctggcagaaccgggacgtgtacctgcagggtcccatctgggccaagattcctcacacggacggcaacttccacccgtctccgctgatgggcggctttggcctgaaacatcctccgcctcagatcctgatcaagaacacgcctgtacctgcggatcctccgaccaccttcaaccagtcaaagctgaactctttcatcacgcaatacagcaccggacaggtcagcgtggaaattgaatgggagctgcagaaggaaaacagcaagcgctggaaccccgagatccagtacacctccaactactacaaatctacaagtgtggactttgctgttaatacagaaggcgcgtactctgaaccccgccccattggcacccgttacctcacccgtaatctgtaa

SEQ ID NO: 3834 - DNA, 2217 bp, synthetic construct
  misc_feature 1..2217: note = source = /note="Description of Artificial Sequence: Synthetic polynucleotide"
  source 1..2217: mol_type = other DNA
atggctgccgatggttatcttccagattggctcgaggacaacctctctgagggcattcgcgagtggtgggcgctgaaacctggagccccgaagcccaaagccaaccagcaaaagcaggacgacggccggggtctggtgcttcctggctacaagtacctcggacccttcaacggactcgacaagggggagcccgtcaacgcggcggacgcggcggccctcgagcacgacaaggcctacgaccagcagctgcaggcgggtgacaatccgtacctgcggtataaccacgccgacgccgagtttcaggagcgtctgcaagaagatacgtcttttgggggcaacctcgggcgagcagtcttccaggccaagaagcgggttctcgaacctctcggtctggttgaggaaggcgctaagacggctcctggaaagaagagaccggtagagccatcaccccagcgttctccagactcctctacgggcatcggcaagaagggccaacagcccgccagaaaaagactcaattttggtcagactggcgactcagagtcagttccagaccctcaacctctcggagaacctccagcagcgccctctggtgtgggacctaatacaatggctgcaggcggtggcgcaccaatggcagacaataacgaaggcgccgacggagtgggtagttcctcgggaaattggcattgcgattccacatggctgggcgacagagtcatcaccaccagcacccgaacctgggccctgcccacctacaacaaccacctctacaagcaaatctccaacgggacatcgggaggagccaccaacgacaacacctacttcggctacagcaccccctgggggtattttgactttaacagattccactgccacttttcaccacgtgactggcagcgactcatcaacaacaactggggattccggcccaagagactcagcttcaagctcttcaacatccaggtcaaggaggtcacgcagaatgaaggcaccaagaccatcgccaataacctcaccagcaccatccaggtgtttacggactcggagtaccagctgccgtacgttctcggctctgcccaccagggctgcctgcctccgttcccggcggacgtgttcacgattccccagtacggctacctaacactcaacaacggtagtcaggccgtgggacgctcctccttctactgcctggaatactttccttcgcagatgctgagaaccggcaacaacttccagtttacttacaccttcgaggacgtgcctttccacagcagctacgcccacagccagagcttggaccggctgatgaatcctctgattgaccagtacctgtactacttgtctcggattcaaacaacaggaggcacggcaaatacgcagactctgggcttcagccaaggtgggcctaatacaatggccaatcaggcaaagaactggctgccaggaccctgttaccgccaacaacgcgtctcaacgacaaccgggcaaaacaacaatagcaactttgcctggactgctgggaccaaataccatctgaatggaagaaattcattggctaatcctggcatcgctatggcaacacacaaagacgacgaggagcgtttttttcccagtaacgggatcctgatttttggcaaacaaaatgctgccagagacaatgcggattacagcgatgtcatgcccaccagcgaggaagaaatcaaaaccactaaccctgtggccacagaggaatgcggtatcgtggcagataacttgcagcagcaaaacacggctcctcaaattggaactgtcaacagccagggggccttacccggtatggtctggcagaaccgggacgtgtacctgcagggtcccatctgggccaagattcctcacacggacggcaacttccacccgtctccgctgatgggcggctttggcctgaaacatcctccgcctcagatcctgatcaagaacacgcctgtacctgcggatcctccgaccaccttcaaccagtcaaagctgaactctttcatcacgcaatacagcaccggacaggtcagcgtggaaattgaatgggagctgcagaaggaaaacagcaagcgctggaaccccgagatccagtacacctccaactactacaaatctacaagtgtggactttgctgttaatacagaaggcgtgtactctgaaccccgccccattggcacccgttacctcacccgtaatctgtaa

SEQ ID NO: 3835 - DNA, 2217 bp, synthetic construct
  misc_feature 1..2217: note = source = /note="Description of Artificial Sequence: Synthetic polynucleotide"
  source 1..2217: mol_type = other DNA
atggctgccgatggttatcttccagattggctcgaggacaacctctctgagggcattcgcgagtggtgggcgctgaaacctggagccccgaagcccaaagccaaccagcaaaagcaggacgacggccggggtctggtgcttcctggctacaagtacctcggacccttcaacggactcgacaagggggagcccgtcaacgcggcggacgcggcggccctcgagcacgacaaggcctacgaccagcagctgcaggcgggtgacaatccgtacctgcggtataaccacgccgacgccgagtttcaggagcgtctgcaagaagatacgtcttttgggggcaacctcgggcgagcagtcttccaggccaagaagcgggttctcgaacctctcggtctggttgaggaaggcgctaagacggctcctggaaagaagagaccggtagagccatcaccccagcgttctccagactcctctacgggcatcggcaagaagggccaacagcccgccagaaaaagactcaattttggtcagactggcgactcagagtcagttccagaccctcaacctctcggagaacctccagcagcgccctctggtgtgggacctaatacaatggctgcaggcggtggcgcaccaatggcagacaataacgaaggcgccgacggagtgggtagttcctcgggaaattggcattgcgattccacatggctgggcgacagagtcatcaccaccagcacccgaacctgggccctgcccacctacaacaaccacctctacaagcaaatctccaacgggacatcgggaggagccaccaacgacaacacctacttcggctacagcaccccctgggggtattttgactttaacagattccactgccacttttcaccacgtgactggcagcgactcatcaacaacaactggggattccggcccaagagactcagcttcaagctcttcaacatccaggtcaaggaggtcacgcagaatgaaggcaccaagaccatcgccaataacctcaccagcaccatccaggtgtttacggactcggagtaccagctgccgtacgttctcggctctgcccaccagggctgcctgcctccgttcccggcggacgtgttcacgattccccagtacggctacctaacactcaacaacggtagtcaggccgtgggacgctcctccttctactgcctggaatactttccttcgcagatgctgagaaccggcaacaacttccagtttacttacaccttcgaggacgtgcctttccacagcagctacgcccacagccagagcttggaccggctgatgaatcctctgattgaccagtacctgtactacttgtctcggattcaaacaacaggaggcacggcaaatacgcagactctgggcttcagccaaggtgggcctaatacaatggccaatcaggcaaagaactggctgccaggaccctgttaccgccaacaacgcgtctcaacgacaaccgggcaaaacaacaatagcaactttgcctggactgctgggaccaaataccatctgaatggaagaaattcattggctaatcctggcatcgctatggcaacacacaaagacgacgaggagcgtttttttcccagtaacgggatcctgatttttggcaaacaaaatgctgccagagacaatgcggattacagcgatgtcatgcccaccagcgaggaagaaatcaaaaccactaaccctgtggccacagaggaatacggtatcgtggcagataacttgcagcagcaaaacacggctcctcaaattggaactgtcaacagccagggggccttacccggtatggtctggcagaaccgggacgtgtacctgcagggtcccatctgggccaagattcctcacacggacggcaacttccacccgtctccgctgatgggcggctttggcctgaaacatcctccgcctcagatcctgatcaagaacacgcctgtacctgcggatcctccgaccaccttcaaccagtcaaagctgaactctttcatcacgcaatacagcaccggacaggtcagcgtggaaattgaatgggagctgcagaaggaaaacagcaagcgctggaaccccgagatccggtacacctccaactactacaaatctacaagtgtggactttgctgttaatacagaaggcgtgtactctgaaccccgccccattggcacccgttacctcacccgtaatctgtaa

SEQ ID NO: 3836 - DNA, 2217 bp, synthetic construct
  misc_feature 1..2217: note = source = /note="Description of Artificial Sequence: Synthetic polynucleotide"
  source 1..2217: mol_type = other DNA
atggctgccgatggttatcttccagattggctcgaggacaacctctctgagggcattcgcgagtggtgggcgctgaaacctggagccccgaagcccaaagccaaccagcaaaagcaggacgacggccggggtctggtgcttcctggctacaagtacctcggacccttcaacggactcgacaagggggagcccgtcaacgcggcggacgcggcggccctcgagcacgacaaggcctacgaccagcagctgcaggcgggtgacaatccgtacctgcggtataaccacgccgacgccgagtttcaggagcgtctgcaagaagatacgtcttttgggggcaacctcgggcgagcagtcttccaggccaagaagcgggttctcgaacctctcggtctggttgaggaaggcgctaagacggctcctggaaagaagagaccggtagagccatcaccccagcgttctccagactcctctacgggcatcggcaagaagggccaacagcccgccagaaaaagactcaattttggtcagactggcgactcagagtcagttccagaccctcaacctctcggagaacctccagcagcgccctctggtgtgggacctaatacaatggctgcaggcggtggcgcaccaatggcagacaataacgaaggcgccgacggagtgggtagttcctcgggaaattggcattgcgattccacatggctgggcgacagagtcatcaccaccagcacccgaacctgggccctgcccacctacaacaaccacctctacaagcaaatctccaacgggacatcgggaggagccaccaacgacaacacctacttcggctacagcaccccctgggggtattttgactttaacagattccactgccacttttcaccacgtgactggcagcgactcatcaacaacaactggggattccggcccaagagactcagcttcaagctcttcaacatccaggtcaaggaggtcacgcagaatgaaggcaccaagaccatcgccaataacctcaccagcaccatccaggtgtttacggactcggagtaccagctgccgtacgttctcggctctgcccaccagggctgcctgcctccgttcccggcggacgtgttcacgattccccagtacggctacctaacactcaacaacggtagtcaggccgtgggacgctcctccttctactgcctggaatactttccttcgcagatgctgagaaccggcaacaacttccagtttacttacaccttcgaggacgtgcctttccacagcagctacgcccacagccagagcttggaccggctgatgaatcctctgattgaccagtacctgtactacttgtctcggattcaaacaacaggaggcacggcaaatacgcagactctgggcttcagccaaggtgggcctaatacaatggccaatcaggcaaagaactggctgccaggaccctgttaccgccaacaacgcgtctcaacgacaaccgggcaaaacaacaatagcaactttgcctggactgctgggaccaaataccatctgaatggaagaaattcattggctaatcctggcatcgctatggcaacacacaaagacgacgaggagcgtttttttcccagtaacgggatcctgatttttggcaaacaaaatgctgccagagacaatgcggattgcagcgatgtcatgcccaccagcgaggaagaaatcaaaaccactaaccctgtggccacagaggaatacggtatcgtggcagataacttgcagcagcaaaacacggctcctcaaattggaactgtcaacagccagggggccttacccggtatggtctggcagaaccgggacgtgtacctgcagggtcccatctgggccaagattcctcacacggacggcaacttccacccgtctccgctgatgggcggctttggcctgaaacatcctccgcctcagatcctgatcaagaacacgcctgtacctgcggatcctccgaccaccttcaaccagtcaaagctgaactctttcatcacgcaatacagcaccggacaggtcagcgtggaaattgaatgggagctgcagaaggaaaacagcaagcgctggaaccccgagatccagtacacctccaactactacaaatctacaagtgtggactttgctgttaatacagaaggcgtgtactctgaaccccgccccattggcacccgttacctcacccgtaatctgtaa

SEQ ID NO: 3837 - DNA, 2217 bp, synthetic construct
  misc_feature 1..2217: note = source = /note="Description of Artificial Sequence: Synthetic polynucleotide"
  source 1..2217: mol_type = other DNA
atggctgccgatggttatcttccagattggctcgaggacaacctctctgagggcattcgcgagtggtgggcgctgaaacctggagccccgaagcccaaagccaaccagcaaaagcaggacgacggccggggtctggtgcttcctggctacaagtacctcggacccttcaacggactcgacaagggggagcccgtcaacgcggcggacgcggcggccctcgagcacgacaaggcctacgaccagcagctgcaggcgggtgacaatccgtacctgcggtataaccacgccgacgccgagtttcaggagcgtctgcaagaagatacgtcttttgggggcaacctcgggcgagcagtcttccaggccaagaagcgggttctcgaacctctcggtctggttgaggaaggcgctaagacggctcctggaaagaagagaccggtagagccatcaccccagcgttctccagactcctctacgggcatcggcaagaagggccaacagcccgccagaaaaagactcaattttggtcagactggcgactcagagtcagttccagaccctcaacctctcggagaacctccagcagcgccctctggtgtgggacctaatacaatggctgcaggcggtggcgcaccaatggcagacaataacgaaggcgccgacggagtgggtagttcctcgggaaattggcattgcgattccacatggctgggcgacagagtcatcaccaccagcacccgaacctgggccctgcccacctacaacaaccacctctacaagcaaatctccaacgggacatcgggaggagccaccaacgacaacacctacttcggctacagcaccccctgggggtattttgactttaacagattccactgccacttttcaccacgtgactggcagcgactcatcaacaacaactggggattccggcccaagagactcagcttcaagctcttcaacatccaggtcaaggaggtcacgcagaatgaaggcaccaagaccatcgccaataacctcaccagcaccatccaggtgtttacggactcggagtaccagctgccgtacgttctcggctctgcccaccagggctgcctgcctccgttcccggcggacgtgttcacgattccccagtacggctacctaacactcaacaacggtagtcaggccgtgggacgctcctccttctactgcctggaatactttccttcgcagatgctgagaaccggcaacaacttccagtttacttacaccttcgaggacgtgcctttccacagcagctacgcccacagccagagcttggaccggctgatgaatcctctgattgaccagtacctgtactacttgtctcggattcaaacaacaggaggcacggcaaatacgcagactctgggcttcagccaaggtgggcctaatacaatggccaatcaggcaaagaactggctgccaggaccctgttaccgccaacaacgcgtctcaacgacaaccgggcaaaacaacaatagcaactttgcctggactgctgggaccaaataccatctgaatggaagaaattcattggctaatcctggcatcgctatggcaacacacaaagacgacgaggagcgtttttttcccagtaacgggatcctgatttttggcaaacaaaatgctgccagagacaatgcggattacagcgatgtcatgcccaccagcgaggaagaaatcaaaaccactaaccctgtggccacagaggaatacggtatcgcggcagataacttgcagcagcaaaacacggctcctcaaattggaactgtcaacagccagggggccttacccggtatggtctggcagaaccgggacgtgtacctgcagggtcccatctgggccaagattcctcacacggacggcaacttccacccgtctccgctgatgggcggctttggcctgaaacatcctccgcctcagatcctgatcaagaacacgcctgtacctgcggatcctccgaccaccttcaaccagtcaaagctgaactctttcatcacgcaatacagcaccggacaggtcagcgtggaaattgaatgggagctgcagaaggaaaacagcaagcgctggaaccccgagatccagtacacctccaactactacaaatctacaagtgtggactttgctgttaatacagaaggcgtgtactctgaaccccgccccattggcacccgttacctcacccgtaatctgtaa

SEQ ID NO: 3838 - DNA, 2217 bp, synthetic construct
  misc_feature 1..2217: note = source = /note="Description of Artificial Sequence: Synthetic polynucleotide"
  source 1..2217: mol_type = other DNA
atggctgccgatggttatcttccagattggctcgaggacaacctctctgagggcattcgcgagtggtgggcgctgaaacctggagccccgaagcccaaagccaaccagcaaaagcaggacgacggccggggtctggtgcttcctggctacaagtacctcggacccttcaacggactcgacaagggggagcccgtcaacgcggcggacgcggcggccctcgagcacgacaaggcctacgaccagcagctgcaggcgggtgacaatccgtacctgcggtataaccacgccgacgccgagtttcaggagcgtctgcaagaagatacgtcttttgggggcaacctcgggcgagcagtcttccaggccaagaagcgggttctcgaacctctcggtctggttgaggaaggcgctaagacggctcctggaaagaagagaccggtagagccatcaccccagcgttctccagactcctctacgggcatcggcaagaagggccaacagcccgccagaaaaagactcaattttggtcagactggcgactcagagtcagttccagaccctcaacctctcggagaacctccagcagcgccctctggtgtgggacctaatacaatggctgcaggcggtggcgcaccaatggcagacaataacgaaggcgccgacggagtgggtagttcctcgggaaattggcattgcgattccacatggctgggcgacagagtcatcaccaccagcacccgaacctgggccctgcccacctacaacaaccacctctacaagcaaatctccaacgggacatcgggaggagccaccaacgacaacacctacttcggctacagcaccccctgggggtattttgactttaacagattccactgccacttttcaccacgtgactggcagcgactcatcaacaacaactggggattccggcccaagagactcagcttcaagctcttcaacatccaggtcaaggaggtcacgcagaatgaaggcaccaagaccatcgccaataacctcaccagcaccatccaggtgtttacggactcggagtaccagctgccgtacgttctcggctctgcccaccagggctgcctgcctccgttcccggcggacgtgttcacgattccccagtacggctacctaacactcaacaacggtagtcaggccgtgggacgctcctccttctactgcctggaatactttccttcgcagatgctgagaaccggcaacaacttccagtttacttacaccttcgaggacgtgcctttccacagcagctacgcccacagccagagcttggaccggctgatgaatcctctgattgaccagtacctgtactacttgtctcggattcaaacaacaggaggcacggcaaatacgcagactctgggcttcagccaaggtgggcctaatacaatggccaatcaggcaaagaactggctgccaggaccctgttaccgccaacaacgcgtctcaacgacaaccgggcaaaacaacaatagcaactttgcctggactgctgggaccaaataccatctgaatggaagaaattcattggctaatcctggcatcgctatggcaacacacaaagacgacgaggagcgtttttttcccagtaacgggatcctgatttttggcaaacaaaatgctgccagagacaatgcggattacagcgatgtcatgcccaccagcgaggaagaaatcaaaaccactaaccctgtggccacagaggaatacggtatcgtggcagataacttgcagcagcaaaacacggctcctcaaattggaactgtcaacagccagggggccttacccggtatgatctggcagaaccgggacgtgtacctgcagggtcccatctgggccaagattcctcacacggacggcaacttccacccgtctccgctgatgggcggctttggcctgaaacatcctccgcctcagatcctgatcaagaacacgcctgtacctgcggatcctccgaccaccttcaaccagtcaaagctgaactctttcatcacgcaatacagcaccggacaggtcagcgtggaaattgaatgggagctgcagaaggaaaacagcaagcgctggaaccccgagatccagtacacctccaactactacaaatctacaagtgtggactttgctgttaatacagaaggcgtgtactctgaaccccgccccattggcacccgttacctcacccgtaatctgtaa

SEQ ID NO: 3839 - DNA, 2217 bp, synthetic construct
  misc_feature 1..2217: note = source = /note="Description of Artificial Sequence: Synthetic polynucleotide"
  source 1..2217: mol_type = other DNA
atggctgccgatggttatcttccagattggctcgaggacaacctctctgagggcattcgcgagtggtgggcgctgaaacctggagccccgaagcccaaagccaaccagcaaaagcaggacgacggccggggtctggtgcttcctggctacaagtacctcggacccttcaacggactcgacaagggggagcccgtcaacgcggcggacgcggcggccctcgagcacgacaaggcctacgaccagcggctgcaggcgggtgacaatccgtacctgcggtataaccacgccgacgccgagtttcaggagcgtctgcaagaagatacgtcttttgggggcaacctcgggcgagcagtcttccaggccaagaagcgggttctcgaacctctcggtctggttgaggaaggcgctaagacggctcctggaaagaagagaccggtagagccatcaccccagcgttctccagactcctctacgggcatcggcaagaagggccaacagcccgccagaaaaagactcaattttggtcagactggcgactcagagtcagttccagaccctcaacctctcggagaacctccagcagcgccctctggtgtgggacctaatacaatggctgcaggcggtggcgcaccaatggcagacaataacgaaggcgccgacggagtgggtagttcctcgggaaattggcattgcgattccacatggctgggcgacagagtcatcaccaccagcacccgaacctgggccctgcccacctacaacaaccacctctacaagcaaatctccaacgggacatcgggaggagccaccaacgacaacacctacttcggctacagcaccccctgggggtattttgactttaacagattccactgccacttttcaccacgtgactggcagcgactcatcaacaacaactggggattccggcccaagagactcagcttcaagctcttcaacatccaggtcaaggaggtcacgcagaatgaaggcaccaagaccatcgccaataacctcaccagcaccatccaggtgtttacggactcggagtaccagctgccgtacgttctcggctctgcccaccagggctgcctgcctccgttcccggcggacgtgttcacgattccccagtacggctacctaacactcaacaacggtagtcaggccgtgggacgctcctccttctactgcctggaatactttccttcgcagatgctgagaaccggcaacaacttccagtttacttacaccttcgaggacgtgcctttccacagcagctacgcccacagccagagcttggaccggctgatgaatcctctgattgaccagtacctgtactacttgtctcggattcaaacaacaggaggcacggcaaatacgcagactctgggcttcagccaaggtgggcctaatacaatggccaatcaggcaaagaactggctgccaggaccctgttaccgccaacaacgcgtctcaacgacaaccgggcaaaacaacaatagcaactttgcctggactgctgggaccaaataccatctgaatggaagaaattcattggctaatcctggcatcgctatggcaacacacaaagacgacgaggagcgtttttttcccagtaacgggatcctgatttttggcaaacaaaatgctgccagagacaatgcggattacagcgatgtcatgcccaccagcgaggaagaaatcaaaaccactaaccctgtggccacagaggaatacggtatcgtggcagataacttgcagcagcaaaacacggctcctcaaattggaactgtcaacagccagggggccttacccggtatggtctggcagaaccgggacgtgtacctgcagggtcccatctgggccaagattcctcacacggacggcaacttccacccgtctccgctgatgggcggctttggcctgaaacatcctccgcctcagatcctgatcaagaacacgcctgtacctgcggatcctccgaccaccttcaaccagtcaaagctgaactctttcatcacgcaatacagcaccggacaggtcagcgtggaaattgaatgggagctgcagaaggaaaacagcaagcgctggaaccccgagatccagtacacctccaactactacaaatctacaagtgtggactttgctgttaatacagaaggcgtgtactctgaaccccgccccattggcacccgttacctcacccgtaatctgtaa

SEQ ID NO: 3840 - DNA, 2217 bp, synthetic construct
  misc_feature 1..2217: note = source = /note="Description of Artificial Sequence: Synthetic polynucleotide"
  source 1..2217: mol_type = other DNA
atggctgccgatggttatcttccagattggctcgaggacaacctctctgagggcattcgcgagtggtgggcgctgaaacctggagccccgaagcccaaagccaaccagcaaaagcaggacgacggccggggtctggtgcttcctggctacaagtacctcggacccttcaacggactcgacaagggggagcccgtcaacgcggcggacgcggcggccctcgagcacgacaaggcctacgaccagcagctgcaggcgggtgacaatccgtacctgcggtataaccacgccgacgccgagtttcaggagcgtctgcaagaagatacgtcttttgggggcaacctcgggcgagcagtcttccaggccaagaagcgggttctcgaacctctcggtctggttgaggaaggcgctaagacggctcctggaaagaagagaccggtagagccatcaccccagcgttctccagactcctctacgggcatcggcaagaagggccaacagcccgccagaaaaagactcaattttggtcagactggcgactcagagtcagttccagaccctcaacctctcggagaacctccagcagcgccctctggtgtgggacctaatacaatggctgcaggcggtggcgcaccaatggcagacaataacgaaggcgccgacggagtgggtagttcctcgggaaattggcattgcgattccacatggctgggcgacagagtcatcaccaccagcacccgaacctgggccctgcccacctacaacaaccacctctacaagcaaatctccaacgggacatcgggaggagccaccaacgacaacacctacttcggctacagcaccccctgggggtattttgactttaacagattccactgccacttttcaccacgtgactggcagcgactcatcaacaacaactggggattccggcccaagagactcagcttcaagctcttcaacatccaggtcaaggaggtcacgcagaatgaaggcaccaagaccatcgccaataacctcaccagcaccatccaggtgtttacggactcggagtaccagctgccgtacgttctcggctctgcccaccagggctgcctgcctccgttcccggcggacgtgttcacgattccccagtacggctacctaacactcaacaacggtagtcaggccgtgggacgctcctccttctactgcctggaatactttccttcgcagatgctgagaaccggcaacaacttccagtttacttacaccttcgaggacgtgcctttccacagcagctacgcccacagccagagcttggaccggctgatgaatcctctgattgaccagtacctgtactacttgtctcggattcaaacaacaggaggcacggcaaatacgcagactctgggcttcagccaaggtgggcctaatacaatggccaatcaggcaaagaactggctgccaggaccctgttaccgccaacaacgcgtctcaacgacaaccgggcaaaacaacaatagcaactttgcctggactgctgggaccaaataccatctgaatggaagaaattcattggctaatcctggcatcgctatggcaacacacaaagacgacgaggagcgtttttttcccagtaacgggatcctgatttttggcaaacaaaatgctgccagagacaatgcggattacagcgatgtcatgcccaccagcgaggaagaaatcaaaaccactaaccctgtggccacagaggaatacggtatcgtggcagataacttgcagcagcaaaacacggctcctcaaattggaactgtcaacggccagggggccttacccggtatggtctggcagaaccgggacgtgtacctgcagggtcccatctgggccaagattcctcacacggacggcaacttccacccgtctccgctgatgggcggctttggcctgaaacatcctccgcctcagatcctgatcaagaacacgcctgtacctgcggatcctccgaccaccttcaaccagtcaaagctgaactctttcatcacgcaatacagcaccggacaggtcagcgtggaaattgaatgggagctgcagaaggaaaacagcaagcgctggaaccccgagatccagtacacctccaactactacaaatctacaagtgtggactttgctgttaatacagaaggcgtgtactctgaaccccgccccattggcacccgttacctcacccgtaatctgtaa

SEQ ID NO: 3841 - DNA, 2217 bp, synthetic construct
  misc_feature 1..2217: note = source = /note="Description of Artificial Sequence: Synthetic polynucleotide"
  source 1..2217: mol_type = other DNA
atggctgccgatggttatcttccagattggctcgaggacaacctctctgagggcattcgcgagtggtgggcgctgaaacctggagccccgaagcccaaagccaaccagcaaaagcaggacgacggccggggtctggtgcttcctggctacaagtacctcggacccttcaacggactcgacaagggggagcccgtcaacgcggcggacgcggcggccctcgagcacgacaaggcctacgaccagcagctgcaggcgggtgacaatccgtacctgcggtataaccacgccgacgccgagtttcaggagcgtctgcaagaagatacgtcttttgggggcaacctcgggcgagcagtcttccaggccaagaagcgggttctcgaacctctcggtctggttgaggaaggcgctaagacggctcctggaaagaagagaccggtagagccatcaccccagcgttctccagactcctctacgggcatcggcaagaagggccaacagcccgccagaaaaagactcaattttggtcagactggcgactcagagtcagttccagaccctcaacctctcggagaacctccagcagcgccctctggtgtgggacctaatacaatggctgcaggcggtggcgcaccaatggcagacaataacgaaggcgccgacggagtgggtagttcctcgggaaattggcattgcgattccacatggctgggcgacagagtcatcaccaccagcacccgaacctgggccctgcccacctacaacaaccacctctacaagcaaatctccaacgggacatcgggaggagccaccaacgacaacacctacttcggctacagcaccccctgggggtattttgactttaacagattccactgccacttttcaccacgtgactggcagcgactcatcaacaacaactggggattccggcccaagagactcagcttcaagctcttcaacatccaggtcaaggaggtcacgcagaatgaaggcaccaagaccatcgccaataacctcaccagcaccatccaggtgtttacggactcggagtaccagctgccgtacgttctcggctctgcccaccagggctgcctgcctccgttcccggcggacgtgttcacgattccccagtacggctacctaacactcaacaacggtagtcaggccgtgggacgctcctccttctactgcctggaatactttccttcgcagatgctgagaaccggcaacaacttccagtttacttacaccttcgaggacgtgcctttccacagcagctacgcccacagccagagcttggaccggctgatgaatcctctgattgaccagtacctgtactacttgtctcggattcaaacaacaggaggcacggcaaatacgcagactctgggcttcagccaaggtgggcctaatacaatggccaatcaggcaaagaactggctgccaggaccctgttaccgccaacaacgcgtctcaacgacaaccgggcaaaacaacaatagcaactttgcctggactgctgggaccaaataccatctgaatggaagaaattcattggctaatcctggcatcgctatggcaacacacaaagacgacgaggagtgtttttttcccagtaacgggatcctgatttttggcaaacaaaatgctgccagagacaatgcggattacagcgatgtcatgcccaccagcgaggaagaaatcaaaaccactaaccctgtggccacagaggaatacggtatcgtggcagataacttgcagcagcaaaacacggctcctcaaattggaactgtcaacagccagggggccttacccggtatggtctggcagaaccgggacgtgtacctgcagggtcccatctgggccaagattcctcacacggacggcaacttccacccgtctccgctgatgggcggctttggcctgaaacatcctccgcctcagatcctgatcaagaacacgcctgtacctgcggatcctccgaccaccttcaaccagtcaaagctgaactctttcatcacgcaatacagcaccggacaggtcagcgtggaaattgaatgggagctgcagaaggaaaacagcaagcgctggaaccccgagatccagtacacctccaactactacaaatctacaagtgtggactttgctgttaatacagaaggcgtgtactctgaaccccgccccattggcacccgttacctcacccgtaatctgtaa

SEQ ID NO: 3842 - DNA, 2217 bp, synthetic construct
  misc_feature 1..2217: note = source = /note="Description of Artificial Sequence: Synthetic polynucleotide"
  source 1..2217: mol_type = other DNA
atggctgccgatggttatcttccagattggctcgaggacaacctctctgagggcattcgcgagtggtgggcgctgaaacctggagccccgaagcccaaagccaaccagcaaaagcaggacgacggccggggtctggtgcttcctggctacaagtacctcggacccttcaacggactcgacaagggggagcccgtcaacgcggcggacgcggcggccctcgagcacgacaaggcctacgaccagcagctgcaggcgggtgacaatccgtacctgcggtataaccacgccgacgccgagtttcaggagcgtctgcaagaagatacgtcttttgggggcaacctcgggcgagcagtcttccaggccaagaagcgggttctcgaacctctcggtctggttgaggaaggcgctaagacggctcctggaaagaagagaccggtagagccatcaccccagcgttctccagactcctctacgggcatcggcaagaagggccaacagcccgccagaaaaagactcaattttggtcagactggcgactcagagtcagttccagaccctcaacctctcggagaacctccagcagcgccctctggtgtgggacctaatacaatggctgcaggcggtggcgcaccaatggcagacaataacgaaggcgccgacggagtgggtagttcctcgggaaattggcattgcgattccacatggctgggcgacagagtcatcaccaccagcacccgaacctgggccctgcccacctacaacaaccacctctacaagcaaatctccaacgggacatcgggaggagccaccaacgacaacacctacttcggctacagcaccccctgggggtattttgactttaacagattccactgccacttttcaccacgtgactggcagcgactcatcaacaacaactggggattccggcccaagagactcagcttcaagctcttcaacatccaggtcaaggaggtcacgcagaatgaaggcaccaagaccatcgccaataacctcaccagcaccatccaggtgtttacggactcggagtaccagctgccgtacgttctcggctctgcccaccagggctgcctgcctccgttcccggcggacgtgttcacgattccccagtacggctacctaacactcaacaacggtagtcaggccgtgggacgctcctccttctactgcctggaatactttccttcgcagatgctgagaaccggcaacaacttccagtttacttacaccttcgaggacgtgcctttccacagcagctacgcccacagccagagcttggaccggctgatgaatcctctgattgaccagtacctgtactacttgtctcggattcaaacaacaggaggcacggcaaatacgcagactctgggcttcagccaaggtgggcctaatacaatggccaatcaggcaaagaactggctgccaggaccctgttaccgccaacaacgcgtctcaacgacaaccgggcaaaacaacaatagcaactttgcctggactgctgggaccaaataccatctgaatggaagaaattcattggctaatcctggcatcgctatggcaacacacaaagacgacgaggagcgtttttttcccagtaacgggatcctgatttttggcaaacaaaatgctgccagagacaatgcggattacagcgatgtcatgcccaccagcgaggaagaaatcaaaaccactaaccctgtggccacagaggaatacggtatcgtggcagataacttgcagcagcaaaacacggctcctcaaattggaactgtcaacagccagggggccttacccggtatggtctggcagaaccgggacgcgtacctgcagggtcccatctgggccaagattcctcacacggacggcaacttccacccgtctccgctgatgggcggctttggcctgaaacatcctccgcctcagatcctgatcaagaacacgcctgtacctgcggatcctccgaccaccttcaaccagtcaaagctgaactctttcatcacgcaatacagcaccggacaggtcagcgtggaaattgaatgggagctgcagaaggaaaacagcaagcgctggaaccccgagatccagtacacctccaactactacaaatctacaagtgtggactttgctgttaatacagaaggcgtgtactctgaaccccgccccattggcacccgttacctcacccgtaatctgtaa

SEQ ID NO: 3843 - DNA, 2217 bp, synthetic construct
  misc_feature 1..2217: note = source = /note="Description of Artificial Sequence: Synthetic polynucleotide"
  source 1..2217: mol_type = other DNA
atggctgccgatggttatcttccagattggctcgaggacaacctctctgagggcattcgcgagtggtgggcgctgaaacctggagccccgaagcccaaagccaaccagcaaaagcaggacgacggccggggtctggtgcttcctggctacaagtacctcggacccttcaacggactcgacaagggggagcccgtcaacgcggcggacgcggcggccctcgagcacgacaaggcctacgaccagcagctgcaggcgggtgacaatccgtacctgcggtataaccacgccgacgccgagtttcaggagcgtctgcaagaagatacgtcttttgggggcaacctcgggcgagcagtcttccaggccaagaagcgggttctcgaacctctcggtctggttgaggaaggcgctaagacggctcctggaaagaagagaccggtagagccatcaccccagcgttctccagactcctctacgggcatcggcaagaagggccaacagcccgccagaaaaagactcaattttggtcagactggcgactcagagtcagttccagaccctcaacctctcggagaacctccagcagcgccctctggtgtgggacctaatacaatggctgcaggcggtggcgcaccaatggcagacaataacgaaggcgccgacggagtgggtagttcctcgggaaattggcattgcgattccacatggctgggcgacagagtcatcaccaccagcacccgaacctgggccctgcccacctacaacaaccacctctacaagcaaatctccaacgggacatcgggaggagccaccaacgacaacacctacttcggctacagcaccccctgggggtattttgactttaacagattccactgccacttttcaccacgtgactggcagcgactcatcaacaacaactggggattccggcccaagagactcagcttcaagctcttcaacatccaggtcaaggaggtcacgcagaatgaaggcaccaagaccatcgccaataacctcaccagcaccatccaggtgtttacggactcggagtaccagctgccgtacgttctcggctctgcccaccagggctgcctgcctccgttcccggcggacgtgttcacgattccccagtacggctacctaacactcaacaacggtagtcaggccgcgggacgctcctccttctactgcctggaatactttccttcgcagatgctgagaaccggcaacaacttccagtttacttacaccttcgaggacgtgcctttccacagcagctacgcccacagccagagcttggaccggctgatgaatcctctgattgaccagtacctgtactacttgtctcggattcaaacaacaggaggcacggcaaatacgcagactctgggcttcagccaaggtgggcctaatacaatggccaatcaggcaaagaactggctgccaggaccctgttaccgccaacaacgcgtctcaacgacaaccgggcaaaacaacaatagcaactttgcctggactgctgggaccaaataccatctgaatggaagaaattcattggctaatcctggcatcgctatggcaacacacaaagacgacgaggagcgtttttttcccagtaacgggatcctgatttttggcaaacaaaatgctgccagagacaatgcggattacagcgatgtcatgcccaccagcgaggaagaaatcaaaaccactaaccctgtggccacagaggaatacggtatcgtggcagataacttgcagcagcaaaacacggctcctcaaattggaactgtcaacagccagggggccttacccggtatggtctggcagaaccgggacgtgtacctgcagggtcccatctgggccaagattcctcacacggacggcaacttccacccgtctccgctgatgggcggctttggcctgaaacatcctccgcctcagatcctgatcaagaacacgcctgtacctgcggatcctccgaccaccttcaaccagtcaaagctgaactctttcatcacgcaatacagcaccggacaggtcagcgtggaaattgaatgggagctgcagaaggaaaacagcaagcgctggaaccccgagatccagtacacctccaactactacaaatctacaagtgtggactttgctgttaatacagaaggcgtgtactctgaaccccgccccattggcacccgttacctcacccgtaatctgtaa

SEQ ID NO: 3844 - DNA, 2217 bp, synthetic construct
  misc_feature 1..2217: note = source = /note="Description of Artificial Sequence: Synthetic polynucleotide"
  source 1..2217: mol_type = other DNA
atggctgccgatggttatcttccagattggctcgaggacaacctctctgagggcattcgcgagtggtgggcgctgaaacctggagccccgaagcccaaagccaaccagcaaaagcaggacgacggccggggtctggtgcttcctggctacaagtacctcggacccttcaacggactcgacaagggggagcccgtcaacgcggcggacgcggcggccctcgagcacgacaaggcctacgaccagcagctgcaggcgggtgacaatccgtacctgcggtataaccacgccgacgccgagtttcaggagcgtctgcaagaagatacgtcttttgggggcaacctcgggcgagcagtcttccaggccaagaagcgggttctcgaacctctcggtctggttgaggaaggcgctaagacggctcctggaaagaagagaccggtagagccatcaccccagcgttctccagactcctctacgggcatcggcaagaagggccaacagcccgccagaaaaagactcaattttggtcagactggcgactcagagtcagttccagaccctcaacctctcggagaacctccagcagcgccctctggtgtgggacctaatacaatggctgcaggcggtggcgcaccaatggcagacaataacgaaggcgccgacggagtgggtagttcctcgggaaattggcattgcgattccacatggctgggcgacagagtcatcaccaccagcacccgaacctgggccctgcccacctacaacaaccacctctacaagcaaatctccaacgggacatcgggaggagccaccaacgacaacacctacttcggctacagcaccccctgggggtattttgactttaacagattccactgccacttttcaccacgtgactggcagcgactcatcaacaacaactggggattccggcccaagagactcagcttcaagctcttcaacatccaggtcaaggaggtcacgcagaatgaaggcaccaagaccatcgccaataacctcaccagcaccatccaggtgtttacggactcggagtaccagctgccgtacgttctcggctctgcccaccagggctgcctgcctccgttcccggcggacgtgttcacgattccccagtacggctacctaacactcaacaacggtagtcaggccgtgggacgctcctccttctactgcctggaatactttccttcgcagatgctgagaaccggcaacaacttccagtttacttacaccttcgaggacgtgcctttccacagcagctacgcccacagccagagcttggaccggctgatgaatcctctgattgaccagtacctgtactacttgtctcggattcaaacaacaggaggcacggcaaatacgcagactctgggcttcagccaaggtgggcctaatacaatggccaatcaggcaaagaactggctgccaggaccctgttaccgccaacaacgcgtctcaacgacaaccgggcaaaacaacaatagcaactttgcctggactgctgggaccaaataccatctgaatggaagaaattcattggctaatcctggcatcgctatggcaacacacaaagacgacgaggagcgtttttttcccagtaacgggatcctgatttttggcaaacaaaatgctgccagagacaatgcggattacagcgatgtcatgcccaccagcgaggaagaaatcaaaaccactaaccctgtggccacagaggaatacggtatcgtggcagataacttgcagcagcaaaacacggctcctcaaattggaactgtcaacagccagggggccttacccggtatggtctggcagaaccgggacgtgtacctgcagggtcccatctgggccaagattcctcacacggacggcaacttccacccgtctccgctgatgggcggctttggcctgaaacatcctccgcctcagatcctgatcaagaacacgcctgtacctgcggatcctccgaccaccttcaaccagtcaaagctgaactctttcatcacgcaatacagcaccggacaggtcagcgtggaaattgaatgggagctgcagaaggaaaacagcaagcgctggaaccccgagatccagtacacctccaactactacaaatctacaagtgtggaccttgctgttaatacagaaggcgtgtactctgaaccccgccccattggcacccgttacctcacccgtaatctgtaa

SEQ ID NO: 3845 - DNA, 2217 bp, synthetic construct
  misc_feature 1..2217: note = source = /note="Description of Artificial Sequence: Synthetic polynucleotide"
  source 1..2217: mol_type = other DNA
atggctgccgatggttatcttccagattggctcgaggacaacctctctgagggcattcgcgagtggtgggcgctgaaacctggagccccgaagcccaaagccaaccagcaaaagcaggacgacggccggggtctggtgcttcctggctacaagtacctcggacccttcaacggactcgacaagggggagcccgtcaacgcggcggacgcggcggccctcgagcacgacaaggcctacgaccagcagctgcaggcgggtgacaatccgtacctgcggtataaccacgccgacgccgagtttcaggagcgtctgcaagaagatacgtcttttgggggcaacctcgggcgagcagtcttccaggccaagaagcgggttctcgaacctctcggtctggttgaggaaggcgctaagacggctcctggaaagaagagaccggtagagccatcaccccagcgttctccagactcctctacgggcatcggcaagaagggccaacagcccgccagaaaaagactcaattttggtcagactggcgactcagagtcagttccagaccctcaacctctcggagaacctccagcagcgccctctggtgtgggacctaatacaatggctgcaggcggtggcgcaccaatggcagacaataacgaaggcgccgacggagtgggtagttcctcgggaaattggcattgcgattccacatggctgggcgacagagtcatcaccaccagcacccgaacctgggccctgcccacctacaacaaccacctctacaagcaaatctccaacgggacatcgggaggagccaccaacgacaacacctacttcggctacagcaccccctgggggtattttgactttaacagattccactgccacttttcaccacgtgactggcagcgactcatcaacaacaactggggattccggcccaagagactcagcttcaagctcttcaacatccaggtcaaggaggtcacgcagaatgaaggcaccaagaccatcgccaataacctcaccagcaccatccaggtgtttacggactcggagtaccagctgccgtacgttctcggctctgcccaccagggctgcctgcctccgttcccggcggacgtgttcacgattccccagtacggctacctaacactcaacaacggtagtcaggccgtgggacgctcctccttctactgcctggaatactttccttcgcagatgctgagaaccggcaacaacttccagtttacttacaccttcgaggacgtgcctttccacagcagctacgcccacagccagagcttggaccggctgatgaatcctctgattgaccagtacctgtactacttgtctcggattcaaacaacaggaggcacggcaaatacgcagactctgggcttcagccaaggtgggcctaatacaatggccaatcaggcaaagaactggctgccaggaccctgttaccgccaacaacgcgtctcaacgacaaccgggcaaaacaacaatagcaactttgcctggactgctgggaccaaataccatctgaatggaagaaattcattggctaatcctggcatcgctatggcaacacacaaagacgacgaggagcgtttttttcccagtaacgggatcctgatttttggcaaacaaaatgctgccagagacaatgcggattacagcgatgtcatgcccaccagcgaggaagaaatcaaaaccactaaccctgtggccacagaggaatacggtatcgtggcagataacttgcagcagcaaaacacggctcctcaaattggaactgtcaacagccagggggccttacccggtatggtctggcagaaccgggacgtgtacctgcagggtcccatctgggccaagattcctcacacggacggcaacttccacccgtctccgctgatgggcggctttggcctgaaacatcctccgcctcagatcctgatcaagaacacgcctgtacctgcggatcctccgaccaccttcaaccagtcaaagctgaactctttcatcacgcaatacagcaccggacaggtcagcgtggaaattgaatgggagccgcagaaggaaaacagcaagcgctggaaccccgagatccagtacacctccaactactacaaatctacaagtgtggactttgctgttaatacagaaggcgtgtactctgaaccccgccccattggcacccgttacctcacccgtaatctgtaa

SEQ ID NO: 3846 - DNA, 2217 bp, synthetic construct
  misc_feature 1..2217: note = source = /note="Description of Artificial Sequence: Synthetic polynucleotide"
  source 1..2217: mol_type = other DNA
atggctgccgatggttatcttccagattggctcgaggacaacctctctgagggcattcgcgagtggtgggcgctgaaacctggagccccgaagcccaaagccaaccagcaaaagcaggacgacggccggggtctggtgcttcctggctacaagtacctcggacccttcaacggactcgacaagggggagcccgtcaacgcggcggacgcggcggccctcgagcacgacaaggcctacgaccagcagctgcaggcgggtgacaatccgtacctgcggtataaccacgccgacgccgagtttcaggagcgtctgcaagaagatacgtcttttgggggcaacctcgggcgagcagtcttccaggccaagaagcgggttctcgaacctctcggtctggttgaggaaggcgctaagacggctcctggaaagaagagaccggtagagccatcaccccagcgttctccagactcctctacgggcatcggcaagaagggccaacagcccgccagaaaaagactcaattttggtcagactggcgactcagagtcagttccagaccctcaacctctcggagaacctccagcagcgccctctggtgtgggacctaatacaatggctgcaggcggtggcgcaccaatggcagacaataacgaaggcgccgacggagtgggtagttcctcgggaaattggcattgcgattccacatggctgggcgacagagtcatcaccaccagcacccgaacctgggccctgcccacctacaacaaccacctctacaagcaaatctccaacgggacatcgggaggagccaccaacgacaacacctacttcggctacagcaccccctgggggtattttgactttaacagattccactgccacttttcaccacgtgactggcagcgacccatcaacaacaactggggattccggcccaagagactcagcttcaagctcttcaacatccaggtcaaggaggtcacgcagaatgaaggcaccaagaccatcgccaataacctcaccagcaccatccaggtgtttacggactcggagtaccagctgccgtacgttctcggctctgcccaccagggctgcctgcctccgttcccggcggacgtgttcacgattccccagtacggctacctaacactcaacaacggtagtcaggccgtgggacgctcctccttctactgcctggaatactttccttcgcagatgctgagaaccggcaacaacttccagtttacttacaccttcgaggacgtgcctttccacagcagctacgcccacagccagagcttggaccggctgatgaatcctctgattgaccagtacctgtactacttgtctcggattcaaacaacaggaggcacggcaaatacgcagactctgggcttcagccaaggtgggcctaatacaatggccaatcaggcaaagaactggctgccaggaccctgttaccgccaacaacgcgtctcaacgacaaccgggcaaaacaacaatagcaactttgcctggactgctgggaccaaataccatctgaatggaagaaattcattggctaatcctggcatcgctatggcaacacacaaagacgacgaggagcgtttttttcccagtaacgggatcctgatttttggcaaacaaaatgctgccagagacaatgcggattacagcgatgtcatgcccaccagcgaggaagaaatcaaaaccactaaccctgtggccacagaggaatacggtatcgtggcagataacttgcagcagcaaaacacggctcctcaaattggaactgtcaacagccagggggccttacccggtatggtctggcagaaccgggacgtgtacctgcagggtcccatctgggccaagattcctcacacggacggcaacttccacccgtctccgctgatgggcggctttggcctgaaacatcctccgcctcagatcctgatcaagaacacgcctgtacctgcggatcctccgaccaccttcaaccagtcaaagctgaactctttcatcacgcaatacagcaccggacaggtcagcgtggaaattgaatgggagctgcagaaggaaaacagcaagcgctggaaccccgagatccagtacacctccaactactacaaatctacaagtgtggactttgctgttaatacagaaggcgtgtactctgaaccccgccccattggcacccgttacctcacccgtaatctgtaa

SEQ ID NO: 3847 - DNA, 2217 bp, synthetic construct
  misc_feature 1..2217: note = source = /note="Description of Artificial Sequence: Synthetic polynucleotide"
  source 1..2217: mol_type = other DNA
atggctgccgatggttatcttccagattggctcgaggacaacctctctgagggcattcgcgagtggtgggcgctgaaacctggagccccgaagcccaaagccaaccagcaaaagcaggacgacggccggggtctggtgcttcctggctacaagtacctcggacccttcaacggactcgacaagggggagcccgtcaacgcggcggacgcggcggccctcgagcacgacaaggcctacgaccagcagctgcaggcgggtgacaatccgtacctgcggtataaccacgccgacgccgagtttcaggagcgtctgcaagaagatacgtcttttgggggcaacctcgggcgagcagtcttccaggccaagaagcgggttctcgaacctctcggtctggttgaggaaggcgctaagacggctcctggaaagaagagaccggtagagccatcaccccagcgttctccagactcctctacgggcatcggcaagaagggccaacagcccgccagaaaaagactcaattttggtcagactggcgactcagagtcagttccagaccctcaacctctcggagaacctccagcagcgccctctggtgtgggacctaatacaatggctgcaggcggtggcgcaccaatggcagacaataacgaaggcgccgacggagtgggtagttcctcgggaaattggcattgcgattccacatggctgggcgacagagtcatcaccaccagcacccgaacctgggccctgcccacctacaacaaccacctctacaagcaaatctccaacgggacatcgggaggagccaccaacgacaacacctacttcggctacagcaccccctgggggtattttgactttaacagattccactgccacttttcaccacgtgactggcagcgactcatcaacaacaactggggattccggcccaagagactcagcttcaagctcttcaacatccaggtcaaggaggtcacgcagaatgaaggcaccaagaccatcgccaataacctcaccagcaccatccaggtgtttacggactcggagtaccagctgccgtacgttctcggctctgcccaccagggctgcctgcctccgttcccggcggacgtgttcacgattccccagtacggctacctaacactcaacaacggtagtcaggccgtgggacgctcctccttctactgcctggaatactttccttcgcagatgctgagaaccggcaacaacttccagtttacttacaccttcgaggacgtgcctttccacagcagctacgcccacagccagagcttggaccggctgatgaatcctctgattgaccagtacctgtactacttgtctcggattcaaacaacaggaggcacggcaaatacgcagactctgggcttcagccaaggtgggcctaatacaatggccaatcaggcaaagaactggctgccaggaccctgttaccgccaacaacgcgtctcaacgacaaccgggcaaaacaacaatagcaactttgcctggactgctgggaccaaataccatctgaatggaagaaattcattggctaatcctggcatcgctatggcaacacacaaagacgacgaggagcgtttttttcccagtaacgggatcctgatttttggcaaacaaaatgctgccagagacaatgcggattacagcgatgtcatgcccaccagcgaggaagaaatcaaaaccactaaccctgcggccacagaggaatacggtatcgtggcagataacttgcagcagcaaaacacggctcctcaaattggaactgtcaacagccagggggccttacccggtatggtctggcagaaccgggacgtgtacctgcagggtcccatctgggccaagattcctcacacggacggcaacttccacccgtctccgctgatgggcggctttggcctgaaacatcctccgcctcagatcctgatcaagaacacgcctgtacctgcggatcctccgaccaccttcaaccagtcaaagctgaactctttcatcacgcaatacagcaccggacaggtcagcgtggaaattgaatgggagctgcagaaggaaaacagcaagcgctggaaccccgagatccagtacacctccaactactacaaatctacaagtgtggactttgctgttaatacagaaggcgtgtactctgaaccccgccccattggcacccgttacctcacccgtaatctgtaa

SEQ ID NO: 3848 - DNA, 2217 bp, synthetic construct
  misc_feature 1..2217: note = source = /note="Description of Artificial Sequence: Synthetic polynucleotide"
  source 1..2217: mol_type = other DNA
atggctgccgatggttatcttccagattggctcgaggacaacctctctgagggcattcgcgagtggtgggcgctgaaacctggagccccgaagcccaaagccaaccagcaaaagcaggacgacggccggggtctggtgcttcctggctacaagtacctcggacccttcaacggactcgacaagggggagcccgtcaacgcggcggacgcggcggccctcgagcacgacaaggcctacgaccagcagctgcaggcgggtgacaatccgtacctgcggtataaccacgccgacgccgagtttcaggagcgtctgcaagaagatacgtcttttgggggcaacctcgggcgagcagtcttccaggccaagaagcgggttctcgaacctctcggtctggttgaggaaggcgctaagacggctcctggaaagaagagaccggtagagccatcaccccagcgttctccagactcctctacgggcatcggcaagaagggccaacagcccgccagaaaaagactcaattttggtcagactggcgactcagagtcagttccagaccctcaacctctcggagaacctccagcagcgccctctggtgtgggacctaatacaatggctgcaggcggtggcgcaccaatggcagacaataacgaaggcgccgacggagtgggtagttcctcgggaaattggcattgcgattccacatggctgggcgacagagtcatcaccaccagcacccgaacctgggccctgcccacctacaacaaccacctctacaagcaaatctccaacgggacatcgggaggagccaccaacgacaacacctacttcggctacagcaccccctgggggtattttgactttaacagattccactgccacttttcaccacgtgactggcagcgactcatcaacaacaactggggattccggcccaagagactcagcttcaagctcttcaacatccaggtcaaggaggtcacgcagaatgaaggcaccaagaccatcgccaataacctcaccagcaccatccaggtgtttacggactcggagtaccagctgccgtacgttctcggctctgcccaccagggctgcctgcctccgttcccggcggacgtgttcacgattccccagtacgactacctaacactcaacaacggtagtcaggccgtgggacgctcctccttctactgcctggaatactttccttcgcagatgctgagaaccggcaacaacttccagtttacttacaccttcgaggacgtgcctttccacagcagctacgcccacagccagagcttggaccggctgatgaatcctctgattgaccagtacctgtactacttgtctcggattcaaacaacaggaggcacggcaaatacgcagactctgggcttcagccaaggtgggcctaatacaatggccaatcaggcaaagaactggctgccaggaccctgttaccgccaacaacgcgtctcaacgacaaccgggcaaaacaacaatagcaactttgcctggactgctgggaccaaataccatctgaatggaagaaattcattggctaatcctggcatcgctatggcaacacacaaagacgacgaggagcgtttttttcccagtaacgggatcctgatttttggcaaacaaaatgctgccagagacaatgcggattacagcgatgtcatgcccaccagcgaggaagaaatcaaaaccactaaccctgtggccacagaggaatacggtatcgtggcagataacttgcagcagcaaaacacggctcctcaaattggaactgtcaacagccagggggccttacccggtatggtctggcagaaccgggacgtgtacctgcagggtcccatctgggccaagattcctcacacggacggcaacttccacccgtctccgctgatgggcggctttggcctgaaacatcctccgcctcagatcctgatcaagaacacgcctgtacctgcggatcctccgaccaccttcaaccagtcaaagctgaactctttcatcacgcaatacagcaccggacaggtcagcgtggaaattgaatgggagctgcagaaggaaaacagcaagcgctggaaccccgagatccagtacacctccaactactacaaatctacaagtgtggactttgctgttaatacagaaggcgtgtactctgaaccccgccccattggcacccgttacctcacccgtaatctgtaa

SEQ ID NO: 3849 - DNA, 2217 bp, synthetic construct
  misc_feature 1..2217: note = source = /note="Description of Artificial Sequence: Synthetic polynucleotide"
  source 1..2217: mol_type = other DNA
atggctgccgatggttatcttccagattggctcgaggacaacctctctgagggcattcgcgagtggtgggcgctgaaacctggagccccgaagcccaaagccaaccagcaaaagcaggacgacggccggggtctggtgcttcctggctacaagtacctcggacccttcaacggactcgacaagggggagcccgtcaacgcggcggacgcggcggccctcgagcacgacaaggcctacgaccagcagctgcaggcgggtgacaatccgtacctgcggtataaccacgccgacgccgagtttcaggagcgtctgcaagaagatacgtcttttgggggcaacctcgggcgagcagtcttccaggccaagaagcgggttctcgaacctctcggtctggttgaggaaggcgctaagacggctcctggaaagaagagaccggtagagccatcaccccagcgttctccagactcctctacgggcatcggcaagaagggccaacagcccgccagaaaaagactcaattttggtcagactggcgactcagggtcagttccagaccctcaacctctcggagaacctccagcagcgccctctggtgtgggacctaatacaatggctgcaggcggtggcgcaccaatggcagacaataacgaaggcgccgacggagtgggtagttcctcgggaaattggcattgcgattccacatggctgggcgacagagtcatcaccaccagcacccgaacctgggccctgcccacctacaacaaccacctctacaagcaaatctccaacgggacatcgggaggagccaccaacgacaacacctacttcggctacagcaccccctgggggtattttgactttaacagattccactgccacttttcaccacgtgactggcagcgactcatcaacaacaactggggattccggcccaagagactcagcttcaagctcttcaacatccaggtcaaggaggtcacgcagaatgaaggcaccaagaccatcgccaataacctcaccagcaccatccaggtgtttacggactcggagtaccagctgccgtacgttctcggctctgcccaccagggctgcctgcctccgttcccggcggacgtgttcacgattccccagtacggctacctaacactcaacaacggtagtcaggccgtgggacgctcctccttctactgcctggaatactttccttcgcagatgctgagaaccggcaacaacttccagtttacttacaccttcgaggacgtgcctttccacagcagctacgcccacagccagagcttggaccggctgatgaatcctctgattgaccagtacctgtactacttgtctcggattcaaacaacaggaggcacggcaaatacgcagactctgggcttcagccaaggtgggcctaatacaatggccaatcaggcaaagaactggctgccaggaccctgttaccgccaacaacgcgtctcaacgacaaccgggcaaaacaacaatagcaactttgcctggactgctgggaccaaataccatctgaatggaagaaattcattggctaatcctggcatcgctatggcaacacacaaagacgacgaggagcgtttttttcccagtaacgggatcctgatttttggcaaacaaaatgctgccagagacaatgcggattacagcgatgtcatgcccaccagcgaggaagaaatcaaaaccactaaccctgtggccacagaggaatacggtatcgtggcagataacttgcagcagcaaaacacggctcctcaaattggaactgtcaacagccagggggccttacccggtatggtctggcagaaccgggacgtgtacctgcagggtcccatctgggccaagattcctcacacggacggcaacttccacccgtctccgctgatgggcggctttggcctgaaacatcctccgcctcagatcctgatcaagaacacgcctgtacctgcggatcctccgaccaccttcaaccagtcaaagctgaactctttcatcacgcaatacagcaccggacaggtcagcgtggaaattgaatgggagctgcagaaggaaaacagcaagcgctggaaccccgagatccagtacacctccaactactacaaatctacaagtgtggactttgctgttaatacagaaggcgtgtactctgaaccccgccccattggcacccgttacctcacccgtaatctgtaa

SEQ ID NO: 3850 - DNA, 2217 bp, synthetic construct
  misc_feature 1..2217: note = source = /note="Description of Artificial Sequence: Synthetic polynucleotide"
  source 1..2217: mol_type = other DNA
atggctgccgatggttatcttccagattggctcgaggacaacctctctgagggcattcgcgagtggtgggcgctgaaacctggagccccgaagcccaaagccaaccagcaaaagcaggacgacggccggggtctggtgcttcctggctacaagtacctcggacccttcaacggactcgacaagggggagcccgtcaacgcggcggacgcggcggccctcgagcacgacaaggcctacgaccagcagctgcaggcgggtgacaatccgtacctgcggtataaccacgccgacgccgagtttcaggagcgtctgcaagaagatacgtcttttgggggcaacctcgggcgagcagtcttccaggccaagaagcgggttctcgaacctctcggtctggttgaggaaggcgctaagacggctcctggaaagaagagaccggtagagccatcaccccagcgttctccagactcctctacgggcatcggcaagaagggccaacagcccgccagaaaaagactcaattttggtcagactggcgactcagagtcagttccagaccctcaacctctcggagaacctccagcagcgccctctggtgtgggacctaatacaatggctgcaggcggtggcgcaccaatggcagacaataacgaaggcgccgacggagtgggtagttcctcgggaaattggcattgcgattccacatggctgggcgacagagtcatcaccaccagcacccgaacctgggccctgcccacctacaacaaccacctctacaagcaaatctccaacgggacatcgggaggagccaccaacgacaacacctacttcggctacagcaccccctgggggtattttgactttaacagattccactgccacttttcaccacgtgactggcagcgactcatcaacaacaactggggattccggcccaagagactcagcttcaagctcttcaacatccaggtcaaggaggtcacgcagaatgaaggcaccaaggccatcgccaataacctcaccagcaccatccaggtgtttacggactcggagtaccagctgccgtacgttctcggctctgcccaccagggctgcctgcctccgttcccggcggacgtgttcacgattccccagtacggctacctaacactcaacaacggtagtcaggccgtgggacgctcctccttctactgcctggaatactttccttcgcagatgctgagaaccggcaacaacttccagtttacttacaccttcgaggacgtgcctttccacagcagctacgcccacagccagagcttggaccggctgatgaatcctctgattgaccagtacctgtactacttgtctcggattcaaacaacaggaggcacggcaaatacgcagactctgggcttcagccaaggtgggcctaatacaatggccaatcaggcaaagaactggctgccaggaccctgttaccgccaacaacgcgtctcaacgacaaccgggcaaaacaacaatagcaactttgcctggactgctgggaccaaataccatctgaatggaagaaattcattggctaatcctggcatcgctatggcaacacacaaagacgacgaggagcgtttttttcccagtaacgggatcctgatttttggcaaacaaaatgctgccagagacaatgcggattacagcgatgtcatgcccaccagcgaggaagaaatcaaaaccactaaccctgtggccacagaggaatacggtatcgtggcagataacttgcagcagcaaaacacggctcctcaaattggaactgtcaacagccagggggccttacccggtatggtctggcagaaccgggacgtgtacctgcagggtcccatctgggccaagattcctcacacggacggcaacttccacccgtctccgctgatgggcggctttggcctgaaacatcctccgcctcagatcctgatcaagaacacgcctgtacctgcggatcctccgaccaccttcaaccagtcaaagctgaactctttcatcacgcaatacagcaccggacaggtcagcgtggaaattgaatgggagctgcagaaggaaaacagcaagcgctggaaccccgagatccagtacacctccaactactacaaatctacaagtgtggactttgctgttaatacagaaggcgtgtactctgaaccccgccccattggcacccgttacctcacccgtaatctgtaa

SEQ ID NO: 3851 - DNA, 2217 bp, synthetic construct
  misc_feature 1..2217: note = source = /note="Description of Artificial Sequence: Synthetic polynucleotide"
  source 1..2217: mol_type = other DNA
atggctgccgatggttatcttccagattggctcgaggacaacctctctgagggcattcgcgagtggtgggcgctgaaacctggagccccgaagcccaaagccaaccagcaaaagcaggacgacggccggggtccggtgcttcctggctacaagtacctcggacccttcaacggactcgacaagggggagcccgtcaacgcggcggacgcggcggccctcgagcacgacaaggcctacgaccagcagctgcaggcgggtgacaatccgtacctgcggtataaccacgccgacgccgagtttcaggagcgtctgcaagaagatacgtcttttgggggcaacctcgggcgagcagtcttccaggccaagaagcgggttctcgaacctctcggtctggttgaggaaggcgctaagacggctcctggaaagaagagaccggtagagccatcaccccagcgttctccagactcctctacgggcatcggcaagaagggccaacagcccgccagaaaaagactcaattttggtcagactggcgactcagagtcagttccagaccctcaacctctcggagaacctccagcagcgccctctggtgtgggacctaatacaatggctgcaggcggtggcgcaccaatggcagacaataacgaaggcgccgacggagtgggtagttcctcgggaaattggcattgcgattccacatggctgggcgacagagtcatcaccaccagcacccgaacctgggccctgcccacctacaacaaccacctctacaagcaaatctccaacgggacatcgggaggagccaccaacgacaacacctacttcggctacagcaccccctgggggtattttgactttaacagattccactgccacttttcaccacgtgactggcagcgactcatcaacaacaactggggattccggcccaagagactcagcttcaagctcttcaacatccaggtcaaggaggtcacgcagaatgaaggcaccaagaccatcgccaataacctcaccagcaccatccaggtgtttacggactcggagtaccagctgccgtacgttctcggctctgcccaccagggctgcctgcctccgttcccggcggacgtgttcacgattccccagtacggctacctaacactcaacaacggtagtcaggccgtgggacgctcctccttctactgcctggaatactttccttcgcagatgctgagaaccggcaacaacttccagtttacttacaccttcgaggacgtgcctttccacagcagctacgcccacagccagagcttggaccggctgatgaatcctctgattgaccagtacctgtactacttgtctcggattcaaacaacaggaggcacggcaaatacgcagactctgggcttcagccaaggtgggcctaatacaatggccaatcaggcaaagaactggctgccaggaccctgttaccgccaacaacgcgtctcaacgacaaccgggcaaaacaacaatagcaactttgcctggactgctgggaccaaataccatctgaatggaagaaattcattggctaatcctggcatcgctatggcaacacacaaagacgacgaggagcgtttttttcccagtaacgggatcctgatttttggcaaacaaaatgctgccagagacaatgcggattacagcgatgtcatgcccaccagcgaggaagaaatcaaaaccactaaccctgtggccacagaggaatacggtatcgtggcagataacttgcagcagcaaaacacggctcctcaaattggaactgtcaacagccagggggccttacccggtatggtctggcagaaccgggacgtgtacctgcagggtcccatctgggccaagattcctcacacggacggcaacttccacccgtctccgctgatgggcggctttggcctgaaacatcctccgcctcagatcctgatcaagaacacgcctgtacctgcggatcctccgaccaccttcaaccagtcaaagctgaactctttcatcacgcaatacagcaccggacaggtcagcgtggaaattgaatgggagctgcagaaggaaaacagcaagcgctggaaccccgagatccagtacacctccaactactacaaatctacaagtgtggactttgctgttaatacagaaggcgtgtactctgaaccccgccccattggcacccgttacctcacccgtaatctgtaa

SEQ ID NO: 3852 - DNA, 2217 bp, synthetic construct
  misc_feature 1..2217: note = source = /note="Description of Artificial Sequence: Synthetic polynucleotide"
  source 1..2217: mol_type = other DNA
atggctgccgatggttatcttccagattggctcgaggacaacctctctgagggcattcgcgagtggtgggcgctgaaacctggagccccgaagcccaaagccaaccagcaaaagcaggacgacggccggggtctggtgcttcctggctacaagtacctcggacccttcaacggactcgacaagggggagcccgtcaacgcggcggacgcggcggccctcgagcacgacaaggcctacgaccagcagctgcaggcgggtgacaatccgtacctgcggtataaccacgccgacgccgagtttcaggagcgtctgcaagaagatacgtcttttgggggcaacctcgggcgagcagtcttccaggccaagaagcgggttctcgaacctctcggtctggttgaggaaggcgctaagacggctcctggaaagaagagaccggtagagccatcaccccagcgttctccagactcctctacgggcatcggcaagaagggccaacagcccgccagaaaaagactcaattttggtcagactggcgactcagagtcagttccagaccctcaacctctcggagaacctccagcagcgccctctggtgtgggacctaatacaatggctgcaggcggtggcgcaccaatggcagacaataacgaaggcgccgacggagtgggtagttcctcgggaaattggcattgcgattccacatggctgggcgacagagtcatcaccaccagcacccgaacctgggccctgcccacctacaacaaccacctctacaagcaaatctccaacgggacatcgggaggagccaccaacgacaacacctacttcggctacagcaccccctgggggtattttgactttaacagattccactgccacttttcaccacgtgactggcagcgactcatcaacaacaactggggattccggcccaagagactcagcttcaagctcttcaacatccaggtcaaggaggtcacgcagaatgaaggcaccaagaccatcgccaataacctcaccagcaccatccaggtgtttacggactcggagtaccagctgccgtacgttctcggctctgcccaccagggctgcctgcctccgttcccggcggacgtgttcacgattccccagtacggctacctaacactcaacaacggtagtcaggccgtgggacgctcctccttctactgcctggaatactttccttcgcagatgctgagaaccggcaacaacttccagtttacttacaccttcgaggacgtgcctttccacagcagctacgcccacagccagagcttggaccggctgatgaatcctctgattgaccagtacctgtactacttgtctcggattcaaacaacaggaggcacggcaaatacgcagactctgggcttcagccaaggtgggcctaatacaatggccaatcgggcaaagaactggctgccaggaccctgttaccgccaacaacgcgtctcaacgacaaccgggcaaaacaacaatagcaactttgcctggactgctgggaccaaataccatctgaatggaagaaattcattggctaatcctggcatcgctatggcaacacacaaagacgacgaggagcgtttttttcccagtaacgggatcctgatttttggcaaacaaaatgctgccagagacaatgcggattacagcgatgtcatgcccaccagcgaggaagaaatcaaaaccactaaccctgtggccacagaggaatacggtatcgtggcagataacttgcagcagcaaaacacggctcctcaaattggaactgtcaacagccagggggccttacccggtatggtctggcagaaccgggacgtgtacctgcagggtcccatctgggccaagattcctcacacggacggcaacttccacccgtctccgctgatgggcggctttggcctgaaacatcctccgcctcagatcctgatcaagaacacgcctgtacctgcggatcctccgaccaccttcaaccagtcaaagctgaactctttcatcacgcaatacagcaccggacaggtcagcgtggaaattgaatgggagctgcagaaggaaaacagcaagcgctggaaccccgagatccagtacacctccaactactacaaatctacaagtgtggactttgctgttaatacagaaggcgtgtactctgaaccccgccccattggcacccgttacctcacccgtaatctgtaa

SEQ ID NO: 3853 - DNA, 2217 bp, synthetic construct
  misc_feature 1..2217: note = source = /note="Description of Artificial Sequence: Synthetic polynucleotide"
  source 1..2217: mol_type = other DNA
atggctgccgatggttatcttccagattggctcgaggacaacctctctgagggcattcgcgagtggtgggcgctgaaacctggagccccgaagcccaaagccaaccagcaaaagcaggacgacggccggggtctggtgcttcctggctacaagtacctcggacccttcaacggactcgacaagggggagcccgtcaacgcggcggacgcggcggccctcgagcacgacaaggcctacgaccagcagctgcaggcgggtgacaatccgtacctgcggtataaccacgccgacgccgagtttcaggagcgtctgcaagaagatacgtcttttgggggcaacctcgggcgagcagtcttccaggccaagaagcgggttctcgaacctctcggtctggttgaggaaggcgctaagacggctcctggaaagaagagaccggtagagccatcaccccagcgttctccagactcctctacgggcatcggcaagaagggccaacagcccgccagaaaaagactcaattttggtcagactggcgactcagagtcagttccagaccctcaacctctcggagaacctccagcagcgccctctggtgtgggacctaatacaatggctgcaggcggtggcgcaccaatggcagacaataacgaaggcgccgacggagtgggtagttcctcgggaaattggcattgcgattccacatggctgggcgacagagtcatcaccaccagcacccgaacctgggccctgcccacctacaacaaccacctctacaagcaaatctccaacgggacatcgggaggagccaccaacgacaacacctacttcggctacagcaccccctgggggtattttgactttaacagattccactgccacttttcaccacgtgactggcagcgactcatcaacaacaactggggattccggcccaagagactcagcttcaagctcttcaacatccaggtcaaggaggtcacgcagaatgaaggcaccaagaccatcgccaataacctcaccagcaccatccaggtgtttacggactcggagtaccagctgccgtacgttctcggctctgcccaccagggctgcctgcctccgttcccggcggacgtgttcacgattccccagtacggctacctaacactcaacaacggtagtcaggccgtgggacgctcctccttctactgcctggaatactttccttcgcagatgctgagaaccggcaacaacttccagtttacttacaccttcgaggacgtgcctttccacagcagctacgcccacagccagagcttggaccggctgatgaatcctctgattgaccagtacctgtactacttgtctcggattcaaacaacaggaggcacggcaaatacgcagactctgggcttcagccaaggtgggcctaatacaatggccaatcaggcaaagaactggctgccaggaccctgttaccgccaacaacgcgtctcaacgacaaccgggcaaaacaacaatagcaactttgcccggactgctgggaccaaataccatctgaatggaagaaattcattggctaatcctggcatcgctatggcaacacacaaagacgacgaggagcgtttttttcccagtaacgggatcctgatttttggcaaacaaaatgctgccagagacaatgcggattacagcgatgtcatgcccaccagcgaggaagaaatcaaaaccactaaccctgtggccacagaggaatacggtatcgtggcagataacttgcagcagcaaaacacggctcctcaaattggaactgtcaacagccagggggccttacccggtatggtctggcagaaccgggacgtgtacctgcagggtcccatctgggccaagattcctcacacggacggcaacttccacccgtctccgctgatgggcggctttggcctgaaacatcctccgcctcagatcctgatcaagaacacgcctgtacctgcggatcctccgaccaccttcaaccagtcaaagctgaactctttcatcacgcaatacagcaccggacaggtcagcgtggaaattgaatgggagctgcagaaggaaaacagcaagcgctggaaccccgagatccagtacacctccaactactacaaatctacaagtgtggactttgctgttaatacagaaggcgtgtactctgaaccccgccccattggcacccgttacctcacccgtaatctgtaa

SEQ ID NO: 3854 - DNA, 2217 bp, synthetic construct
  misc_feature 1..2217: note = source = /note="Description of Artificial Sequence: Synthetic polynucleotide"
  source 1..2217: mol_type = other DNA
atggctgccgatggttatcttccagattggctcgaggacaacctctctgagggcattcgcgagtggtgggcgctgaaacctggagccccgaagcccaaagccaaccagcaaaagcaggacgacggccggggtctggtgcttcctggctacaagtacctcggacccttcaacggactcgacaagggggagcccgtcaacgcggcggacgcggcggccctcgagcacgacaaggcctacgaccagcagctgcaggcgggtgacaatccgtacctgcggtataaccacgccgacgccgagtttcaggagcgtctgcaagaagatacgtcttttgggggcaacctcgggcgagcagtcttccaggccaagaagcgggttctcgaacctctcggtctggttgaggaaggcgctaagacggctcctggaaagaagagaccggtagagccatcaccccagcgttctccagactcctctacgggcatcggcaagaagggccaacagcccgccagaaaaagactcaattttggtcagactggcgactcagagtcagttccagaccctcaacctctcggagaacctccagcagcgccctctggtgtgggacctaatacaatggctgcaggcggtggcgcaccaatggcagacaataacgaaggcgccgacggagtgggtagttcctcgggaaattggcattgcgattccacatggctgggcgacagagtcatcaccaccagcacccgaacctgggccctgcccacctacaacaaccacctctacaagcaaatctccaacgggacatcgggaggagccaccaacgacaacacctacttcggctacagcaccccctgggggtattttgactttaacagatcccactgccacttttcaccacgtgactggcagcgactcatcaacaacaactggggattccggcccaagagactcagcttcaagctcttcaacatccaggtcaaggaggtcacgcagaatgaaggcaccaagaccatcgccaataacctcaccagcaccatccaggtgtttacggactcggagtaccagctgccgtacgttctcggctctgcccaccagggctgcctgcctccgttcccggcggacgtgttcacgattccccagtacggctacctaacactcaacaacggtagtcaggccgtgggacgctcctccttctactgcctggaatactttccttcgcagatgctgagaaccggcaacaacttccagtttacttacaccttcgaggacgtgcctttccacagcagctacgcccacagccagagcttggaccggctgatgaatcctctgattgaccagtacctgtactacttgtctcggattcaaacaacaggaggcacggcaaatacgcagactctgggcttcagccaaggtgggcctaatacaatggccaatcaggcaaagaactggctgccaggaccctgttaccgccaacaacgcgtctcaacgacaaccgggcaaaacaacaatagcaactttgcctggactgctgggaccaaataccatctgaatggaagaaattcattggctaatcctggcatcgctatggcaacacacaaagacgacgaggagcgtttttttcccagtaacgggatcctgatttttggcaaacaaaatgctgccagagacaatgcggattacagcgatgtcatgcccaccagcgaggaagaaatcaaaaccactaaccctgtggccacagaggaatacggtatcgtggcagataacttgcagcagcaaaacacggctcctcaaattggaactgtcaacagccagggggccttacccggtatggtctggcagaaccgggacgtgtacctgcagggtcccatctgggccaagattcctcacacggacggcaacttccacccgtctccgctgatgggcggctttggcctgaaacatcctccgcctcagatcctgatcaagaacacgcctgtacctgcggatcctccgaccaccttcaaccagtcaaagctgaactctttcatcacgcaatacagcaccggacaggtcagcgtggaaattgaatgggagctgcagaaggaaaacagcaagcgctggaaccccgagatccagtacacctccaactactacaaatctacaagtgtggactttgctgttaatacagaaggcgtgtactctgaaccccgccccattggcacccgttacctcacccgtaatctgtaa

SEQ ID NO: 3855 - DNA, 2217 bp, synthetic construct
  misc_feature 1..2217: note = source = /note="Description of Artificial Sequence: Synthetic polynucleotide"
  source 1..2217: mol_type = other DNA
atggctgccgatggttatcttccagattggctcgaggacaacctctctgagggcattcgcgagtggtgggcgctgaaacctggagccccgaagcccaaagccaaccagcaaaagcaggacgacggccggggtctggtgcttcctggctacaagtacctcggacccttcaacggactcgacaagggggagcccgtcaacgcggcggacgcggcggccctcgagcacgacaaggcctacgaccagcagctgcaggcgggtgacaatccgtacctgcggtataaccacgccgacgccgagtttcaggagcgtctgcaagaagatacgtcttttgggggcaacctcgggcgagcagtcttccaggccaagaagcgggttctcgaacctctcggtctggttgaggaaggcgctaagacggctcctggaaagaagagaccggtagagccatcaccccagcgttctccagactcctctacgggcatcggcaagaagggccaacagcccgccagaaaaagactcaattttggtcagactggcgactcagagtcagttccagaccctcaacctctcggagaacctccagcagcgccctctggtgtgggacctaatacaatggctgcaggcggtggcgcaccaatggcagacaataacgaaggcgccgacggagtgggtagttcctcgggaaattggcattgcgattccacatggctgggcgacagagtcatcaccaccagcacccgaacctgggccctgcccacctacaacaaccacctctacaagcaaatctccaacgggacatcgggaggagccaccaacgacaacacctacttcggctacagcaccccctgggggtattttgactttaacagattccactgccacttttcaccacgtgactggcagcgactcatcaacaacaactggggattccggcccaagagactcagcttcaagctcttcaacatccaggtcaaggaggtcacgcagaatgaaggcaccaagaccatcgccaataacctcaccagcaccatccaggtgtttacggactcggagtaccagctgccgtacgttctcggctctgcccaccagggctgcctgcctccgttcccggcggacgtgttcacgattccccagtacggctacctaacactcaacaacggtagtcaggccgtgggacgctcctccttctactgcctggaatactttccttcgcagatgctgagaaccggcaacaacttccagtttacttacaccttcgaggacgtgcctttccacagcagctacgcccacagccagagcttggaccggctgatgaatcctctgattgaccagtacctgtactacttgtctcggattcaaacaacaggaggcacggcaaatacgcagactctgggcttcggccaaggtgggcctaatacaatggccaatcaggcaaagaactggctgccaggaccctgttaccgccaacaacgcgtctcaacgacaaccgggcaaaacaacaatagcaactttgcctggactgctgggaccaaataccatctgaatggaagaaattcattggctaatcctggcatcgctatggcaacacacaaagacgacgaggagcgtttttttcccagtaacgggatcctgatttttggcaaacaaaatgctgccagagacaatgcggattacagcgatgtcatgcccaccagcgaggaagaaatcaaaaccactaaccctgtggccacagaggaatacggtatcgtggcagataacttgcagcagcaaaacacggctcctcaaattggaactgtcaacagccagggggccttacccggtatggtctggcagaaccgggacgtgtacctgcagggtcccatctgggccaagattcctcacacggacggcaacttccacccgtctccgctgatgggcggctttggcctgaaacatcctccgcctcagatcctgatcaagaacacgcctgtacctgcggatcctccgaccaccttcaaccagtcaaagctgaactctttcatcacgcaatacagcaccggacaggtcagcgtggaaattgaatgggagctgcagaaggaaaacagcaagcgctggaaccccgagatccagtacacctccaactactacaaatctacaagtgtggactttgctgttaatacagaaggcgtgtactctgaaccccgccccattggcacccgttacctcacccgtaatctgtaa

SEQ ID NO: 3856 - DNA, 2217 bp, synthetic construct
  misc_feature 1..2217: note = source = /note="Description of Artificial Sequence: Synthetic polynucleotide"
  source 1..2217: mol_type = other DNA
atggctgccgatggttatcttccagattggctcgaggacaacctctctgagggcattcgcgagtggtgggcgctgaaacctggagccccgaagcccaaagccaaccagcaaaagcaggacgacggccggggtctggtgcttcctggctacaagtacctcggacccttcaacggactcgacaagggggagcccgtcaacgcggcggacgcggcggccctcgagcacgacaaggcctacgaccagcagctgcaggcgggtgacaatccgtacctgcggtataaccacgccgacgccgagtttcaggagcgtctgcaagaagatacgtcttttgggggcaacctcgggcgagcagtcttccaggccaagaagcgggttctcgaacctctcggtctggttgaggaaggcgctaagacggctcctggaaagaagagaccggtagagccatcaccccagcgttctccagactcctctacgggcatcggcaagaagggccaacagcccgccagaaaaagactcaattttggtcagactggcgactcagagtcagttccagaccctcaacctctcggagaacctccagcagcgccctctggtgtgggacctaatacaatggctgcaggcggtggcgcaccaatggcagacaataacgaaggcgccgacggagtgggtagttcctcgggaaattggcattgcgattccacatggctgggcgacagagtcatcaccaccagcacccgaacctgggccctgcccacctacaacaaccacctctacaagcaaatctccaacgggacatcgggaggagccaccaacgacaacacctacttcggctacagcaccccctgggggtattttgactttaacagattccactgccacttttcaccacgtgactggcagcgactcatcaacaacaactggggattccggcccaagagactcagcttcaagctcttcaacatccaggtcaaggaggtcacgcagaatgaaggcaccaagaccatcgccaataacctcaccagcaccatccaggtgtttacggactcggagtaccagctgccgtacgttctcggctctgcccaccagggctgcctgcctccgttcccggcggacgtgttcacgattccccagtacggctacctaacactcaacaacggtagtcaggccgtgggacgctcctccttctactgcctggaatactttccttcgcagatgctgagaaccggcaacaacttccagtttacttacaccttcgaggacgtgcctttccacagcagctacgcccacagccagagcttggaccggctgatgaatcctctgattgaccagtacctgtactacttgtctcggattcaaacaacaggaggcacggcaaatacgcagactctgggcttcagccaaggtgggcctaatacaatggccaatcaggcaaagaactggctgccaggaccctgttaccgccaacaacgcgcctcaacgacaaccgggcaaaacaacaatagcaactttgcctggactgctgggaccaaataccatctgaatggaagaaattcattggctaatcctggcatcgctatggcaacacacaaagacgacgaggagcgtttttttcccagtaacgggatcctgatttttggcaaacaaaatgctgccagagacaatgcggattacagcgatgtcatgcccaccagcgaggaagaaatcaaaaccactaaccctgtggccacagaggaatacggtatcgtggcagataacttgcagcagcaaaacacggctcctcaaattggaactgtcaacagccagggggccttacccggtatggtctggcagaaccgggacgtgtacctgcagggtcccatctgggccaagattcctcacacggacggcaacttccacccgtctccgctgatgggcggctttggcctgaaacatcctccgcctcagatcctgatcaagaacacgcctgtacctgcggatcctccgaccaccttcaaccagtcaaagctgaactctttcatcacgcaatacagcaccggacaggtcagcgtggaaattgaatgggagctgcagaaggaaaacagcaagcgctggaaccccgagatccagtacacctccaactactacaaatctacaagtgtggactttgctgttaatacagaaggcgtgtactctgaaccccgccccattggcacccgttacctcacccgtaatctgtaa

SEQ ID NO: 3857 - DNA, 2217 bp, synthetic construct
  misc_feature 1..2217: note = source = /note="Description of Artificial Sequence: Synthetic polynucleotide"
  source 1..2217: mol_type = other DNA
atggctgccgatggttatcttccagattggctcgaggacaacctctctgagggcattcgcgagtggtgggcgctgaaacctggagccccgaagcccaaagccaaccagcaaaagcaggacgacggccggggtctggtgcttcctggctacaagtacctcggacccttcaacggactcgacaagggggagcccgtcaacgcggcggacgcggcggccctcgagcacgacaaggcctacgaccagcagctgcaggcgggtgacaatccgtacctgcggtataaccacgccgacgccgagtttcaggagcgtctgcaagaagatacgtcttttgggggcaacctcgggcgagcagtcttccaggccaagaagcgggttctcgaacctctcggtctggttgaggaaggcgctaagacggctcctggaaagaagagaccggtagagccatcaccccagcgttctccagactcctctacgggcatcggcaagaagggccaacagcccgccagaaaaagactcaattttggtcagactggcgactcagagtcagttccagaccctcaacctctcggagaacctccagcagcgccctctggtgtgggacctaatacaatggctgcaggcggtggcgcaccaatggcagacaataacgaaggcgccgacggagtgggtagttcctcgggaaattggcattgcgattccacatggctgggcgacagagtcatcaccaccagcacccgaacctgggccctgcccacctacaacaaccacctctacaagcaaatctccaacgggacatcgggaggagccaccaacgacaacacctacttcggctacagcaccccctgggggtattttgactttaacagattccactgccacttttcaccacgtgactggcagcgactcatcaacaacaactggggattccggcccaagagactcagcttcaagctcttcaacatccaggtcaaggaggtcacgcagaatgaaggcaccaagaccatcgccaataacctcaccagcaccatccaggtgtttacggactcggagtaccagctgccgtacgttctcggctctgcccaccagggctgcctgcctccgttcccggcggacgtgttcacgattccccagtacggctacctaacactcaacaacggtagtcaggccgtgggacgctcctccttctactgcctggaatactttccttcgcagatgctgagaaccggcaacaacttccagtttacttacaccttcgaggacgtgcctttccacagcagctacgcccacagccagagcttggaccggctgatgaatcctctgattgaccagtacctgtactacttgtctcggattcaaacaacaggaggcacggcaaatacgcagactctgggcttcagccaaggtgggcctaatacaatggccaatcaggcaaagaactggctgccaggaccctgttaccgccaacaacgcgtctcaacgacaaccgggcaaaacaacaatagcaactttgcctggactgctgggaccaaataccatctgaatggaagaaattcattggctaatcctggcatcgctatggcaacacacaaagacgacgaggagcgtttttttcccagtaacgggatcctgatttttggcaaacaaaatgctgccagagacaatgcggattacagcgatgtcatacccaccagcgaggaagaaatcaaaaccactaaccctgtggccacagaggaatacggtatcgtggcagataacttgcagcagcaaaacacggctcctcaaattggaactgtcaacagccagggggccttacccggtatggtctggcagaaccgggacgtgtacctgcagggtcccatctgggccaagattcctcacacggacggcaacttccacccgtctccgctgatgggcggctttggcctgaaacatcctccgcctcagatcctgatcaagaacacgcctgtacctgcggatcctccgaccaccttcaaccagtcaaagctgaactctttcatcacgcaatacagcaccggacaggtcagcgtggaaattgaatgggagctgcagaaggaaaacagcaagcgctggaaccccgagatccagtacacctccaactactacaaatctacaagtgtggactttgctgttaatacagaaggcgtgtactctgaaccccgccccattggcacccgttacctcacccgtaatctgtaa

SEQ ID NO: 3858 - DNA, 2217 bp, synthetic construct
  misc_feature 1..2217: note = source = /note="Description of Artificial Sequence: Synthetic polynucleotide"
  source 1..2217: mol_type = other DNA
atggctgccgatggttatcttccagattggctcgaggacaacctctctgagggcattcgcgagtggtgggcgctgaaacctggagccccgaagcccaaagccaaccagcaaaagcaggacgacggccggggtctggtgcttcctggctacaagtacctcggacccttcaacggactcgacaagggggagcccgtcaacgcggcggacgcggcggccctcgagcacgacaaggcctacgaccagcagctgcaggcgggtgacaatccgtacctgcggtataaccacgccgacgccgagtttcaggagcgtctgcaagaagatacgtcttttgggggcaacctcgggcgagcagtcttccaggccaagaagcgggttctcgaacctctcggtctggttgaggaaggcgctaagacggctcctggaaagaagagaccggtagagccatcaccccagcgttctccagactcctctacgggcatcggcaagaagggccaacagcccgccagaaaaagactcaattttggtcagactggcgactcagagtcagttccagaccctcaacctctcggagaacctccagcagcgccctctggtgtgggacctaatacaatggctgcaggcggtggcgcaccaatggcagacaataacgaaggcgccgacggagtgggtagttcctcgggaaattggcattgcgattccacatggctgggcgacagagtcatcaccaccagcacccgaacctgggccctgcccacctacaacaaccacctctacaagcaaatctccaacgggacatcgggaggagccaccaacgacaacacctacttcggctacagcaccccctgggggtattttgactttaacagattccactgccacttttcaccacgtgactggcagcgactcatcaacaacaactggggattccggcccaagagactcagcttcaagctcttcaacatccaggtcaaggaggtcacgcagaatgaaggcaccaagaccatcgccaataacctcaccagcaccatccaggtgtttacggactcggagtaccagctgccgtacgttctcggctctgcccaccagggctgcctgcctccgttcccggcggacgtgttcacgattccccagtacggctacctaacactcaacaacggtagtcaggccgtgggacgctcctccttctactgcctggaatactttccttcgcagatgctgagaaccggcaacaacttccagtttacttacaccttcgaggacgtgcctttccacagcagctacgcccacagccagagcttggaccggctgatgaatcctctgattgaccagtacctgtactacttgtctcggattcaaacaacaggaggcacggcaaatacgcagactctgggcttcagccaaggtgggcctaatacaatggccaatcaggcaaagaactggctgccaggaccctgttaccgccaacaacgcgtctcaacgacaaccgggcaaaacaacaatagcaactttgcctggactgctgggaccaaataccatctgaatggaagaaattcattggctaatcctggcatcgctatggcaacacacaaagacgacgaggagcgtttttttcccagtaacgggatcctgatttttggcaaacaaaatgctgccagagacaatgcggattacagcgatgtcatgcccaccagcgaggaagaaatcaaaaccactaaccctgtggccacagaggaatacggtatcgtggcagataacttgcagcagcaaaacacggctcctcaaattggaactgccaacagccagggggccttacccggtatggtctggcagaaccgggacgtgtacctgcagggtcccatctgggccaagattcctcacacggacggcaacttccacccgtctccgctgatgggcggctttggcctgaaacatcctccgcctcagatcctgatcaagaacacgcctgtacctgcggatcctccgaccaccttcaaccagtcaaagctgaactctttcatcacgcaatacagcaccggacaggtcagcgtggaaattgaatgggagctgcagaaggaaaacagcaagcgctggaaccccgagatccagtacacctccaactactacaaatctacaagtgtggactttgctgttaatacagaaggcgtgtactctgaaccccgccccattggcacccgttacctcacccgtaatctgtaa

SEQ ID NO: 3859 - DNA, 2217 bp, synthetic construct
  misc_feature 1..2217: note = source = /note="Description of Artificial Sequence: Synthetic polynucleotide"
  source 1..2217: mol_type = other DNA
atggctgccgatggttatcttccagattggctcgaggacaacctctctgagggcattcgcgagtggtgggcgctgaaacctggagccccgaagcccaaagccaaccagcaaaagcaggacgacggccggggtctggtgcttcctggctacaagtacctcggacccttcaacggactcgacaagggggagcccgtcaacgcggcggacgcggcggccctcgagcacgacaaggcctacgaccagcagctgcaggcgggtgacaatccgtacctgcggtataaccacgccgacgccgagtttcaggagcgtctgcaagaagatacgtcttttgggggcaacctcgggcgagcagtcttccaggccaagaagcgggttctcgaacctctcggtctggttgaggaaggcgctaagacggctcctggaaagaagagaccggtagagccatcaccccagcgttctccagactcctctacgggcatcggcaagaagggccaacagcccgccagaaaaagactcaattttggtcagactggcgactcagagtcagttccagaccctcaacctctcggagaacctccagcagcgccctctggtgtgggacctaatacaatggctgcaggcggtggcgcaccaatggcagacaataacgaaggcgccgacggagtgggtagttcctcgggaaattggcattgcgattccacatggctgggcgacagagtcatcaccaccagcacccgaacctgggccctgcccacctacaacaaccacctctacaagcaaatctccaacgggacatcgggaggagccaccaacgacaacacctacttcggctacagcaccccctgggggtattttgactttaacagattccactgccacttttcaccacgtgactggcagcgactcatcaacaacaactggggattccggcccaagagactcagcttcaagctcttcaacatccaggtcaaggaggtcacgcagaatgaaggcaccaagaccatcgccaataacctcaccagcaccatccaggtgtttacggactcggagtaccagctgccgtacgttctcggctctgcccaccagggctgcctgcctccgttcccggcggacgtgttcacgattccccagtacggctacctaacactcaacaacggtagtcaggccgtgggacgctcctccttctactgcctggaatactttccttcgcagatgctgagaaccggcaacaacttccagtttacttacaccttcgaggacgtgcctttccacagcagctacgcccacagccagagcttggaccggctgatgaatcctctgattgaccagtacctgtactacttgtctcggattcaaacaacaggaggcacggcaaatacgcagactctgggcttcagccaaggtgggcctaatacaatggccaatcaggcaaagaactggctgccaggaccctgttaccgccaacaacgcgtctcaacgacaaccgggcaaaacaacaatagcaactttgcctggactgctgggaccaaataccatctgaatggaagaaattcattggctaatcctggcatcgctatggcaacacacaaagacgacgaggagcgtttttttcccagtaacgggatcctgatttttggcaaacaaaatgctgccagagacaatgcggattacagcgatgtcatgcccaccagcgaggaagaaatcaaaaccactaaccctgtggccacagaggaatacggtatcgtggcagataacttgcagcagcaaaacacggctcctcaaattggaactgtcaacagccagggggccttacccggtatggtctggcagaaccgggacgtgtacctgcagggtcccatctgggccaagattcctcacacggacggcaacttccacccgtctccgctgatgggcggctttggcctgaaacatcctccgcctcagatcctgatcaagaacacgcctgtacctgcggatcctccgaccaccttcaaccagtcaaagctgaactctttcatcacgcaatacagcaccggacaggtcggcgtggaaattgaatgggagctgcagaaggaaaacagcaagcgctggaaccccgagatccagtacacctccaactactacaaatctacaagtgtggactttgctgttaatacagaaggcgtgtactctgaaccccgccccattggcacccgttacctcacccgtaatctgtaa

SEQ ID NO: 3860 - DNA, 2217 bp, synthetic construct
  misc_feature 1..2217: note = source = /note="Description of Artificial Sequence: Synthetic polynucleotide"
  source 1..2217: mol_type = other DNA
atggctgccgatggttatcttccagattggctcgaggacaacctctctgagggcattcgcgagtggtgggcgctgaaacctggagccccgaagcccaaagccaaccagcaaaagcaggacgacggccggggtctggtgcttcctggctacaagtacctcggacccttcaacggactcgacaagggggagcccgtcaacgcggcggacgcggcggccctcgagcacggcaaggcctacgaccagcagctgcaggcgggtgacaatccgtacctgcggtataaccacgccgacgccgagtttcaggagcgtctgcaagaagatacgtcttttgggggcaacctcgggcgagcagtcttccaggccaagaagcgggttctcgaacctctcggtctggttgaggaaggcgctaagacggctcctggaaagaagagaccggtagagccatcaccccagcgttctccagactcctctacgggcatcggcaagaagggccaacagcccgccagaaaaagactcaattttggtcagactggcgactcagagtcagttccagaccctcaacctctcggagaacctccagcagcgccctctggtgtgggacctaatacaatggctgcaggcggtggcgcaccaatggcagacaataacgaaggcgccgacggagtgggtagttcctcgggaaattggcattgcgattccacatggctgggcgacagagtcatcaccaccagcacccgaacctgggccctgcccacctacaacaaccacctctacaagcaaatctccaacgggacatcgggaggagccaccaacgacaacacctacttcggctacagcaccccctgggggtattttgactttaacagattccactgccacttttcaccacgtgactggcagcgactcatcaacaacaactggggattccggcccaagagactcagcttcaagctcttcaacatccaggtcaaggaggtcacgcagaatgaaggcaccaagaccatcgccaataacctcaccagcaccatccaggtgtttacggactcggagtaccagctgccgtacgttctcggctctgcccaccagggctgcctgcctccgttcccggcggacgtgttcacgattccccagtacggctacctaacactcaacaacggtagtcaggccgtgggacgctcctccttctactgcctggaatactttccttcgcagatgctgagaaccggcaacaacttccagtttacttacaccttcgaggacgtgcctttccacagcagctacgcccacagccagagcttggaccggctgatgaatcctctgattgaccagtacctgtactacttgtctcggattcaaacaacaggaggcacggcaaatacgcagactctgggcttcagccaaggtgggcctaatacaatggccaatcaggcaaagaactggctgccaggaccctgttaccgccaacaacgcgtctcaacgacaaccgggcaaaacaacaatagcaactttgcctggactgctgggaccaaataccatctgaatggaagaaattcattggctaatcctggcatcgctatggcaacacacaaagacgacgaggagcgtttttttcccagtaacgggatcctgatttttggcaaacaaaatgctgccagagacaatgcggattacagcgatgtcatgcccaccagcgaggaagaaatcaaaaccactaaccctgtggccacagaggaatacggtatcgtggcagataacttgcagcagcaaaacacggctcctcaaattggaactgtcaacagccagggggccttacccggtatggtctggcagaaccgggacgtgtacctgcagggtcccatctgggccaagattcctcacacggacggcaacttccacccgtctccgctgatgggcggctttggcctgaaacatcctccgcctcagatcctgatcaagaacacgcctgtacctgcggatcctccgaccaccttcaaccagtcaaagctgaactctttcatcacgcaatacagcaccggacaggtcagcgtggaaattgaatgggagctgcagaaggaaaacagcaagcgctggaaccccgagatccagtacacctccaactactacaaatctacaagtgtggactttgctgttaatacagaaggcgtgtactctgaaccccgccccattggcacccgttacctcacccgtaatctgtaa

SEQ ID NO: 3861 - DNA, 2217 bp, synthetic construct
  misc_feature 1..2217: note = source = /note="Description of Artificial Sequence: Synthetic polynucleotide"
  source 1..2217: mol_type = other DNA
atggctgccgatggttatcttccagattggctcgaggacaacctctctgagggcattcgcgagtggtgggcgctgaaacctggagccccgaagcccaaagccaaccagcaaaagcaggacgacggccggggtctggtgcttcctggctacaagtacctcggacccttcaacggactcgacaagggggagcccgtcaacgcggcggacgcggcggccctcgagcacgacaaggcctacgaccagcagctgcaggcgggtgacaatccgtacctgcggtataaccacgccgacgccgagtttcaggagcgtctgcaagaagatacgtcttttgggggcaacctcgggcgagcagtcttccaggccaagaagcgggttctcgaacctctcggtctggttgaggaaggcgctaagacggctcctggaaagaagagaccggtagagccatcaccccagcgttctccagactcctctacgggcatcggcaagaagggccaacagcccgccagaaaaagactcaattttggtcagactggcgactcagagtcagttccagaccctcaacctctcggagaacctccagcagcgccctctggtgtgggacctaatacaatggctgcaggcggtggcgcaccaatggcagacaataacgaaggcgccgacggagtgggtagttcctcgggaaattggcattgcgattccacatggctgggcgacagagtcatcaccaccagcacccgaacctgggccctgcccacctacaacaaccacctctacaagcaaatctccaacgggacatcgggaggagccaccaacgacaacacctacttcggctacagcaccccctgggggtattttgactttaacagattccactgccacttttcaccacgtgactggcagcgactcatcaacaacaactggggattccggcccaagagactcagcttcaagctcttcaacatccaggtcaaggaggtcacgcagaatgaaggcaccaagaccatcgccaataacctcaccagcaccatccaggtgtttacggactcggagtaccagctgccgtacgttctcggctctgcccaccagggctgcctgcctccgttcccggcggacgtgttcacgattccccagtacggctacctaacactcaacaacggtagtcaggccgtgggacgctcctccttctactgcctggaatactttccttcgcagatgctgagaaccggcaacaacttccagtttacttacaccttcgaggacgtgcctttccacagcagctacgcccacagccagagcttggaccggctgatgaatcctctgattgaccagtacctgtactacttgtctcggattcaaacaacaggaggcacggcaaatacgcagactctgggcttcagccaaggtgggcctaatacaatggccaatcaggcaaagaactggctgccaggaccctgttaccgccaacaacgcgtctcaacgacaaccgggcaaaacaacaatagcaactttgcctggactgctgggaccaaataccatctgaatggaagaaattcattggctaatcctggcatcgctatggcaacacacaaagacgacgaggagcgtttttttcccagtaacgggatcctgatttttggcaaacaaaatgctgccagagacaatgcggattacagcgatgtcatgcccaccagcgaggaagaaatcaaaaccactaaccctgtggccacaggggaatacggtatcgtggcagataacttgcagcagcaaaacacggctcctcaaattggaactgtcaacagccagggggccttacccggtatggtctggcagaaccgggacgtgtacctgcagggtcccatctgggccaagattcctcacacggacggcaacttccacccgtctccgctgatgggcggctttggcctgaaacatcctccgcctcagatcctgatcaagaacacgcctgtacctgcggatcctccgaccaccttcaaccagtcaaagctgaactctttcatcacgcaatacagcaccggacaggtcagcgtggaaattgaatgggagctgcagaaggaaaacagcaagcgctggaaccccgagatccagtacacctccaactactacaaatctacaagtgtggactttgctgttaatacagaaggcgtgtactctgaaccccgccccattggcacccgttacctcacccgtaatctgtaa

SEQ ID NO: 3862 - DNA, 2217 bp, synthetic construct
  misc_feature 1..2217: note = source = /note="Description of Artificial Sequence: Synthetic polynucleotide"
  source 1..2217: mol_type = other DNA
atggctgccgatggttatcttccagattggctcgaggacaacctctctgagggcattcgcgagtggtgggcgctgaaacctggagccccgaagcccaaagccaaccagcaaaagcaggacgacggccggggtctggtgcttcctggctacaagtacctcggacccttcaacggactcgacaagggggagcccgtcaacgcggcggacgcggcggccctcgagcacgacaaggcctacgaccagcagctgcaggcgggtgacaatccgtacctgcggtataaccacgccgacgccgagtttcaggagcgtctgcaagaagatacgtcttttgggggcaacctcgggcgagcagtcttccaggccaagaagcgggttctcgaacctctcggtctggttgaggaaggcgctaagacggctcctggaaagaagagaccggtagagccatcaccccagcgttctccagactcctctacgggcatcggcaagaagggccaacagcccgccagaaaaagactcaattttggtcagactggcgactcagagtcagttccagaccctcaacctctcggagaacctccagcagcgccctctggtgtgggacctaatacaatggctgcaggcggtggcgcaccaatggcagacaataacgaaggcgccgacggagtgggtagttcctcgggaaattggcattgcgattccacatggctgggcgacagagtcatcaccaccagcacccgaacctgggccctgcccacccacaacaaccacctctacaagcaaatctccaacgggacatcgggaggagccaccaacgacaacacctacttcggctacagcaccccctgggggtattttgactttaacagattccactgccacttttcaccacgtgactggcagcgactcatcaacaacaactggggattccggcccaagagactcagcttcaagctcttcaacatccaggtcaaggaggtcacgcagaatgaaggcaccaagaccatcgccaataacctcaccagcaccatccaggtgtttacggactcggagtaccagctgccgtacgttctcggctctgcccaccagggctgcctgcctccgttcccggcggacgtgttcacgattccccagtacggctacctaacactcaacaacggtagtcaggccgtgggacgctcctccttctactgcctggaatactttccttcgcagatgctgagaaccggcaacaacttccagtttacttacaccttcgaggacgtgcctttccacagcagctacgcccacagccagagcttggaccggctgatgaatcctctgattgaccagtacctgtactacttgtctcggattcaaacaacaggaggcacggcaaatacgcagactctgggcttcagccaaggtgggcctaatacaatggccaatcaggcaaagaactggctgccaggaccctgttaccgccaacaacgcgtctcaacgacaaccgggcaaaacaacaatagcaactttgcctggactgctgggaccaaataccatctgaatggaagaaattcattggctaatcctggcatcgctatggcaacacacaaagacgacgaggagcgtttttttcccagtaacgggatcctgatttttggcaaacaaaatgctgccagagacaatgcggattacagcgatgtcatgcccaccagcgaggaagaaatcaaaaccactaaccctgtggccacagaggaatacggtatcgtggcagataacttgcagcagcaaaacacggctcctcaaattggaactgtcaacagccagggggccttacccggtatggtctggcagaaccgggacgtgtacctgcagggtcccatctgggccaagattcctcacacggacggcaacttccacccgtctccgctgatgggcggctttggcctgaaacatcctccgcctcagatcctgatcaagaacacgcctgtacctgcggatcctccgaccaccttcaaccagtcaaagctgaactctttcatcacgcaatacagcaccggacaggtcagcgtggaaattgaatgggagctgcagaaggaaaacagcaagcgctggaaccccgagatccagtacacctccaactactacaaatctacaagtgtggactttgctgttaatacagaaggcgtgtactctgaaccccgccccattggcacccgttacctcacccgtaatctgtaa

SEQ ID NO: 3863 - DNA, 2217 bp, synthetic construct
  misc_feature 1..2217: note = source = /note="Description of Artificial Sequence: Synthetic polynucleotide"
  source 1..2217: mol_type = other DNA
atggctgccgatggttatcttccagattggctcgaggacaacctctctgagggcattcgcgagtggtgggcgctgaaacctggagccccgaagcccaaagccaaccagcaaaagcaggacgacggccggggtctggtgcttcctggctacaagtacctcggacccttcaacggactcgacaagggggagcccgtcaacgcggcggacgcggcggccctcgagcacgacaaggcctacgaccagcagctgcaggcgggtgacaatccgtacctgcggtataaccacgccgacgccgagtttcaggagcgtctgcaagaagatacgtcttttgggggcaacctcgggcgagcagtcttccaggccaagaagcgggttctcgaacctctcggtctggttgaggaaggcgctaagacggctcctggaaagaagagaccggtagagccatcaccccagcgttctccagactcctctacgggcatcggcaagaagggccaacagcccgccagaaaaagactcaattttggtcagactggcgactcagagtcagttccagaccctcaacctctcggagaacctccagcagcgccctctggtgtgggacctaatacaatggctgcaggcggtggcgcaccaatggcagacaataacgaaggcgccgacggagtgggtagttcctcgggaaattggcattgcgattccacatggctgggcgacagagtcatcaccaccagcacccgaacctgggccctgcccacctacaacaaccacctctacaagcaaatctccaacgggacatcgggaggagccaccaacgacaacacctacttcggctacagcaccccctgggggtattttgactttaacagattccactgccacttttcaccacgtgactggcagcgactcatcaacaacaactggggattccggcccaagagactcagcttcaagctcttcaacatccaggtcaaggaggtcacgcagaatgaaggcaccaagaccatcgccaataacctcaccagcaccatccaggtgtttacggactcggagtaccagctgccgtacgttctcggctctgcccaccagggctgcctgcctccgttcccggcggacgtgttcacgattccccagtacggctacctaacactcaacaacggtagtcaggccgtgggacgctcctccttctactgcctggaatactttccttcgcagatgctgagaaccggcaacaacttccagtttacttacaccttcgaggacgtgcctttccacagcagctacgcccacagccagagcttggaccggctgatgaatcctctgattgaccagtacctgtactacttgtctcggattcaaacaacaggaggcacggcaaatacgcagactctgggcttcagccaaggtgggcctaatacaatggccaatcaggcaaagaactggctgccaggaccctgttaccgccaacaacgcgtctcaacgacaaccgggcaaaacaacaatagcaactttgcctggactgctgggaccaaataccatctgaatggaagaaattcattggctaatcctggcatcgctatggcaacacacaaagacgacgaggagcgtttttttcccagtaacgggatcctgatttttggcaaacaaaatgctgccatagacaatgcggattacagcgatgtcatgcccaccagcgaggaagaaatcaaaaccactaaccctgtggccacagaggaatacggtatcgtggcagataacttgcagcagcaaaacacggctcctcaaattggaactgtcaacagccagggggccttacccggtatggtctggcagaaccgggacgtgtacctgcagggtcccatctgggccaagattcctcacacggacggcaacttccacccgtctccgctgatgggcggctttggcctgaaacatcctccgcctcagatcctgatcaagaacacgcctgtacctgcggatcctccgaccaccttcaaccagtcaaagctgaactctttcatcacgcaatacagcaccggacaggtcagcgtggaaattgaatgggagctgcagaaggaaaacagcaagcgctggaaccccgagatccagtacacctccaactactacaaatctacaagtgtggactttgctgttaatacagaaggcgtgtactctgaaccccgccccattggcacccgttacctcacccgtaatctgtaa

SEQ ID NO: 3864 - DNA, 2217 bp, synthetic construct
  misc_feature 1..2217: note = source = /note="Description of Artificial Sequence: Synthetic polynucleotide"
  source 1..2217: mol_type = other DNA
atggctgccgatggttatcttccagattggctcgaggacaacctctctgagggcattcgcgagtggtgggcgctgaaacctggagccccgaagcccaaagccaaccagcaaaagcaggacgacggccggggtctggtgcttcctggctacaagtacctcggacccttcaacggactcgacaagggggagcccgtcaacgcggcggacgcggcggccctcgagcacgacaaggcctacgaccagcagctgcaggcgggtgacaatccgtacctgcggtataaccacgccgacgccgagtttcaggagcgtctgcaagaagatacgtcttttgggggcaacctcgggcgagcagtcttccaggccaagaagcgggttctcgaacctctcggtctggttgaggaaggcgctaagacggctcctggaaagaagagaccggtagagccatcaccccagcgttctccagactcctctacgggcatcggcaagaagggccaacagcccgccagaaaaagactcaattttggtcagactggcgactcagagtcagttccagaccctcaacctctcggagaacctccagcagcgccctctggtgtgggacctaatacaatggctgcaggcggtggcgcaccaatggcagacaataacgaaggcgccgacggagtgggtagttcctcgggaaattggcattgcgattccacatggctgggcgacagagtcatcaccaccagcacccgaacctgggccctgcccacctacaacaaccacctctacaagcaaatctccaacgggacatcgggaggagccaccaacgacaacacctacttcggctacagcaccccctgggggtattttgactttaacagattccactgccacttttcaccacgtgactggcagcgactcatcaacaacaactggggattccggcccaagagactcagcttcaagctcttcaacatccaggtcaaggaggtcacgcagaatgaaggcaccaagaccatcgccaataacctcaccagcaccatccaggtgtttacggactcggagtaccagctgccgtacgttctcggctctgcccaccagggctgcctgcctccgttcccggcggacgtgttcacgattccccagtacggctacctaacactcaacaacggtagtcaggccgtgggacgctcctccttctactgcctggaatactttccttcgcagatgctgagaaccggcaacaacttccagtttacttacaccttcgaggacgtgcctttccacagcagctacgcccacagccagagcttggaccggctgatgaatcctctgattgaccagtacctgtactacttgtctcggattcaaacaacaggaggcacggcaaatacgcagactctgggcttcagccaaggtgggcctaatacaatggccaatcaggcaaagaactggctgccaggaccctgttaccgccaacaacgcgtctcaacgacaaccgggcaaaacaacaatagcaactttgcctggactgctgggaccaaataccatctgaatggaagaaattcattggctaatcctggcatcgctatggcaacacacaaagacgacgaggggcgtttttttcccagtaacgggatcctgatttttggcaaacaaaatgctgccagagacaatgcggattacagcgatgtcatgcccaccagcgaggaagaaatcaaaaccactaaccctgtggccacagaggaatacggtatcgtggcagataacttgcagcagcaaaacacggctcctcaaattggaactgtcaacagccagggggccttacccggtatggtctggcagaaccgggacgtgtacctgcagggtcccatctgggccaagattcctcacacggacggcaacttccacccgtctccgctgatgggcggctttggcctgaaacatcctccgcctcagatcctgatcaagaacacgcctgtacctgcggatcctccgaccaccttcaaccagtcaaagctgaactctttcatcacgcaatacagcaccggacaggtcagcgtggaaattgaatgggagctgcagaaggaaaacagcaagcgctggaaccccgagatccagtacacctccaactactacaaatctacaagtgtggactttgctgttaatacagaaggcgtgtactctgaaccccgccccattggcacccgttacctcacccgtaatctgtaa

SEQ ID NO: 3865 - DNA, 2217 bp, synthetic construct
  misc_feature 1..2217: note = source = /note="Description of Artificial Sequence: Synthetic polynucleotide"
  source 1..2217: mol_type = other DNA
atggctgccgatggttatcttccagattggctcgaggacaacctctctgagggcattcgcgagtggtgggcgctgaaacctggagccccgaagcccaaagccaaccagcaaaagcaggacgacggccggggtctggtgcttcctggctacaagtacctcggacccttcaacggactcgacaagggggagcccgtcaacgcggcggacgcggcggccctcgagcacgacaaggcctacgaccagcagctgcaggcgggtgacaatccgtacctgcggtataaccacgccgacgccgagtttcaggagcgtctgcaagaagatacgtcttttgggggcaacctcgggcgagcagtcttccaggccaagaagcgggttctcgaacctctcggtctggttgaggaaggcgctaagacggctcctggaaagaagagaccggtagagccatcaccccagcgttctccagactcctctacgggcatcggcaagaagggccaacagcccgccagaaaaagactcaattttggtcagactggcgactcagagtcagttccagaccctcaacctctcggagaacctccagcagcgccctctggtgtgggacctaatacaatggctgcaggcggtggcgcaccaatggcagacaataacgaaggcgccgacggagtgggtagttcctcgggaaattggcattgcgattccacatggctgggcgacagagtcatcaccaccagcacccgaacctgggccctgcccacctacaacaaccacctctacaagcaaatctccaacgggacatcgggaggagccaccaacgacaacacctacttcggctacagcaccccctgggggtattttgactttaacagattccactgccacttttcaccacgtgactggcagcgactcatcaacaacaactggggattccggaccaagagactcagcttcaagctcttcaacatccaggtcaaggaggtcacgcagaatgaaggcaccaagaccatcgccaataacctcaccagcaccatccaggtgtttacggactcggagtaccagctgccgtacgttctcggctctgcccaccagggctgcctgcctccgttcccggcggacgtgttcacgattccccagtacggctacctaacactcaacaacggtagtcaggccgtgggacgctcctccttctactgcctggaatactttccttcgcagatgctgagaaccggcaacaacttccagtttacttacaccttcgaggacgtgcctttccacagcagctacgcccacagccagagcttggaccggctgatgaatcctctgattgaccagtacctgtactacttgtctcggattcaaacaacaggaggcacggcaaatacgcagactctgggcttcagccaaggtgggcctaatacaatggccaatcaggcaaagaactggctgccaggaccctgttaccgccaacaacgcgtctcaacgacaaccgggcaaaacaacaatagcaactttgcctggactgctgggaccaaataccatctgaatggaagaaattcattggctaatcctggcatcgctatggcaacacacaaagacgacgaggagcgtttttttcccagtaacgggatcctgatttttggcaaacaaaatgctgccagagacaatgcggattacagcgatgtcatgcccaccagcgaggaagaaatcaaaaccactaaccctgtggccacagaggaatacggtatcgtggcagataacttgcagcagcaaaacacggctcctcaaattggaactgtcaacagccagggggccttacccggtatggtctggcagaaccgggacgtgtacctgcagggtcccatctgggccaagattcctcacacggacggcaacttccacccgtctccgctgatgggcggctttggcctgaaacatcctccgcctcagatcctgatcaagaacacgcctgtacctgcggatcctccgaccaccttcaaccagtcaaagctgaactctttcatcacgcaatacagcaccggacaggtcagcgtggaaattgaatgggagctgcagaaggaaaacagcaagcgctggaaccccgagatccagtacacctccaactactacaaatctacaagtgtggactttgctgttaatacagaaggcgtgtactctgaaccccgccccattggcacccgttacctcacccgtaatctgtaa

SEQ ID NO: 3866 - DNA, 2217 bp, synthetic construct
  misc_feature 1..2217: note = source = /note="Description of Artificial Sequence: Synthetic polynucleotide"
  source 1..2217: mol_type = other DNA
atggctgccgatggttatcttccagattggctcgaggacaacctctctgagggcattcgcgagtggtgggcgctgaaacctggagccccgaagcccaaagccaaccagcaaaagcaggacgacggccggggtctggtgcttcctggctacaagtacctcggacccttcaacggactcgacaagggggagcccgtcaacgcggcggacgcggcggccctcgagcacgacaaggcctacgaccagcagctgcaggcgggtgacaatccgtacctgcggtataaccacgccgacgccgagtttcaggagcgtctgcaagaagatacgtcttttgggggcaacctcgggcgagcagtcttccaggccaagaagcgggttctcgaacctctcggtctggttgaggaaggcgctaagacggctcctggaaagaagagaccggtagagccatcaccccagcgttctccagactcctctacgggcatcggcaagaagggccaacagcccgccagaaaaagactcaattttggtcagactggcgactcagagtcagttccagaccctcaacctctcggagaacctccagcagcgccctctggtgtgggacctaatacaatggctgcaggcggtggcgcaccaatggcagacaataacgaaggcgccgacggagtgggtagttcctcgggaaattggcattgcgattccacatggctgggcgacagagtcatcaccaccagcacccgaacctgggccctgcccacctacaacaaccacctctacaagcaaatctccaacgggacatcgggaggagccaccaacgacaacacctacttcggctacagcaccccctgggggtattttgactttaacagattccactgccacttttcaccacgtgactggcagcgactcatcaacaacaactggggattccggcccaagagactcagcttcaagctcttcaacatccaggtcaaggaggtcacgcagaatgaaggcaccaagaccatcgccaataacctcaccagcaccatccaggtgtttacggactcggagtaccagctgccgtacgttctcggctctgcccaccagggctgcctgcctccgttcccggcggacgtgttcacgattccccagtacggctacctaacactcaacaacggtagtcaggccgtgggacgctcctccttctactgcctggaatactttccttcgcagatgctgagaaccggcaacaacttccagtttacttacaccttcgaggacgtgcctttccacagcagctacgcccacagccagagcttggaccggctgatgaatcctctgattgaccagtacctgtactacttgtctcggattcaaacaacaggaggcacggcaaatacgcagactctgggcttcagccaaggtgggcctaatacaatggccaatcaggcaaagaactggctgccaggaccctgttaccgccaacaacgcgtctcaacgacaaccgggcaaaacaacaatagcaactttgcctggactgctgggaccaaataccatctgaatggaagaaattcattggctaatcctggcatcgctatggcaacacacaaagacgacgaggagcgtttttttcccagtaacgggatcctgatttttggcaaacaaaatgctgccagagacaatgcggattacagcgatgtcatgcccaccagcgaggaagaaatcaaaaccactaaccctgtggccacagaggaatacggtatcgtggcagataacttgcagcagcaaaacacggctcctcaaattggaactgtcaacagccagggggccttacccggtatggtctggcagaaccgggacgtgtacctgcagggtcccatctgggccaagattcctcacacggacggcaacttccacccgtctccgctgatgggcggctttggcctgaaacatcctccgcctcagatcctgatcaagaacacgcctgtacctgcggatcctccgaccaccttcaaccagtcaaagctgaactctttcatcacgcaatgcagcaccggacaggtcagcgtggaaattgaatgggagctgcagaaggaaaacagcaagcgctggaaccccgagatccagtacacctccaactactacaaatctacaagtgtggactttgctgttaatacagaaggcgtgtactctgaaccccgccccattggcacccgttacctcacccgtaatctgtaa

SEQ ID NO: 3867 - DNA, 2217 bp, synthetic construct
  misc_feature 1..2217: note = source = /note="Description of Artificial Sequence: Synthetic polynucleotide"
  source 1..2217: mol_type = other DNA
atggctgccgatggttatcttccagattggctcgaggacaacctctctgagggcattcgcgagtggtgggcgctgaaacctggagccccgaagcccaaagccaaccagcaaaagcaggacgacggccggggtctggtgcttcctggctacaagtacctcggacccttcaacggactcgacaagggggagcccgtcaacgcggcggacgcggcggccctcgagcacgacaaggcctacgaccagcagctgcaggcgggtgacaatccgtacctgcggtataaccacgccgacgccgagtttcaggagcgtctgcaagaagatacgtcttttgggggcaacctcgggcgagcagtcttccaggccaagaagcgggttctcgaacctctcggtctggttgaggaaggcgctaagacggctcctggaaagaagagaccggtagagccatcaccccagcgttctccagactcctctacgggcatcggcaagaagggccaacagcccgccagaaaaagactcaattttggtcagactggcgactcagagtcagttccagaccctcaacctctcggagaacctccagcagcgccctctggtgtgggacctaatacaatggctgcaggcggtggcgcaccaatggcagacaataacgaaggcgccgacggagtgggtagttcctcgggaaattggcattgcgattccacatggctgggcgacagagtcatcaccaccagcacccgaacctgggccctgcccacctacaacaaccacctctacaagcaaatctccaacgggacatcgggaggagccaccaacgacaacacctacttcggctacagcaccccctgggggtattttgactttaacagattccactgccacttttcaccacgtgactggcagcgactcatcaacaacaactggggattccggcccaagagactcagcttcaagctcttcaacatccaggtcaaggaggtcacgcagaatgaaggcaccaagaccatcgccaataacctcaccagcaccatccaggtgtttacggactcggagtaccagctgccgtacgttctcggctctgcccaccagggctgcctgcctccgttcccggcggacgtgttcacgattccccagtacggctacctaacactcaacaacggtagtcaggccgtgggacgctcctccttctactgcctggaatactttccttcgcagatgctgagaaccggcaacaacttccagtttacttacaccttcgaggacgtgcctttccgcagcagctacgcccacagccagagcttggaccggctgatgaatcctctgattgaccagtacctgtactacttgtctcggattcaaacaacaggaggcacggcaaatacgcagactctgggcttcagccaaggtgggcctaatacaatggccaatcaggcaaagaactggctgccaggaccctgttaccgccaacaacgcgtctcaacgacaaccgggcaaaacaacaatagcaactttgcctggactgctgggaccaaataccatctgaatggaagaaattcattggctaatcctggcatcgctatggcaacacacaaagacgacgaggagcgtttttttcccagtaacgggatcctgatttttggcaaacaaaatgctgccagagacaatgcggattacagcgatgtcatgcccaccagcgaggaagaaatcaaaaccactaaccctgtggccacagaggaatacggtatcgtggcagataacttgcagcagcaaaacacggctcctcaaattggaactgtcaacagccagggggccttacccggtatggtctggcagaaccgggacgtgtacctgcagggtcccatctgggccaagattcctcacacggacggcaacttccacccgtctccgctgatgggcggctttggcctgaaacatcctccgcctcagatcctgatcaagaacacgcctgtacctgcggatcctccgaccaccttcaaccagtcaaagctgaactctttcatcacgcaatacagcaccggacaggtcagcgtggaaattgaatgggagctgcagaaggaaaacagcaagcgctggaaccccgagatccagtacacctccaactactacaaatctacaagtgtggactttgctgttaatacagaaggcgtgtactctgaaccccgccccattggcacccgttacctcacccgtaatctgtaa

SEQ ID NO: 3868 - DNA, 2217 bp, synthetic construct
  misc_feature 1..2217: note = source = /note="Description of Artificial Sequence: Synthetic polynucleotide"
  source 1..2217: mol_type = other DNA
atggctgccgatggttatcttccagattggctcgaggacaacctctctgagggcattcgcgagtggtgggcgctgaaacctggagccccgaagcccaaagccaaccagcaaaagcaggacgacggccggggtctggtgcttcctggctacaagcacctcggacccttcaacggactcgacaagggggagcccgtcaacgcggcggacgcggcggccctcgagcacgacaaggcctacgaccagcagctgcaggcgggtgacaatccgtacctgcggtataaccacgccgacgccgagtttcaggagcgtctgcaagaagatacgtcttttgggggcaacctcgggcgagcagtcttccaggccaagaagcgggttctcgaacctctcggtctggttgaggaaggcgctaagacggctcctggaaagaagagaccggtagagccatcaccccagcgttctccagactcctctacgggcatcggcaagaagggccaacagcccgccagaaaaagactcaattttggtcagactggcgactcagagtcagttccagaccctcaacctctcggagaacctccagcagcgccctctggtgtgggacctaatacaatggctgcaggcggtggcgcaccaatggcagacaataacgaaggcgccgacggagtgggtagttcctcgggaaattggcattgcgattccacatggctgggcgacagagtcatcaccaccagcacccgaacctgggccctgcccacctacaacaaccacctctacaagcaaatctccaacgggacatcgggaggagccaccaacgacaacacctacttcggctacagcaccccctgggggtattttgactttaacagattccactgccacttttcaccacgtgactggcagcgactcatcaacaacaactggggattccggcccaagagactcagcttcaagctcttcaacatccaggtcaaggaggtcacgcagaatgaaggcaccaagaccatcgccaataacctcaccagcaccatccaggtgtttacggactcggagtaccagctgccgtacgttctcggctctgcccaccagggctgcctgcctccgttcccggcggacgtgttcacgattccccagtacggctacctaacactcaacaacggtagtcaggccgtgggacgctcctccttctactgcctggaatactttccttcgcagatgctgagaaccggcaacaacttccagtttacttacaccttcgaggacgtgcctttccacagcagctacgcccacagccagagcttggaccggctgatgaatcctctgattgaccagtacctgtactacttgtctcggattcaaacaacaggaggcacggcaaatacgcagactctgggcttcagccaaggtgggcctaatacaatggccaatcaggcaaagaactggctgccaggaccctgttaccgccaacaacgcgtctcaacgacaaccgggcaaaacaacaatagcaactttgcctggactgctgggaccaaataccatctgaatggaagaaattcattggctaatcctggcatcgctatggcaacacacaaagacgacgaggagcgtttttttcccagtaacgggatcctgatttttggcaaacaaaatgctgccagagacaatgcggattacagcgatgtcatgcccaccagcgaggaagaaatcaaaaccactaaccctgtggccacagaggaatacggtatcgtggcagataacttgcagcagcaaaacacggctcctcaaattggaactgtcaacagccagggggccttacccggtatggtctggcagaaccgggacgtgtacctgcagggtcccatctgggccaagattcctcacacggacggcaacttccacccgtctccgctgatgggcggctttggcctgaaacatcctccgcctcagatcctgatcaagaacacgcctgtacctgcggatcctccgaccaccttcaaccagtcaaagctgaactctttcatcacgcaatacagcaccggacaggtcagcgtggaaattgaatgggagctgcagaaggaaaacagcaagcgctggaaccccgagatccagtacacctccaactactacaaatctacaagtgtggactttgctgttaatacagaaggcgtgtactctgaaccccgccccattggcacccgttacctcacccgtaatctgtaa

SEQ ID NO: 3869 - DNA, 2217 bp, synthetic construct
  misc_feature 1..2217: note = source = /note="Description of Artificial Sequence: Synthetic polynucleotide"
  source 1..2217: mol_type = other DNA
atggctgccgatggttatcttccagattggctcgaggacaacctctctgagggcattcgcgagtggtgggcgctgaaacctggagccccgaagcccaaagccaaccagcaaaagcaggacgacggccggggtctggtgcttcctggctacaagtacctcggacccttcaacggactcgacaagggggagcccgtcaacgcggcggacgcggcggccctcgagcacgacaaggcctacgaccagcagctgcaggcgggtgacaatccgtacctgcggtataaccacgccgacgccgagtttcaggagcgtctgcaagaagatacgtcttttgggggcaacctcgggcgagcagtcttccaggccaagaagcgggttctcgaacctctcggtctggttgaggaaggcgctaagacggctcctggaaagaagagaccggtagagccatcaccccagcgttctccagactcctctacgggcatcggcaagaagggccaacagcccgccagaaaaagactcaattttggtcagactggcgactcagagtcagttccagaccctcaacctctcggagaacctccagcagcgccctctggtgtgggacctaatacaatggctgcaggcggtggcgcaccaatggcagacaataacgaaggcgccgacggagtgggtagttcctcgggaaattggcattgcgattccacatggctgggcgacagagtcatcaccaccagcacccgaacctgggccctgcccacctacaacaaccacctctacaagcaaatctccaacgggacatcgggaggagccaccaacgacaacacctacttcggctacagcaccccctgggggtattttgactttaacagattccactgccacttttcaccacgtgactggcagcgactcatcaacaacaactggggattccggcccaagagactcagcttcaagctcttcaacatccaggtcaaggaggtcacgcagaatgaaggcaccaagaccatcgccaataacctcaccagcaccatccaggtgtttacggactcggagtaccagctgccgtacgttctcggctctgcccaccagggctgcctgcctccgttcccggcggacgtgttcacgattccccagtacggctacctaacactcaacaacggtagtcaggccgtgggacgctcctccttctactgcctggaatactttccttcgcagatgctgagaaccggcaacaacttccagtttacttacaccttcgaggacgtgcctttccacagcagctacgcccacagccagagcttggaccggctgatgaatcctctgattgaccagtacctgtactacttgtctcggattcaaacaacaggaggcacggcaaatacgcagactctgggcttcagccaaggtgggcctaatacaatggccaatcaggcaaagaactggctgccaggaccctgttaccgccaacaacgcgtctcagcgacaaccgggcaaaacaacaatagcaactttgcctggactgctgggaccaaataccatctgaatggaagaaattcattggctaatcctggcatcgctatggcaacacacaaagacgacgaggagcgtttttttcccagtaacgggatcctgatttttggcaaacaaaatgctgccagagacaatgcggattacagcgatgtcatgcccaccagcgaggaagaaatcaaaaccactaaccctgtggccacagaggaatacggtatcgtggcagataacttgcagcagcaaaacacggctcctcaaattggaactgtcaacagccagggggccttacccggtatggtctggcagaaccgggacgtgtacctgcagggtcccatctgggccaagattcctcacacggacggcaacttccacccgtctccgctgatgggcggctttggcctgaaacatcctccgcctcagatcctgatcaagaacacgcctgtacctgcggatcctccgaccaccttcaaccagtcaaagctgaactctttcatcacgcaatacagcaccggacaggtcagcgtggaaattgaatgggagctgcagaaggaaaacagcaagcgctggaaccccgagatccagtacacctccaactactacaaatctacaagtgtggactttgctgttaatacagaaggcgtgtactctgaaccccgccccattggcacccgttacctcacccgtaatctgtaa

SEQ ID NO: 3870 - DNA, 2217 bp, synthetic construct
  misc_feature 1..2217: note = source = /note="Description of Artificial Sequence: Synthetic polynucleotide"
  source 1..2217: mol_type = other DNA
atggctgccgatggttatcttccagattggctcgaggacaacctctctgagggcattcgcgagtggtgggcgctgaaacctggagccccgaagcccaaagccaaccagcaaaagcaggacgacggccggggtctggtgcttcctggctacaagtacctcggacccttcaacggactcgacaagggggagcccgtcaacgcggcggacgcggcggccctcgagcacgacaaggcctacgaccagcagctgcaggcgggtgacaatccgtacctgcggtataaccacgccgacgccgagtttcaggagcgtctgcaagaagatacgtcttttgggggcaacctcgggcgagcagtcttccaggccaagaagcgggttctcgaacctctcggtctggttgaggaaggcgctaagacggctcctggaaagaagagaccggtagagccatcaccccagcgttctccagactcctctacgggcatcggcaagaagggccaacagcccgccagaaaaagactcaattttggtcagactggcggctcagagtcagttccagaccctcaacctctcggagaacctccagcagcgccctctggtgtgggacctaatacaatggctgcaggcggtggcgcaccaatggcagacaataacgaaggcgccgacggagtgggtagttcctcgggaaattggcattgcgattccacatggctgggcgacagagtcatcaccaccagcacccgaacctgggccctgcccacctacaacaaccacctctacaagcaaatctccaacgggacatcgggaggagccaccaacgacaacacctacttcggctacagcaccccctgggggtattttgactttaacagattccactgccacttttcaccacgtgactggcagcgactcatcaacaacaactggggattccggcccaagagactcagcttcaagctcttcaacatccaggtcaaggaggtcacgcagaatgaaggcaccaagaccatcgccaataacctcaccagcaccatccaggtgtttacggactcggagtaccagctgccgtacgttctcggctctgcccaccagggctgcctgcctccgttcccggcggacgtgttcacgattccccagtacggctacctaacactcaacaacggtagtcaggccgtgggacgctcctccttctactgcctggaatactttccttcgcagatgctgagaaccggcaacaacttccagtttacttacaccttcgaggacgtgcctttccacagcagctacgcccacagccagagcttggaccggctgatgaatcctctgattgaccagtacctgtactacttgtctcggattcaaacaacaggaggcacggcaaatacgcagactctgggcttcagccaaggtgggcctaatacaatggccaatcaggcaaagaactggctgccaggaccctgttaccgccaacaacgcgtctcaacgacaaccgggcaaaacaacaatagcaactttgcctggactgctgggaccaaataccatctgaatggaagaaattcattggctaatcctggcatcgctatggcaacacacaaagacgacgaggagcgtttttttcccagtaacgggatcctgatttttggcaaacaaaatgctgccagagacaatgcggattacagcgatgtcatgcccaccagcgaggaagaaatcaaaaccactaaccctgtggccacagaggaatacggtatcgtggcagataacttgcagcagcaaaacacggctcctcaaattggaactgtcaacagccagggggccttacccggtatggtctggcagaaccgggacgtgtacctgcagggtcccatctgggccaagattcctcacacggacggcaacttccacccgtctccgctgatgggcggctttggcctgaaacatcctccgcctcagatcctgatcaagaacacgcctgtacctgcggatcctccgaccaccttcaaccagtcaaagctgaactctttcatcacgcaatacagcaccggacaggtcagcgtggaaattgaatgggagctgcagaaggaaaacagcaagcgctggaaccccgagatccagtacacctccaactactacaaatctacaagtgtggactttgctgttaatacagaaggcgtgtactctgaaccccgccccattggcacccgttacctcacccgtaatctgtaa

SEQ ID NO: 3871 - DNA, 2217 bp, synthetic construct
  misc_feature 1..2217: note = source = /note="Description of Artificial Sequence: Synthetic polynucleotide"
  source 1..2217: mol_type = other DNA
atggctgccgatggttatcttccagattggctcgaggacaacctctctgagggcattcgcgagtggtgggcgctgaaacctggagccccgaagcccaaagccaaccagcaaaagcaggacgacggccggggtctggtgcttcctggctacaagtacctcggacccttcaacggactcgacaagggggagcccgtcaacgcggcggacgcggcggccctcgagcacgacaaggcctacgaccagcagctgcaggcgggtgacaatccgtacctgcggtataaccacgccgacgccgagtttcaggagcgtctgcaagaagatacgtcttttgggggcaacctcgggcgagcagtcttccaggccaagaagcgggttctcgaacctctcggtctggttgaggaaggcgctaagacggctcctggaaagaagagaccggtagagccatcaccccagcgttctccagactcctctacgggcatcggcaagaagggccaacagcccgccagaaaaagactcaattttggtcagactggcgactcagagtcagttccagaccctcaacctctcggagaacctccagcagcgccctctggtgtgggacctaatacaatggctgcaggcggtggcgcaccaatggcagacaataacgaaggcgccgacggagtgggtagttcctcgggaaattggcattgcgattccgcatggctgggcgacagagtcatcaccaccagcacccgaacctgggccctgcccacctacaacaaccacctctacaagcaaatctccaacgggacatcgggaggagccaccaacgacaacacctacttcggctacagcaccccctgggggtattttgactttaacagattccactgccacttttcaccacgtgactggcagcgactcatcaacaacaactggggattccggcccaagagactcagcttcaagctcttcaacatccaggtcaaggaggtcacgcagaatgaaggcaccaagaccatcgccaataacctcaccagcaccatccaggtgtttacggactcggagtaccagctgccgtacgttctcggctctgcccaccagggctgcctgcctccgttcccggcggacgtgttcacgattccccagtacggctacctaacactcaacaacggtagtcaggccgtgggacgctcctccttctactgcctggaatactttccttcgcagatgctgagaaccggcaacaacttccagtttacttacaccttcgaggacgtgcctttccacagcagctacgcccacagccagagcttggaccggctgatgaatcctctgattgaccagtacctgtactacttgtctcggattcaaacaacaggaggcacggcaaatacgcagactctgggcttcagccaaggtgggcctaatacaatggccaatcaggcaaagaactggctgccaggaccctgttaccgccaacaacgcgtctcaacgacaaccgggcaaaacaacaatagcaactttgcctggactgctgggaccaaataccatctgaatggaagaaattcattggctaatcctggcatcgctatggcaacacacaaagacgacgaggagcgtttttttcccagtaacgggatcctgatttttggcaaacaaaatgctgccagagacaatgcggattacagcgatgtcatgcccaccagcgaggaagaaatcaaaaccactaaccctgtggccacagaggaatacggtatcgtggcagataacttgcagcagcaaaacacggctcctcaaattggaactgtcaacagccagggggccttacccggtatggtctggcagaaccgggacgtgtacctgcagggtcccatctgggccaagattcctcacacggacggcaacttccacccgtctccgctgatgggcggctttggcctgaaacatcctccgcctcagatcctgatcaagaacacgcctgtacctgcggatcctccgaccaccttcaaccagtcaaagctgaactctttcatcacgcaatacagcaccggacaggtcagcgtggaaattgaatgggagctgcagaaggaaaacagcaagcgctggaaccccgagatccagtacacctccaactactacaaatctacaagtgtggactttgctgttaatacagaaggcgtgtactctgaaccccgccccattggcacccgttacctcacccgtaatctgtaa

SEQ ID NO: 3872 - DNA, 2217 bp, synthetic construct
  misc_feature 1..2217: note = source = /note="Description of Artificial Sequence: Synthetic polynucleotide"
  source 1..2217: mol_type = other DNA
atggctgccgatggttatcttccagattggctcgaggacaacctctctgagggcattcgcgagtggtgggcgctgaaacctggagccccgaagcccaaagccaaccagcaaaagcaggacgacggccggggtctggtgcttcctggctacaagtacctcggacccttcaacggactcgacaagggggagcccgtcaacgcggcggacgcggcggccctcgagcacgacaaggcctacgaccagcagctgcaggcgggtgacaatccgtacctgcggtataaccacgccgacgccgagtttcaggagcgtctgcaagaagatacgtcttttgggggcaacctcgggcgagcagtcttccaggccaagaagcgggttctcgaacctctcggtctggttgaggaaggcgctaagacggctcctggaaagaagagaccggtagagccatcaccccagcgttctccagactcctctacgggcatcggcaagaagggccaacagcccgccagaaaaagactcaattttggtcagactggcgactcagagtcagttccagaccctcaacctctcggagaacctccagcagcgccctctggtgtgggacctaatacaatggctgcaggcggtggcgcaccaatggcagacaataacgaaggcgccgacggagtgggtagttcctcgggaaattggcattgcgattccacatggctgggcgacagagtcatcaccaccagcacccgaacctgggccctgcccacctacaacaaccacctctacaagcaaatctccaacgggacatcgggaggagccaccaacgacaacacctacttcggctacagcaccccctgggggtattttgactttaacagattccactgccacttttcaccacgtgactggcagcgactcatcaacaacaactggggattccggcccaagagactcagcttcaagctcttcaacatccaggtcaaggaggtcacgcagaatgaaggcaccaagaccatcgccaataacctcaccagcaccatccaggtgtttacggactcggagtaccagctgccgtacgttctcggctctgcccaccggggctgcctgcctccgttcccggcggacgtgttcacgattccccagtacggctacctaacactcaacaacggtagtcaggccgtgggacgctcctccttctactgcctggaatactttccttcgcagatgctgagaaccggcaacaacttccagtttacttacaccttcgaggacgtgcctttccacagcagctacgcccacagccagagcttggaccggctgatgaatcctctgattgaccagtacctgtactacttgtctcggattcaaacaacaggaggcacggcaaatacgcagactctgggcttcagccaaggtgggcctaatacaatggccaatcaggcaaagaactggctgccaggaccctgttaccgccaacaacgcgtctcaacgacaaccgggcaaaacaacaatagcaactttgcctggactgctgggaccaaataccatctgaatggaagaaattcattggctaatcctggcatcgctatggcaacacacaaagacgacgaggagcgtttttttcccagtaacgggatcctgatttttggcaaacaaaatgctgccagagacaatgcggattacagcgatgtcatgcccaccagcgaggaagaaatcaaaaccactaaccctgtggccacagaggaatacggtatcgtggcagataacttgcagcagcaaaacacggctcctcaaattggaactgtcaacagccagggggccttacccggtatggtctggcagaaccgggacgtgtacctgcagggtcccatctgggccaagattcctcacacggacggcaacttccacccgtctccgctgatgggcggctttggcctgaaacatcctccgcctcagatcctgatcaagaacacgcctgtacctgcggatcctccgaccaccttcaaccagtcaaagctgaactctttcatcacgcaatacagcaccggacaggtcagcgtggaaattgaatgggagctgcagaaggaaaacagcaagcgctggaaccccgagatccagtacacctccaactactacaaatctacaagtgtggactttgctgttaatacagaaggcgtgtactctgaaccccgccccattggcacccgttacctcacccgtaatctgtaa

SEQ ID NO: 3873 - DNA, 2217 bp, synthetic construct
  misc_feature 1..2217: note = source = /note="Description of Artificial Sequence: Synthetic polynucleotide"
  source 1..2217: mol_type = other DNA
atggctgccgatggttatcttccagattggctcgaggacaacctctctgagggcattcgcgagtggtgggcgctgaaacctggagccccgaagcccaaagccaaccagcaaaagcaggacgacggccggggtctggtgcttcctggctacaagtacctcggacccttcaacggactcgacaagggggagcccgtcaacgcggcggacgcggcggccctcgagcacgacaaggcctacgaccagcagctgcaggcgggtgacaatccgtacctgcggtataaccacgccgacgccgagtttcaggagcgtctgcaagaagatacgtcttttgggggcaacctcgggcgagcagtcttccaggccaagaagcgggttctcgaacctctcggtctggttgaggaaggcgctaagacggctcctggaaagaagagaccggtagagccatcaccccagcgttctccagactcctctacgggcatcggcaagaagggccaacagcccgccagaaaaagactcaattttggtcagactggcgactcagagtcagttccagaccctcaacctctcggagaacctccagcagcgccctctggtgtgggacctaatacaatggctgcaggcggtggcgcaccaatggcagacaataacgaaggcgccgacggagtgggtagttcctcgggaaattggcattgcgattccacatggctgggcgacagagtcatcaccaccagcacccgaacctgggccctgcccacctacaacaaccacctctacaagcaaatctccaacgggacatcgggaggagccaccaacgacaacacctacttcggctacagcaccccctgggggtattttgactttaacagattccactgccacttttcaccacgtgactggcagcgactcatcaacaacaactggggattccggcccaagagactcagcttcaagctcttcaacatccaggtcaaggaggtcacgcagaatgaaggcaccaagaccatcgccaataacctcaccagcaccatccaggtgtttacggactcggagtaccagctgccgtacgttctcggctctgcccaccagggctgcctgcctccgttcccggcggacgtgttcacgattccccagtacggctacctaacactcaacaacggtagtcaggccgtgggacgctcctccttctactgcctggaatactttccttcgcagatgctgagaaccggcaacaacttccagtttacttacaccttcgaggacgtgcctttccacagcagctacgcccacagccagagcttggaccggctgatgaatcctctgattgaccagtacctgtactacttgtctcggattcaaacaacaggaggcacggcaaatacgcagactctgggcttcagccaaggtgggcctaatacaatggccaatcaggcaaagaactggctgccaggaccctgttaccgccaacaacgcgtctcaacgacaaccgggcaaaacaacaatagcaactttgcctggactgctgggaccaaataccatctgaatggaagaaattcattggctaatcctggcatcgctatggcaacacacaaagacgacgaggagcgtttttttcccagtaacgggatcctgatttttggcaaacaaaatgctgccagagacaatgcggattacagcgatgtcatgcccaccagcgaggaagaaatcaaaaccactaaccctgtggccacagaggaatacggtatcgtggcagataacttgcagcagcaaaacacggctcctcaaattggaactgtcaacagccagggggccttacccggtatggtctggcagaaccgggacgtgtacctgcagggtcccatctgggccaagattcctcacacggacggcaacttccacccgtctccgctgatgggcggctttggcctgaaacatcctccgcctcagatcctgatcaagaacacgcctgtatctgcggatcctccgaccaccttcaaccagtcaaagctgaactctttcatcacgcaatacagcaccggacaggtcagcgtggaaattgaatgggagctgcagaaggaaaacagcaagcgctggaaccccgagatccagtacacctccaactactacaaatctacaagtgtggactttgctgttaatacagaaggcgtgtactctgaaccccgccccattggcacccgttacctcacccgtaatctgtaa

SEQ ID NO: 3874 - DNA, 2217 bp, synthetic construct
  misc_feature 1..2217: note = source = /note="Description of Artificial Sequence: Synthetic polynucleotide"
  source 1..2217: mol_type = other DNA
atggctgccgatggttatcttccagattggctcgaggacaacctctctgagggcattcgcgagtggtgggcgctgaaacctggagccccgaagcccaaagccaaccagcaaaagcaggacgacggccggggtctggtgcttcctggctacaggtacctcggacccttcaacggactcgacaagggggagcccgtcaacgcggcggacgcggcggccctcgagcacgacaaggcctacgaccagcagctgcaggcgggtgacaatccgtacctgcggtataaccacgccgacgccgagtttcaggagcgtctgcaagaagatacgtcttttgggggcaacctcgggcgagcagtcttccaggccaagaagcgggttctcgaacctctcggtctggttgaggaaggcgctaagacggctcctggaaagaagagaccggtagagccatcaccccagcgttctccagactcctctacgggcatcggcaagaagggccaacagcccgccagaaaaagactcaattttggtcagactggcgactcagagtcagttccagaccctcaacctctcggagaacctccagcagcgccctctggtgtgggacctaatacaatggctgcaggcggtggcgcaccaatggcagacaataacgaaggcgccgacggagtgggtagttcctcgggaaattggcattgcgattccacatggctgggcgacagagtcatcaccaccagcacccgaacctgggccctgcccacctacaacaaccacctctacaagcaaatctccaacgggacatcgggaggagccaccaacgacaacacctacttcggctacagcaccccctgggggtattttgactttaacagattccactgccacttttcaccacgtgactggcagcgactcatcaacaacaactggggattccggcccaagagactcagcttcaagctcttcaacatccaggtcaaggaggtcacgcagaatgaaggcaccaagaccatcgccaataacctcaccagcaccatccaggtgtttacggactcggagtaccagctgccgtacgttctcggctctgcccaccagggctgcctgcctccgttcccggcggacgtgttcacgattccccagtacggctacctaacactcaacaacggtagtcaggccgtgggacgctcctccttctactgcctggaatactttccttcgcagatgctgagaaccggcaacaacttccagtttacttacaccttcgaggacgtgcctttccacagcagctacgcccacagccagagcttggaccggctgatgaatcctctgattgaccagtacctgtactacttgtctcggattcaaacaacaggaggcacggcaaatacgcagactctgggcttcagccaaggtgggcctaatacaatggccaatcaggcaaagaactggctgccaggaccctgttaccgccaacaacgcgtctcaacgacaaccgggcaaaacaacaatagcaactttgcctggactgctgggaccaaataccatctgaatggaagaaattcattggctaatcctggcatcgctatggcaacacacaaagacgacgaggagcgtttttttcccagtaacgggatcctgatttttggcaaacaaaatgctgccagagacaatgcggattacagcgatgtcatgcccaccagcgaggaagaaatcaaaaccactaaccctgtggccacagaggaatacggtatcgtggcagataacttgcagcagcaaaacacggctcctcaaattggaactgtcaacagccagggggccttacccggtatggtctggcagaaccgggacgtgtacctgcagggtcccatctgggccaagattcctcacacggacggcaacttccacccgtctccgctgatgggcggctttggcctgaaacatcctccgcctcagatcctgatcaagaacacgcctgtacctgcggatcctccgaccaccttcaaccagtcaaagctgaactctttcatcacgcaatacagcactggacaggtcagcgtggaaattgaatgggagctgcagaaggaaaacagcaagcgctggaaccccgagatccagtacacctccaactactacaaatctacaagtgtggactttgctgttaatacagaaggcgtgtactctgaaccccgccccattggcacccgttacctcacccgtaatctgtaa

SEQ ID NO: 3875 - DNA, 2217 bp, synthetic construct
  misc_feature 1..2217: note = source = /note="Description of Artificial Sequence: Synthetic polynucleotide"
  source 1..2217: mol_type = other DNA
atggctgccgatggttatcttccagattggctcgaggacaacctctctgagggcattcgcgagtggtgggcgctgaaacctggagccccgaagcccaaagccaaccagcaaaagcaggacgacggccggggtctggtgcttcctggctacaagtacctcggacccttcaacggactcgacaagggggagcccgtcaacgcggcggacgcggcggccctcgagcacgacaaggcctacgaccagcagctgcaggcgggtgacaatccgtacctgcggtataaccacgccgacgccgagtttcaggagcgtctgcaagaagatacgtcttttgggggcaacctcgggcgagcagtcttccaggccaagaagcgggttctcgaacctctcggtctggttgaggaaggcgctaagacggctcctggaaagaagagaccggtagagccatcaccccagcgttctccagactcctctacgggcatcggcaagaagggccaacagcccgccagaaaaagactcaattttggtcagactggcgactcagagtcagttccagaccctcaacctctcggagaacctccagcagcgccctctggtgtgggacctaatacaatggctgcaggcggtggcgcaccaatggcagacaataacgaaggcgccgacggagtgggtagttcctcgggaaattggcattgcgattccacatggctgggcgacagagtcatcaccaccagcacccgaacctgggccctgcccacctacaacaaccacctctacaagcaaatctccaacgggacatcgggaggagccaccaacgacaacacctacttcggctacagcaccccctgggggtattttgactttaacagattccactgccacttttcaccacgtgactggcagcgactcatcaacaacaactggggattccggcccaagagactcagcttcaagctcttcaacatccaggtcaaggaggtcacgcagaatgaaggcaccaagaccatcgccaataacctcaccagcaccatccaggtgtttacggactcggagtaccagctgccgtacgttctcggctctgcccaccagggctgcctgcctccgttcccggcggacgtgttcacgattccccagtacggctacctaacactcaacaacggtagtcaggccgtgggacgctcctccttctactgcctggaatactttccttcgcagatgctgagaaccggcaacaacttccagtttacttacaccttcgaggacgtgcctttccacagcagctacgcccacagccagagcttggaccggctgatgaatcctctgattgaccagtacctgtactacttgtctcggattcaaacaacaggaggcacggcaaatacgcagactctgggcttcagccaaggtgggcctaatacaatggccaatcaggcaaagaactggctgccaggaccctgttaccgccaacaacgcgtctcaacgacaaccgggcaaaacaacaatagcaactttgcctggactgctgggaccaaataccgtctgaatggaagaaattcattggctaatcctggcatcgctatggcaacacacaaagacgacgaggagcgtttttttcccagtaacgggatcctgatttttggcaaacaaaatgctgccagagacaatgcggattacagcgatgtcatgcccaccagcgaggaagaaatcaaaaccactaaccctgtggccacagaggaatacggtatcgtggcagataacttgcagcagcaaaacacggctcctcaaattggaactgtcaacagccagggggccttacccggtatggtctggcagaaccgggacgtgtacctgcagggtcccatctgggccaagattcctcacacggacggcaacttccacccgtctccgctgatgggcggctttggcctgaaacatcctccgcctcagatcctgatcaagaacacgcctgtacctgcggatcctccgaccaccttcaaccagtcaaagctgaactctttcatcacgcaatacagcaccggacaggtcagcgtggaaattgaatgggagctgcagaaggaaaacagcaagcgctggaaccccgagatccagtacacctccaactactacaaatctacaagtgtggactttgctgttaatacagaaggcgtgtactctgaaccccgccccattggcacccgttacctcacccgtaatctgtaa

SEQ ID NO: 3876 - DNA, 2217 bp, synthetic construct
  misc_feature 1..2217: note = source = /note="Description of Artificial Sequence: Synthetic polynucleotide"
  source 1..2217: mol_type = other DNA
atggctgccgatggttatcttccagattggctcgaggacaacctctctgagggcattcgcgagtggtgggcgctgaaacctggagccccgaagcccaaagccaaccagcaaaagcaggacgacggccggggtctggtgcttcctggctacaagtacctcggacccttcaacggactcgacaagggggagcccgtcaacgcggcggacgcggcggccctcgagcacgacaaggcctacgaccagcagctgcaggcgggtgacaatccgtacctgcggtataaccacgccgacgccgagtttcaggagcgtctgcaagaagatacgtcttttgggggcaacctcgggcgagcagtcttccaggccaagaagcgggttctcgaacctctcggtctggttgaggaaggcgctaagacggctcctggaaagaagagaccggtagagccatcaccccagcgttctccagactcctctacgggcatcggcaagaagggccaacagcccgccagaaaaagactcaattttggtcagactggcgactcagagtcagctccagaccctcaacctctcggagaacctccagcagcgccctctggtgtgggacctaatacaatggctgcaggcggtggcgcaccaatggcagacaataacgaaggcgccgacggagtgggtagttcctcgggaaattggcattgcgattccacatggctgggcgacagagtcatcaccaccagcacccgaacctgggccctgcccacctacaacaaccacctctacaagcaaatctccaacgggacatcgggaggagccaccaacgacaacacctacttcggctacagcaccccctgggggtattttgactttaacagattccactgccacttttcaccacgtgactggcagcgactcatcaacaacaactggggattccggcccaagagactcagcttcaagctcttcaacatccaggtcaaggaggtcacgcagaatgaaggcaccaagaccatcgccaataacctcaccagcaccatccaggtgtttacggactcggagtaccagctgccgtacgttctcggctctgcccaccagggctgcctgcctccgttcccggcggacgtgttcacgattccccagtacggctacctaacactcaacaacggtagtcaggccgtgggacgctcctccttctactgcctggaatactttccttcgcagatgctgagaaccggcaacaacttccagtttacttacaccttcgaggacgtgcctttccacagcagctacgcccacagccagagcttggaccggctgatgaatcctctgattgaccagtacctgtactacttgtctcggattcaaacaacaggaggcacggcaaatacgcagactctgggcttcagccaaggtgggcctaatacaatggccaatcaggcaaagaactggctgccaggaccctgttaccgccaacaacgcgtctcaacgacaaccgggcaaaacaacaatagcaactttgcctggactgctgggaccaaataccatctgaatggaagaaattcattggctaatcctggcatcgctatggcaacacacaaagacgacgaggagcgtttttttcccagtaacgggatcctgatttttggcaaacaaaatgctgccagagacaatgcggattacagcgatgtcatgcccaccagcgaggaagaaatcaaaaccactaaccctgtggccacagaggaatacggtatcgtggcagataacttgcagcagcaaaacacggctcctcaaattggaactgtcaacagccagggggccttacccggtatggtctggcagaaccgggacgtgtacctgcagggtcccatctgggccaagattcctcacacggacggcaacttccacccgtctccgctgatgggcggctttggcctgaaacatcctccgcctcagatcctgatcaagaacacgcctgtacctgcggatcctccgaccaccttcaaccagtcaaagctgaactctttcatcacgcaatacagcaccggacaggtcagcgtggaaattgaatgggagctgcagaaggaaaacagcaagcgctggaaccccgagatccagtacacctccaactactacaaatctacaagtgtggactttgctgttaatacagaaggcgtgtactctgaaccccgccccattggcacccgttacctcacccgtaatctgtaa

SEQ ID NO: 3877 - DNA, 2217 bp, synthetic construct
  misc_feature 1..2217: note = source = /note="Description of Artificial Sequence: Synthetic polynucleotide"
  source 1..2217: mol_type = other DNA
atggctgccgatggttatcttccagattggctcgaggacaacctctctgagggcattcgcgagtggtgggcgctgaaacctggagccccgaagcccaaagccaaccagcaaaagcaggacgacggccggggtctggtgcttcctggctacaagtacctcggacccttcaacggactcgacaagggggagcccgtcaacgcggcggacgcggcggccctcgagcacgacaaggcctacgaccagcagctgcaggcgggtgacaatccgtacctgcggtataaccacgccgacgccgagtttcaggagcgtctgcaagaagatacgtcttttgggggcaacctcgggcgagcagtcttccaggccaagaagcgggttctcgaacctctcggtctggttgaggaaggcgctaagacggctcctggaaagaagagaccggtagagccatcaccccagcgttctccagacccctctacgggcatcggcaagaagggccaacagcccgccagaaaaagactcaattttggtcagactggcgactcagagtcagttccagaccctcaacctctcggagaacctccagcagcgccctctggtgtgggacctaatacaatggctgcaggcggtggcgcaccaatggcagacaataacgaaggcgccgacggagtgggtagttcctcgggaaattggcattgcgattccacatggctgggcgacagagtcatcaccaccagcacccgaacctgggccctgcccacctacaacaaccacctctacaagcaaatctccaacgggacatcgggaggagccaccaacgacaacacctacttcggctacagcaccccctgggggtattttgactttaacagattccactgccacttttcaccacgtgactggcagcgactcatcaacaacaactggggattccggcccaagagactcagcttcaagctcttcaacatccaggtcaaggaggtcacgcagaatgaaggcaccaagaccatcgccaataacctcaccagcaccatccaggtgtttacggactcggagtaccagctgccgtacgttctcggctctgcccaccagggctgcctgcctccgttcccggcggacgtgttcacgattccccagtacggctacctaacactcaacaacggtagtcaggccgtgggacgctcctccttctactgcctggaatactttccttcgcagatgctgagaaccggcaacaacttccagtttacttacaccttcgaggacgtgcctttccacagcagctacgcccacagccagagcttggaccggctgatgaatcctctgattgaccagtacctgtactacttgtctcggattcaaacaacaggaggcacggcaaatacgcagactctgggcttcagccaaggtgggcctaatacaatggccaatcaggcaaagaactggctgccaggaccctgttaccgccaacaacgcgtctcaacgacaaccgggcaaaacaacaatagcaactttgcctggactgctgggaccaaataccatctgaatggaagaaattcattggctaatcctggcatcgctatggcaacacacaaagacgacgaggagcgtttttttcccagtaacgggatcctgatttttggcaaacaaaatgctgccagagacaatgcggattacagcgatgtcatgcccaccagcgaggaagaaatcaaaaccactaaccctgtggccacagaggaatacggtatcgtggcagataacttgcagcagcaaaacacggctcctcaaattggaactgtcaacagccagggggccttacccggtatggtctggcagaaccgggacgtgtacctgcagggtcccatctgggccaagattcctcacacggacggcaacttccacccgtctccgctgatgggcggctttggcctgaaacatcctccgcctcagatcctgatcaagaacacgcctgtacctgcggatcctccgaccaccttcaaccagtcaaagctgaactctttcatcacgcaatacagcaccggacaggtcagcgtggaaattgaatgggagctgcagaaggaaaacagcaagcgctggaaccccgagatccagtacacctccaactactacaaatctacaagtgtggactttgctgttaatacagaaggcgtgtactctgaaccccgccccattggcacccgttacctcacccgtaatctgtaa

SEQ ID NO: 3878 - DNA, 2217 bp, synthetic construct
  misc_feature 1..2217: note = source = /note="Description of Artificial Sequence: Synthetic polynucleotide"
  source 1..2217: mol_type = other DNA
atggctgccgatggttatcttccagattggctcgaggacaacctctctgagggcattcgcgagtggtgggcgctgaaacctggagccccgaagcccaaagccaaccagcaaaagcaggacgacggccggggtctggtgcttcctggctacaagtacctcggacccttcaacggactcgacaagggggagcccgtcaacgcggcggacgcggcggccctcgagcacgacaaggcctacgaccagcagctgcaggcgggtgacaatccgtacctgcggtataaccacgccgacgccgagtttcaggagcgtctgcaagaagatacgtcttttgggggcaacctcgggcgagcagtcttccaggccaagaagcgggttctcgaacctctcggtctggttgaggaaggcgctaagacggctcctggaaagaagagaccggtagagccatcaccccagcgttctccagactcctctacgggcatcggcaagaagggccaacagcccgccagaaaaagactcaattttggtcagactggcgactcagagtcagttccagaccctcaacctctcggagaacctccagcagcgccctctggtgtgggacctaatacaatggctgcaggcggtggcgcaccaatggcagacaataacgaaggcgccgacggagtgggtagttcctcgggaaattggcattgcgattccacatggctgggcgacagagtcatcaccaccagcacccgaacctgggccctgcccacctacaacaaccacctctacaagcaaatctccaacgggacatcgggaggagccaccaacgacaacacctacttcggctacagcaccccctgggggtattttgactttaacagattccactgccacttttcaccacgtgactggcagcgactcatcaacaacaactggggattccggcccaagagactcagcttcaagctcttcaacatccaggtcaaggaggtcacgcagaatgaaggcaccaagaccatcgccaataacctcaccagcaccatccaggtgtttacggactcggagtaccggctgccgtacgttctcggctctgcccaccagggctgcctgcctccgttcccggcggacgtgttcacgattccccagtacggctacctaacactcaacaacggtagtcaggccgtgggacgctcctccttctactgcctggaatactttccttcgcagatgctgagaaccggcaacaacttccagtttacttacaccttcgaggacgtgcctttccacagcagctacgcccacagccagagcttggaccggctgatgaatcctctgattgaccagtacctgtactacttgtctcggattcaaacaacaggaggcacggcaaatacgcagactctgggcttcagccaaggtgggcctaatacaatggccaatcaggcaaagaactggctgccaggaccctgttaccgccaacaacgcgtctcaacgacaaccgggcaaaacaacaatagcaactttgcctggactgctgggaccaaataccatctgaatggaagaaattcattggctaatcctggcatcgctatggcaacacacaaagacgacgaggagcgtttttttcccagtaacgggatcctgatttttggcaaacaaaatgctgccagagacaatgcggattacagcgatgtcatgcccaccagcgaggaagaaatcaaaaccactaaccctgtggccacagaggaatacggtatcgtggcagataacttgcagcagcaaaacacggctcctcaaattggaactgtcaacagccagggggccttacccggtatggtctggcagaaccgggacgtgtacctgcagggtcccatctgggccaagattcctcacacggacggcaacttccacccgtctccgctgatgggcggctttggcctgaaacatcctccgcctcagatcctgatcaagaacacgcctgtacctgcggatcctccgaccaccttcaaccagtcaaagctgaactctttcatcacgcaatacagcaccggacaggtcagcgtggaaattgaatgggagctgcagaaggaaaacagcaagcgctggaaccccgagatccagtacacctccaactactacaaatctacaagtgtggactttgctgttaatacagaaggcgtgtactctgaaccccgccccattggcacccgttacctcacccgtaatctgtaa

SEQ ID NO: 3879 - DNA, 2217 bp, synthetic construct
  misc_feature 1..2217: note = source = /note="Description of Artificial Sequence: Synthetic polynucleotide"
  source 1..2217: mol_type = other DNA
atggctgccgatggttatcttccagattggctcgaggacaacctctctgagggcattcgcgagtggtgggcgctgaaacctggagccccgaagcccaaagccaaccagcaaaagcaggacgacggccggggtctggtgcttcctggctacaagtacctcggacccttcaacggactcgacaagggggagcccgtcaacgcggcggacgcggcggccctcgagcacgacaaggcctacgaccagcagctgcaggcgggtgacaatccgtacctgcggtataaccacgccgacgccgagtttcaggagcgtctgcaagaagatacgtcttttgggggcaacctcgggcgagcagtcttccaggccaagaagcgggttctcgaacctctcggtctggttgaggaaggcgctaagacggctcctggaaagaagagaccggtagagccatcaccccagcgttctccagactcctctacgggcatcggcaagaagggccaacagcccgccagaaaaagactcaattttggtcagactggcgactcagagtcagttccagaccctcaacctctcggagaacctccagcagcgccctctggtgtgggacctaatacaatggctgcaggcggtggcgcaccaatggcagacaataacgaaggcgccgacggagtgggtagttcctcgggaaattggcattgcgattccacatggctgggcgacagagtcatcaccaccagcacccgaacctgggccctgcccacctacaacaaccacctctacaagcaaatctccaacgggacatcgggaggagccaccaacgacaacacctacttcggctacagcaccccctgggggtattttgactttaacagattccactgccacttttcaccacgtgactggcagcgactcatcaacaacaactggggattccggcccaagagactcagcttcaagctcttcaacatccaggtcaaggaggtcacgcagaatgaaggcaccaagaccatcgccaataacctcaccagcaccatccaggtgtttacggactcggagtaccagctgccgtacgttctcggctctgcccaccagggctgcctgcctccgttcccggcggacgtgttcacgattccccagtacggctacctaacactcaacaacggtagtcaggccgtgggacgctcctccttctactgcctggaatactttccttcgcagatgctgagaaccggcaacaacttccagtttacttacaccttcgaggacgtgcctttccacagcagctacgcccacagccagagcttggaccggctgatgaatcctctgattgaccagtacctgtactacttgtctcggattcaaacaacaggaggcacggcaaatacgcagactctgggcttcagccaaggtgggcctaatacaatggccaatcaggcaaagaactggctgccaggaccctgttaccgccaacaacgcgtctcaacgacaaccgggcaaaacaacaatagcaactttgcctggactgctgggaccaaataccatctgaatggaagaaattcattggctaatcctggcatcgctatggcaacacacaaagacgacgaggagcgtttttttcccagtaacgggatcctgatttttggcaaacaaaatgctgccagagacaatgcggattacagcgatgtcatgcccaccagcgaggaagaaatcaaaaccactaaccctgtggccacagaggaatacggtatcgtggcagataacttgcagcagcaaaacacggctcctcaaattggaactgtcaacagccagggggccttacccggtatggtctggcagaaccgggacgtgtacctgcagggtcccatctgggccaagattcctcacacggacggcaacttccacccgtctccgctgatgggcggctttggcctgaaacatcctccgcctcagatcctgatcaagaacacgcctgtacctgcggatcctccgaccaccttcaaccagccaaagctgaactctttcatcacgcaatacagcaccggacaggtcagcgtggaaattgaatgggagctgcagaaggaaaacagcaagcgctggaaccccgagatccagtacacctccaactactacaaatctacaagtgtggactttgctgttaatacagaaggcgtgtactctgaaccccgccccattggcacccgttacctcacccgtaatctgtaa

SEQ ID NO: 3880 - DNA, 2217 bp, synthetic construct
  misc_feature 1..2217: note = source = /note="Description of Artificial Sequence: Synthetic polynucleotide"
  source 1..2217: mol_type = other DNA
atggctgccgatggttatcttccagattggctcgaggacaacctctctgagggcattcgcgagtggtgggcgctgaaacctggagccccgaagcccaaagccaaccagcaaaagcaggacgacggccggggtctggtgcttcctggctacaagtacctcggacccttcaacggactcgacaagggggagcccgtcaacgcggcggacgcggcggccctcgagcacgacaaggcctacgaccagcagctgcaggcgggtggcaatccgtacctgcggtataaccacgccgacgccgagtttcaggagcgtctgcaagaagatacgtcttttgggggcaacctcgggcgagcagtcttccaggccaagaagcgggttctcgaacctctcggtctggttgaggaaggcgctaagacggctcctggaaagaagagaccggtagagccatcaccccagcgttctccagactcctctacgggcatcggcaagaagggccaacagcccgccagaaaaagactcaattttggtcagactggcgactcagagtcagttccagaccctcaacctctcggagaacctccagcagcgccctctggtgtgggacctaatacaatggctgcaggcggtggcgcaccaatggcagacaataacgaaggcgccgacggagtgggtagttcctcgggaaattggcattgcgattccacatggctgggcgacagagtcatcaccaccagcacccgaacctgggccctgcccacctacaacaaccacctctacaagcaaatctccaacgggacatcgggaggagccaccaacgacaacacctacttcggctacagcaccccctgggggtattttgactttaacagattccactgccacttttcaccacgtgactggcagcgactcatcaacaacaactggggattccggcccaagagactcagcttcaagctcttcaacatccaggtcaaggaggtcacgcagaatgaaggcaccaagaccatcgccaataacctcaccagcaccatccaggtgtttacggactcggagtaccagctgccgtacgttctcggctctgcccaccagggctgcctgcctccgttcccggcggacgtgttcacgattccccagtacggctacctaacactcaacaacggtagtcaggccgtgggacgctcctccttctactgcctggaatactttccttcgcagatgctgagaaccggcaacaacttccagtttacttacaccttcgaggacgtgcctttccacagcagctacgcccacagccagagcttggaccggctgatgaatcctctgattgaccagtacctgtactacttgtctcggattcaaacaacaggaggcacggcaaatacgcagactctgggcttcagccaaggtgggcctaatacaatggccaatcaggcaaagaactggctgccaggaccctgttaccgccaacaacgcgtctcaacgacaaccgggcaaaacaacaatagcaactttgcctggactgctgggaccaaataccatctgaatggaagaaattcattggctaatcctggcatcgctatggcaacacacaaagacgacgaggagcgtttttttcccagtaacgggatcctgatttttggcaaacaaaatgctgccagagacaatgcggattacagcgatgtcatgcccaccagcgaggaagaaatcaaaaccactaaccctgtggccacagaggaatacggtatcgtggcagataacttgcagcagcaaaacacggctcctcaaattggaactgtcaacagccagggggccttacccggtatggtctggcagaaccgggacgtgtacctgcagggtcccatctgggccaagattcctcacacggacggcaacttccacccgtctccgctgatgggcggctttggcctgaaacatcctccgcctcagatcctgatcaagaacacgcctgtacctgcggatcctccgaccaccttcaaccagtcaaagctgaactctttcatcacgcaatacagcaccggacaggtcagcgtggaaattgaatgggagctgcagaaggaaaacagcaagcgctggaaccccgagatccagtacacctccaactactacaaatctacaagtgtggactttgctgttaatacagaaggcgtgtactctgaaccccgccccattggcacccgttacctcacccgtaatctgtaa

SEQ ID NO: 3881 - DNA, 2217 bp, synthetic construct
  misc_feature 1..2217: note = source = /note="Description of Artificial Sequence: Synthetic polynucleotide"
  source 1..2217: mol_type = other DNA
atggctgccgatggttatcttccagattggctcgaggacaacctctctgagggcattcgcgagtggtgggcgctgaaacctggagccccgaagcccaaagccaaccagcaaaagcaggacgacggccggggtctggtgcttcctggctacaagtacctcggacccttcaacggactcgacaagggggagcccgtcaacgcggcggacgcggcggccctcgagcacgacaaggcctacgaccagcagctgcaggcgggtgacaatccgtacctgcggtataaccacgccgacgccgagtttcaggagcgtctgcaagaagatacgtcttttgggggcaacctcgggcgagcagtcttccaggccaagaagcgggttctcgaacctctcggtctggttgaggaaggcgctaagacggctcctggaaagaagagaccggtagagccatcaccccagcgttctccagactcctctacgggcatcggcaagaagggccaacagcccgccagaaaaagactcaattttggtcagactggcgactcagagtcagttccagaccctcaacctctcggagaacctccagcagcgccctctggtgtgggacctaatacaatggctgcaggcggtggcgcaccaatggcagacaataacgaaggcgccgacggagtgggtagttcctcgggaaattggcattgcgattccacatggctgggcgacagagtcatcaccaccagcacccgaacctgggccctgcccacctacaacaaccacctctacaagcaaatctccaacgggacatcgggaggagccaccaacgacaacacctacttcggctacagcaccccctgggggtattttgactttaacagattccactgccacttttcaccacgtgactggcagcgactcatcaacaacaactggggattccggcccaagagactcagcttcaagctcttcaacatccaggtcaaggaggtcacgcagaatgaaggcaccaagaccatcgccaataacctcaccagcaccatccaggtgtttacggactcggagtaccagctgccgtacgttctcggctctgcccaccagggctgcctgcctccgttcccggcggacgtgttcacgattccccagtacggctacctaacactcaacaacggtagtcaggccgtgggacgctcctccttctactgcctggaatactttccttcgcagatgctgagaaccggcaacaacttccagtttacttacaccttcgaggacgtgcctttccacagcagctacgcccacagccagagcttggaccggctgatgaatcctctgattgaccagtacctgtactacttgtctcggattcaaacaacaggaggcacggcaaatacgcagactctgggcttcagccaaggtgggcctaatacaatggccaatcaggcaaagaactggctgccaggaccctgttaccgccaacaacgcgtctcaacggcaaccgggcaaaacaacaatagcaactttgcctggactgctgggaccaaataccatctgaatggaagaaattcattggctaatcctggcatcgctatggcaacacacaaagacgacgaggagcgtttttttcccagtaacgggatcctgatttttggcaaacaaaatgctgccagagacaatgcggattacagcgatgtcatgcccaccagcgaggaagaaatcaaaaccactaaccctgtggccacagaggaatacggtatcgtggcagataacttgcagcagcaaaacacggctcctcaaattggaactgtcaacagccagggggccttacccggtatggtctggcagaaccgggacgtgtacctgcagggtcccatctgggccaagattcctcacacggacggcaacttccacccgtctccgctgatgggcggctttggcctgaaacatcctccgcctcagatcctgatcaagaacacgcctgtacctgcggatcctccgaccaccttcaaccagtcaaagctgaactctttcatcacgcaatacagcaccggacaggtcagcgtggaaattgaatgggagctgcagaaggaaaacagcaagcgctggaaccccgagatccagtacacctccaactactacaaatctacaagtgtggactttgctgttaatacagaaggcgtgtactctgaaccccgccccattggcacccgttacctcacccgtaatctgtaa

SEQ ID NO: 3882 - DNA, 2217 bp, synthetic construct
  misc_feature 1..2217: note = source = /note="Description of Artificial Sequence: Synthetic polynucleotide"
  source 1..2217: mol_type = other DNA
atggctgccgatggttatcttccagattggctcgaggacaacctctctgagggcattcgcgagtggtgggcgctgaaacctggagccccgaagcccaaagccaaccagcaaaagcaggacgacggccggggtctggtgcttcctggctacaagtacctcggacccttcaacggactcgacaagggggagcccgtcaacgcggcggacgcggcggccctcgagcacgacaaggcctacgaccagcagctgcaggcgggtgacaatccgtacctgcggtataaccacgccgacgccgagtttcaggagcgtctgcaagaagatacgtcttttgggggcaacctcgggcgagcagtcttccaggccaagaagcgggttctcgaacctctcggtctggttgaggaaggcgctaagacggctcctggaaagaagagaccggtagagccatcaccccagcgttctccagactcctctacgggcatcggcaagaagggccaacagcccgccagaaaaagactcaattttggtcagactggcgactcagagtcagttccagaccctcaacctctcggagaacctccagcagcgccctctggtgtgggacctaatacaatggctgcaggcggtggcgcaccaatggcagacaataacgaaggcgccgacggagtgggtagttcctcgggaaattggcattgcgattccacatggctgggcgacagagtcatcaccaccagcacccgaacctgggccctgcccacctacaacaaccacctctacaagcaaatctccaacgggacatcgggaggagccaccaacgacaacacctacttcggctacagcaccccctgggggtattttgactttaacagattccactgccacttttcaccacgtgactggcagcgactcatcaacaacaactggggattccggcccaagagactcagcttcaagctcttcaacatccaggtcaaggaggtcacgcagaatgaaggcaccaagaccatcgccaataacctcaccagcaccatccaggtgtttacggactcggagtaccagctgccgtacgttctcggctctgcccaccagggctgcccgcctccgttcccggcggacgtgttcacgattccccagtacggctacctaacactcaacaacggtagtcaggccgtgggacgctcctccttctactgcctggaatactttccttcgcagatgctgagaaccggcaacaacttccagtttacttacaccttcgaggacgtgcctttccacagcagctacgcccacagccagagcttggaccggctgatgaatcctctgattgaccagtacctgtactacttgtctcggattcaaacaacaggaggcacggcaaatacgcagactctgggcttcagccaaggtgggcctaatacaatggccaatcaggcaaagaactggctgccaggaccctgttaccgccaacaacgcgtctcaacgacaaccgggcaaaacaacaatagcaactttgcctggactgctgggaccaaataccatctgaatggaagaaattcattggctaatcctggcatcgctatggcaacacacaaagacgacgaggagcgtttttttcccagtaacgggatcctgatttttggcaaacaaaatgctgccagagacaatgcggattacagcgatgtcatgcccaccagcgaggaagaaatcaaaaccactaaccctgtggccacagaggaatacggtatcgtggcagataacttgcagcagcaaaacacggctcctcaaattggaactgtcaacagccagggggccttacccggtatggtctggcagaaccgggacgtgtacctgcagggtcccatctgggccaagattcctcacacggacggcaacttccacccgtctccgctgatgggcggctttggcctgaaacatcctccgcctcagatcctgatcaagaacacgcctgtacctgcggatcctccgaccaccttcaaccagtcaaagctgaactctttcatcacgcaatacagcaccggacaggtcagcgtggaaattgaatgggagctgcagaaggaaaacagcaagcgctggaaccccgagatccagtacacctccaactactacaaatctacaagtgtggactttgctgttaatacagaaggcgtgtactctgaaccccgccccattggcacccgttacctcacccgtaatctgtaa

SEQ ID NO: 3883 - DNA, 2217 bp, synthetic construct
  misc_feature 1..2217: note = source = /note="Description of Artificial Sequence: Synthetic polynucleotide"
  source 1..2217: mol_type = other DNA
atggctgccgatggttatcttccagattggctcgaggacaacctctctgagggcattcgcgagtggtgggcgctgaaacctggagccccgaagcccaaagccaaccagcaaaagcaggacgacggccggggtctggtgcttcctggctacaagtacctcggacccttcaacggactcgacaagggggagcccgtcaacgcggcggacgcggcggccctcgagcacgacaaggcctacgaccagcagccgcaggcgggtgacaatccgtacctgcggtataaccacgccgacgccgagtttcaggagcgtctgcaagaagatacgtcttttgggggcaacctcgggcgagcagtcttccaggccaagaagcgggttctcgaacctctcggtctggttgaggaaggcgctaagacggctcctggaaagaagagaccggtagagccatcaccccagcgttctccagactcctctacgggcatcggcaagaagggccaacagcccgccagaaaaagactcaattttggtcagactggcgactcagagtcagttccagaccctcaacctctcggagaacctccagcagcgccctctggtgtgggacctaatacaatggctgcaggcggtggcgcaccaatggcagacaataacgaaggcgccgacggagtgggtagttcctcgggaaattggcattgcgattccacatggctgggcgacagagtcatcaccaccagcacccgaacctgggccctgcccacctacaacaaccacctctacaagcaaatctccaacgggacatcgggaggagccaccaacgacaacacctacttcggctacagcaccccctgggggtattttgactttaacagattccactgccacttttcaccacgtgactggcagcgactcatcaacaacaactggggattccggcccaagagactcagcttcaagctcttcaacatccaggtcaaggaggtcacgcagaatgaaggcaccaagaccatcgccaataacctcaccagcaccatccaggtgtttacggactcggagtaccagctgccgtacgttctcggctctgcccaccagggctgcctgcctccgttcccggcggacgtgttcacgattccccagtacggctacctaacactcaacaacggtagtcaggccgtgggacgctcctccttctactgcctggaatactttccttcgcagatgctgagaaccggcaacaacttccagtttacttacaccttcgaggacgtgcctttccacagcagctacgcccacagccagagcttggaccggctgatgaatcctctgattgaccagtacctgtactacttgtctcggattcaaacaacaggaggcacggcaaatacgcagactctgggcttcagccaaggtgggcctaatacaatggccaatcaggcaaagaactggctgccaggaccctgttaccgccaacaacgcgtctcaacgacaaccgggcaaaacaacaatagcaactttgcctggactgctgggaccaaataccatctgaatggaagaaattcattggctaatcctggcatcgctatggcaacacacaaagacgacgaggagcgtttttttcccagtaacgggatcctgatttttggcaaacaaaatgctgccagagacaatgcggattacagcgatgtcatgcccaccagcgaggaagaaatcaaaaccactaaccctgtggccacagaggaatacggtatcgtggcagataacttgcagcagcaaaacacggctcctcaaattggaactgtcaacagccagggggccttacccggtatggtctggcagaaccgggacgtgtacctgcagggtcccatctgggccaagattcctcacacggacggcaacttccacccgtctccgctgatgggcggctttggcctgaaacatcctccgcctcagatcctgatcaagaacacgcctgtacctgcggatcctccgaccaccttcaaccagtcaaagctgaactctttcatcacgcaatacagcaccggacaggtcagcgtggaaattgaatgggagctgcagaaggaaaacagcaagcgctggaaccccgagatccagtacacctccaactactacaaatctacaagtgtggactttgctgttaatacagaaggcgtgtactctgaaccccgccccattggcacccgttacctcacccgtaatctgtaa

SEQ ID NO: 3884 - DNA, 2217 bp, synthetic construct
  misc_feature 1..2217: note = source = /note="Description of Artificial Sequence: Synthetic polynucleotide"
  source 1..2217: mol_type = other DNA
atggctgccgatggttatcttccagattggctcgaggacaacctctctgagggcattcgcgagtggtgggcgctgaaacctggagccccgaagcccaaagccaaccagcaaaagcaggacgacggccggggtctggtgcttcctggctacaagtacctcggacccttcaacggactcgacaagggggagcccgtcaacgcggcggacgcggcggccctcgagcacgacaaggcctacgaccagcagctgcaggcgggtgacaatccgtacctgcggtataaccacgccgacgccgagtttcaggagcgtctgcaagaagatacgtcttttgggggcaacctcgggcgagcagtcttccaggccaagaagcgggttctcgaacctctcggtctggttgaggaaggcgctaagacggctcctggaaagaagagaccggtagagccatcaccccagcgttctccagactcctctacgggcatcggcaagaagggccaacagcccgccagaaaaagactcaattttggtcagactggcgactcagagtcagttccagaccctcaacctctcggagaacctccagcagcgccctctggtgtgggacctaatacaatggctgcaggcggtggcgcaccaatggcagacaataacgaaggcgccgacggagtgggtagttcctcgggaaattggcattgcgattccacatggctgggcgacagagtcatcaccaccagcacccgaacctgggccctgcccacctacaacaaccacctctacaagcaaatctccaacgggacatcgggaggagccaccaacgacaacacctacttcggctacagcaccccctgggggtattttgactttaacagattccactgccacttttcaccacgtgactggcagcgactcatcaacaacaactggggattccggcccaagagactcagcttcaagctcttcaacatccaggtcaaggaggtcacgcagaatgaaggcaccaagaccatcgccaataacctcaccagcaccatccaggtgtttacggactcggagtaccagctgccgtacgttctcggctctgcccaccagggctgcctgcctccgttcccggcggacgtgttcacgattccccagtacggctacctaacactcaacaacggtagtcaggccgtgggacgctcctccttctactgcctggaataccttccttcgcagatgctgagaaccggcaacaacttccagtttacttacaccttcgaggacgtgcctttccacagcagctacgcccacagccagagcttggaccggctgatgaatcctctgattgaccagtacctgtactacttgtctcggattcaaacaacaggaggcacggcaaatacgcagactctgggcttcagccaaggtgggcctaatacaatggccaatcaggcaaagaactggctgccaggaccctgttaccgccaacaacgcgtctcaacgacaaccgggcaaaacaacaatagcaactttgcctggactgctgggaccaaataccatctgaatggaagaaattcattggctaatcctggcatcgctatggcaacacacaaagacgacgaggagcgtttttttcccagtaacgggatcctgatttttggcaaacaaaatgctgccagagacaatgcggattacagcgatgtcatgcccaccagcgaggaagaaatcaaaaccactaaccctgtggccacagaggaatacggtatcgtggcagataacttgcagcagcaaaacacggctcctcaaattggaactgtcaacagccagggggccttacccggtatggtctggcagaaccgggacgtgtacctgcagggtcccatctgggccaagattcctcacacggacggcaacttccacccgtctccgctgatgggcggctttggcctgaaacatcctccgcctcagatcctgatcaagaacacgcctgtacctgcggatcctccgaccaccttcaaccagtcaaagctgaactctttcatcacgcaatacagcaccggacaggtcagcgtggaaattgaatgggagctgcagaaggaaaacagcaagcgctggaaccccgagatccagtacacctccaactactacaaatctacaagtgtggactttgctgttaatacagaaggcgtgtactctgaaccccgccccattggcacccgttacctcacccgtaatctgtaa

SEQ ID NO: 3885 - DNA, 2217 bp, synthetic construct
  misc_feature 1..2217: note = source = /note="Description of Artificial Sequence: Synthetic polynucleotide"
  source 1..2217: mol_type = other DNA
atggctgccgatggttatcttccagattggctcgaggacaacctctctgagggcattcgcgagtggtgggcgctgaaacctggagccccgaagcccaaagccaaccagcaaaagcaggacgacggccggggtctggtgcttcctggctacaagtacctcggacccttcaacggactcgacaagggggagcccgtcaacgcggcggacgcggcggccctcgagcacgacaaggcctacgaccagcagctgcgggcgggtgacaatccgtacctgcggtataaccacgccgacgccgagtttcaggagcgtctgcaagaagatacgtcttttgggggcaacctcgggcgagcagtcttccaggccaagaagcgggttctcgaacctctcggtctggttgaggaaggcgctaagacggctcctggaaagaagagaccggtagagccatcaccccagcgttctccagactcctctacgggcatcggcaagaaggaccaacagcccgccagaaaaagactcaattttggtcagactggcgactcagagtcagttccagaccctcaacctctcggagaacctccagcagcgccctctggtgtgggacctaatacaatggctgcaggcggtggcgcaccaatggcagacaataacgaaggcgccgacggagtgggtagttcctcgggaaattggcattgcgattccacatggctgggcgacagagtcatcaccaccagcacccgaacctgggccctgcccacctacaacaaccacctctacaagcaaatctccaacgggacatcgggaggagccaccaacgacaacacctacttcggctacagcaccccctgggggtattttgactttaacagattccactgccacttttcaccacgtgactggcagcgactcatcaacaacaactggggattccggcccaagagactcagcttcaagctcttcaacatccaggtcaaggaggtcacgcagaatgaaggcaccaagaccatcgccaataacctcaccagcaccatccaggtgtttacggactcggagtaccagctgccgtacgttctcggctctgcccaccagggctgcctgcctccgttcccggcggacgtgttcacgattccccagtacggctacctaacactcaacaacggtagtcaggccgtgggacgctcctccttctactgcctggaatactttccttcgcagatgctgagaaccggcaacaacttccagtttacttacaccttcgaggacgtgcctttccacagcagctacgcccacagccagagcttggaccggctgatgaatcctctgattgaccagtacctgtactacttgtctcggattcaaacaacaggaggcacggcaaatacgcagactctgggcttcagccaaggtgggcctaatacaatggccaatcaggcaaagaactggctgccaggaccctgttaccgccaacaacgcgtctcaacgacaaccgggcaaaacaacaatagcaactttgcctggactgctgggaccaaataccatctgaatggaagaaattcattggctaatcctggcatcgctatggcaacacacaaagacgacgaggagcgtttttttcccagtaacgggatcctgatttttggcaaacaaaatgctgccagagacaatgcggattacagcgatgtcatgcccaccagcgaggaagaaatcaaaaccactaaccctgtggccacagaggaatacggtatcgtggcagataacttgcagcagcaaaacacggctcctcaaattggaactgtcaacagccagggggccttacccggtatggtctggcagaaccgggacgtgtacctgcagggtcccatctgggccaagattcctcacacggacggcaacttccacccgtctccgctgatgggcggctttggcctgaaacatcctccgcctcagatcctgatcaagaacacgcctgtacctgcggatcctccgaccaccttcaaccagtcaaagctgaactctttcatcacgcaatacagcaccggacaggtcagcgtggaaattgaatgggagctgcagaaggaaaacagcaagcgctggaaccccgagatccagtacacctccaactactacaaatctacaagtgtggactttgctgttaatacagaaggcgtgtactctgaaccccgccccattggcacccgttacctcacccgtaatctgtaa

SEQ ID NO: 3886 - DNA, 2217 bp, synthetic construct
  misc_feature 1..2217: note = source = /note="Description of Artificial Sequence: Synthetic polynucleotide"
  source 1..2217: mol_type = other DNA
atggctgccgatggttatcttccagattggctcgaggacaacctctctgagggcattcgcgagtggtgggcgctgaaacctggagccccgaagcccaaagccaaccagcaaaagcaggacgacggccggggtctggtgcttcctggctacaagtacctcggacccttcaacggactcgacaagggggagcccgtcaacgcggcggacgcggcggccctcgagcacgacaaggcctacgaccagcagctgcaggcgggtgacaatccgtacctgcggtataaccacgccgacgccgagtttcaggagcgtctgcaagaagatacgtcttttgggggcaacctcgggcgagcagtcttccaggccaagaagcgggttctcgaacctctcggtctggttgaggaaggcgctaagacggctcctggaaagaagagaccggtagagccatcaccccagcgttctccagactcctctacgggcatcggcaagaagggccaacagcccgccagaaaaagactcaattttggtcagactggcgactcagagtcagttccagaccctcaacctctcggagaacctccagcagcgccctctggtgtgggacctaatacaatggctgcaggcggtggcgcaccaatggcagacaataacgaaggcgccgacggagtgggtagttcctcgggaaattggcattgcgattccacatggctgggcgacagagtcatcaccaccagcacccgaacctgggccctgcccacctacaacaaccacctctacaagcaaatctccaacgggacatcgggaggagccaccaacgacaacacctacttcggctacagcaccccctgggggtattttgactttaacagattccactgccacttttcaccacgtgactggcagcgactcatcaacaacaactggggattccggcccaagagactcagcttcaagctcttcaacatccaggtcaaggaggtcacgcagaatgaaggcaccaagaccatcgccaataacctcaccagcaccatccaggtgtttacggactcggagtaccagctgccgtacgttctcggctctgcccaccagggctgcctgcctccgttcccggcggacgtgttcacgattccccagtacggctacctaacactcaacaacggtagtcaggccgtgggacgctcctccttctactgcctggaatactttccttcgcagatgctgagaaccggcaacaacttccagtttacttacaccttcgaggacgtgcctttccacagcagctacgcccacagccagagcttggaccggctgatgaatcctctgattgaccagtacctgtactacttgtctcggattcaaacaacaggaggcacggcaaatacgcagactctgggcttcagccaaggtgggcctaatacaatggccaatcaggcaaagaactggctgccaggaccctgttaccgccaacaacgcgtctcaacgacaaccgggcaaaacaacaatagcaactttgcctggactgctgggaccaaataccatctgaatggaagaaattcattggctaatcctggcatcgctatggcaacacacaaagacgacgaggagcgtttttttcccagtaacgggatcctgatttttggcaaacaaaatgctgccagagacaatgcggattacagcgatgtcatgcccaccagcgaggaagaaatcaaaaccactaaccctgtggccacagaggaatacggtatcgtggcagataacttgcagcagcaaaacacggctcctcaaattggaactgtcaacagccagggggccttacccggtatggtctggcagaaccgggacgtgtacctgcagggtcccatctgggccaagattcctcgcacggacggcaacttccacccgtctccgctgatgggcggctttggcctgaaacatcctccgcctcagatcctgatcaagaacacgcctgtgcctgcggatcctccgaccaccttcaaccagtcaaagctgaactctttcatcacgcaatacagcaccggacaggtcagcgtggaaattgaatgggagctgcagaaggaaaacagcaagcgctggaaccccgagatccagtacacctccaactactacaaatctacaagtgtggactttgctgttaatacagaaggcgtgtactctgaaccccgccccattggcacccgttacctcacccgtaatctgtaa

SEQ ID NO: 3887 - DNA, 2217 bp, synthetic construct
  misc_feature 1..2217: note = source = /note="Description of Artificial Sequence: Synthetic polynucleotide"
  source 1..2217: mol_type = other DNA
atggctgccgatggttatcttccagattggctcgaggacaacctctctgagggcattcgcgagtggtgggcgctgaaacctggagccccgaagcccaaagccaaccagcaaaagcaggacgacggccggggtctggtgcttcctggctacaagtacctcggacccttcaacggactcgacaagggggagcccgtcaacgcggcggacgcggcggccctcgagcacgacaaggcctacgaccagcagctgcaggcgggtgacaatccgtacctgcggtataaccacgccgacgccgagtttcaggagcgtctgcaagaagatacgtcttttgggggcaacctcgggcgagcagtcttccaggccaagaagcgggttctcgaacctctcggtctggttgaggaaggcgctaagacggctcctggaaagaagagaccggtagagccatcaccccagcgttctccagactcctctacgggcatcggcaagaagggccaacagcccgccagaaaaagactcaattttggtcagactggcgactcagagtcagttccagaccctcaacctctcggagaacctccagcagcgccctctggtgtgggacctaatacaatggctgcaggcggtggcgcaccaatggcagacaataacgaaggcgccgacggagtgggtagttcctcgggaaattggcattgcgattccacatggctgggcgacagagtcatcaccaccagcacccgaacctgggccctgcccacctacaacaaccacctctacaagcaaatctccaacgggacatcgggaggagccaccaacgacaacacctacttcggctacagcaccccctgggggtattttgactttaacagattccactgccacttttcaccacgtgactggcagcgactcatcaacaacaactggggattccggcccaagagactcagcttcaagctcttcaacatccaggtcaaggaggtcacgcagaatgaaggcaccaagaccatcgccaataacctcaccagcaccatccaggtgtttacggactcggagtaccagctgccgtacgttctcggctctgcccaccagggctgcctgcctccgttcccggcggacgtgttcacgattccccagtacggctacctaacactcaacaacggtagtcaggccgtgggacgctcctccttctactgcctggaatactttccttcgcagatgctgagaaccggcaacaacttccagtttacttacaccttcgaggacgtgcctttccacagcagctacgcccacagccagagcttggaccggctgatgaatcctctgattgaccagtacctgtactacttgtctcggattcaaacaacaggaggcacggcaaatacgcagactctgggcttcagccaaggtgggcctaatacaatggccaatcaggcaaagaactggctgccaggaccctgttaccgccaacaacgcgtctcaacgacaaccgggcaaaacaacaatagcaactttgcctggactgctgggaccaaataccatctgaatggaagaaattcattggctaatcctggcatcgctatggcaacacacaaagacgacgaggagcgtttttttcccagtaacgggatcctgatttttggcaaacaaaatgctgccagagacaatgcggattacagcgatgtcatgcccaccagcgaggaagaaatcaaaaccactaaccctgtggccacagaggaatacggtatcgtggcagataacttgcagcagcaaaacacggctcctcaaattggaactgtcaacagccagggggccttacccggtatggtctggcagaaccgggacgtgtacctgcagggtcccatctgggccaagattcctcacacggacggcaacttccacccgtctccgctgatgggcggctttggcctgaaacatcctccgcctcagatcctgatcaagaacacgcctgtacctgcggatcctccgaccaccttcaaccagtcaaagctgaactctttcatcacgcaatacagcaccggacaggtcagcgtggaaattggatgggagctgcagaaggaaaacagcaagcgctggaaccccgagatccagtacacctccaactactacaaatctacaagtgtggactttgctgttaatacagaaggcgtgtactctgaaccccgccccattggcacccgttacctcacccgtaatctgtaa

SEQ ID NO: 3888 - DNA, 2217 bp, synthetic construct
  misc_feature 1..2217: note = source = /note="Description of Artificial Sequence: Synthetic polynucleotide"
  source 1..2217: mol_type = other DNA
atggctgccgatggttatcttccagattggctcgaggacaacctctctgagggcattcgcgagtggtgggcgctgaaacctggagccccgaagcccaaagccaaccagcaaaagcaggacgacggccggggtctggtgcttcctggctacaagtacctcggacccttcaacggactcgacaagggggagcccgtcaacgcggcggacgcggcggccctcgagcacgacaaggcctacgaccagcagctgcaggcgggtgacaatccgtacctgcggtataaccacgccgacgccgagtttcaggagcgtctgcaagaagatacgtcttttgggggcaacctcgggcgagcagtcttccaggccaagaagcgggttctcgaacctctcggtctggttgaggaaggcgctaagacggctcctggaaagaagagaccggtagagccatcaccccagcgttctccagactcctctacgggcatcggcaagaagggccaacagcccgccagaaaaagactcaattttggtcagactggcgactcagagtcagttccagaccctcaacctctcggagaacctccagcagcgccctctggtgtgggacctaatacaatggctacaggcggtggcgcaccaatggcagacaataacgaaggcgccgacggagtgggtagttcctcgggaaattggcattgcgattccacatggctgggcgacagagtcatcaccaccagcacccgaacctgggccctgcccacctacaacaaccacctctacaagcaaatctccaacgggacatcgggaggagccaccaacgacaacacctacttcggctacagcaccccctgggggtattttgactttaacagattccactgccacttttcaccacgtgactggcagcgactcatcaacaacaactggggattccggcccaagagactcagcttcaagctcttcaacatccaggtcaaggaggtcacgcagaatgaaggcaccaagaccatcgccaataacctcaccagcaccatccaggtgtttacggactcggagtaccagctgccgtacgttctcggctctgcccaccagggctgcctgcctccgttcccggcggacgtgttcacgattccccagtacggctacctaacactcaacaacggtagtcaggccgtgggacgctcctccttctactgcctggaatactttccttcgcagatgctgagaaccggcaacaacttccagtttacttacaccttcgaggacgtgcctttccacggcagctacgcccacagccagagcttggaccggctgatgaatcctctgattgaccagtacctgtactacttgtctcggattcaaacaacaggaggcacggcaaatacgcagactctgggcttcagccaaggtgggcctaatacaatggccaatcaggcaaagaactggctgccaggaccctgttaccgccaacaacgcgtctcaacgacaaccgggcaaaacaacaatagcaactttgcctggactgctgggaccaaataccatctgaatggaagaaattcattggctaatcctggcatcgctatggcaacacacaaagacgacgaggagcgtttttttcccagtaacgggatcctgatttttggcaaacaaaatgctgccagagacaatgcggattacagcgatgtcatgcccaccagcgaggaagaaatcaaaaccactaaccctgtggccacagaggaatacggtatcgtggcagataacttgcagcagcaaaacacggctcctcaaattggaactgtcaacagccagggggccttacccggtatggtctggcagaaccgggacgtgtacctgcagggtcccatctgggccaagattcctcacacggacggcaacttccacccgtctccgctgatgggcggctttggcctgaaacatcctccgcctcagatcctgatcaagaacacgcctgtacctgcggatcctccgaccaccttcaaccagtcaaagctgaactctttcatcacgcaatacagcaccggacaggtcagcgtggaaattgaatgggagctgcagaaggaaaacagcaagcgctggaaccccgagatccagtacacctccaactactacaaatctacaagtgtggactttgctgttaatacagaaggcgtgtactctgaaccccgccccattggcacccgttacctcacccgtaatctgtaa

SEQ ID NO: 3889 - DNA, 2217 bp, synthetic construct
  misc_feature 1..2217: note = source = /note="Description of Artificial Sequence: Synthetic polynucleotide"
  source 1..2217: mol_type = other DNA
atggctgccgatggttatcttccagattggctcgaggacaacctctctgagggcattcgcgagtggtgggcgctgaaacctggagccccgaagcccaaagccaaccagcaaaagcaggacgacggccggggtctggtgcttcctggctacaagtacctcggacccttcaacggactcgacaagggggagcccgtcaacgcggcggacgcggcggccctcgagcacgacaaggcctacgaccagcagctgcaggcgggtgacaatccgtacctgcggtataaccacgccgacgccgagtttcaggagcgtctgcaagaagatacgtcttttgggggcaacctcgggcgagcagtcttccaggccaagaagcgggttctcgaacctctcggtctggttgaggaaggcgctaagacggctcctggaaagaagagaccggtagagccatcaccccagcgttctccagactcctctacgggcatcggcaagaagggccaacagcccgccagaaaaagactcaattttggtcagactggcgactcagagtcagttccagaccctcaacctctcggagaacctccagcagcgccctctggtgtgggacctaatacaatggctgcaggcggtggcgcaccaatggcagacaataacgaaggcgccgacggagtgggtagttcctcgggaaattggcattgcgattccacatggctgggcgacagagtcatcaccaccagcacccgaacctgggccctgcccacctacaacaaccacctctacaagcaaatctccaacgggacatcgggaggagccaccaacgacaacacctacttcggctacagcaccccctgggggtattttgactttaacagattccactgccacttttcaccacgtgactggcagcgactcatcaacaacaactggggattccggcccaagagactcagcttcaagctcttcaacatccaggtcaaggaggtcacgcagaatgaaggcaccaagaccatcgccaataacctcaccagcaccatccaggtgtttacggactcggagtacctgctgccgtacgttctcggctctgcccaccagggctgcctgcctccgttcccggcggacgtgttcacgattccccagtacggctacctaacactcaacaacggtagtcaggccgtgggacgctcctccttctactgcctggaatactttccttcgcagatgctgagaaccggcaacaacttccagtttacttacaccttcgaggacgtgcctttccacagcagctacgcccacagccagagcttggaccggctgatgaatcctctgattgaccagtacctgtactacttgtctcggattcaaacaacaggaggcacggcaaatacgcagactctgggcttcagccaaggtgggcctaatacaatggccaatcaggcaaagaactggctgccaggaccctgttaccgccaacaacgcgtctcaacgacaaccgggcaaaacaacaatagcaactttgcctggactgctgggaccaaataccatctgaatggaagaaattcattggctaatcctggcatcgctatggcaacacacaaagacgacgaggagcgtttttttcccagtaacgggatcctgatttttggcaaacaaaatgctgccagagacaatgcggattacagcgatgtcatgcccaccagcgaggaagaaatcaaaaccactaaccctgtggccacagaggaatacggtatcgtggcagataacttgcagcagcaaaacacggctcctcaaattggaactgtcaacagccagggggccttacccggtatggtctggcagaaccgggacgtgtacctgcagggtcccatctgggccaagattcctcacacggacggcaacttccacccgtctccgctgatgggcggctttggcctgaaacatcctccgcctcagatcctgatcaagaacacgcctgtacctgcggatcctccgaccaccttcaaccagtcaaagctgaactctttcatcacgcaatacagcaccggacaggtcagcgtggaaattgaatgggagctgcagaaggaaaacagcaagcgctggaaccccgagatccagtacacctccaactactacaaatctacaagtgtggactttgctgttaatacagaaggcgtgtactctgaaccccgccccattggcacccgttacctcacccgtaatctgtaa

SEQ ID NO: 3890 - DNA, 2217 bp, synthetic construct
  misc_feature 1..2217: note = source = /note="Description of Artificial Sequence: Synthetic polynucleotide"
  source 1..2217: mol_type = other DNA
atggctgccgatggttatcctccagattggctcgaggacaacctctctgagggcattcgcgagtggtgggcgctgaaacctggagccccgaagcccaaagccaaccagcaaaagcaggacgacggccggggtctggtgcttcctggctacaagtacctcggacccttcaacggactcgacaagggggagcccgtcaacgcggcggacgcggcggccctcgagcacgacaaggcctacgaccagcagctgcaggcgggtgacaatccgtacctgcggtataaccacgccgacgccgagtttcaggagcgtctgcaagaagatacgtcttttgggggcaacctcgggcgagcagtcttccaggccaagaagcgggttctcgaacctctcggtctggttgaggaaggcgctaagacggctcctggaaagaagagaccggtagagccatcaccccagcgttctccagactcctctacgggcatcggcaagaagggccaacagcccgccagaaaaagactcaattttggtcagactggcgactcagagtcagttccagaccctcaacctctcggagaacctccagcagcgccctctggtgtgggacctaatacaatggctgcaggcggtggcgcaccaatggcagacaataacgaaggcgccgacggagtgggtagttcctcgggaaattggcattgcgattccacatggctgggcgacagagtcatcaccaccagcacccgaacctgggccctgcccacctacaacaaccacctctacaagcaaatctccaacgggacatcgggaggagccaccaacgacaacacctacttcggctacagcaccccctgggggtattttgactttaacagattccactgccacttttcaccacgtgactggcagcgactcatcaacaacaactggggattccggcccaagagactcagcttcaagctcttcaacatccaggtcaaggaggtcacgcagaatgaaggcaccaagaccatcgccaataacctcaccagcaccatccaggtgtttacggactcggagtaccagctgccgtacgttctcggctctgcccaccagggctgcctgcctccgttcccggcggacgtgttcacgattccccagtacggctacctaacactcaacaacggtagtcaggccgtgggacgctcctccttctactgcctggaatactttccttcgcagatgctgagaaccggcaacaacttccagtttacttacaccttcgaggacgtgcctttccacagcagctacgcccacagccagagcttggaccggctgatgaatcctctgattgaccagtacctgtactacttgtctcggattcaaacaacaggaggcacggcaaatacgcagactctgggcttcagccaaggtgggcctaatacaatggccaatcaggcaaagaactggctgccaggaccctgttaccgccaacaacgcgtctcaacgacaaccgggcaaaacaacaatagcaactttgcctggactgctgggaccaaataccatctgaatggaagaaattcattggctaatcctggcatcgctatggcaacacacaaagacgacgaggagcgtttttttcccagtaacgggatcctgatttttggcaaacaaaatgctgccagagacaatgcggattacagcgatgtcatgcccaccagcgaggaagaaatcaaaaccactaaccctgtggccacagaggaatacggtatcgtggcagataacttgcagcagcaaaacacggctcctcaaattggaactgtcaacagccagggggccttacccggtatggtctggcagaaccgggacgtgtacctgcagggtcccatctgggccaagattcctcacacggacggcaacttccacccgtctccgctgatgggcggctttggcctgaaacatcctccgcctcagatcctgatcaagaacacgcctgtacctgcggatcctccgaccaccttcaaccagtcaaagctgaactctttcatcacgcaatacagcaccggacaggtcagcgtggaaattgaatgggagctgcagaaggaaaacagcaagcgctggaaccccgagatccagtacacctccaactactacaaatctacaagtgtggactttgctgttaatacagaaggcgtgtactctgaaccccgccccattggcacccgttacctcacccgtaatctgtaa

SEQ ID NO: 3891 - DNA, 2217 bp, synthetic construct
  misc_feature 1..2217: note = source = /note="Description of Artificial Sequence: Synthetic polynucleotide"
  source 1..2217: mol_type = other DNA
atggctgccgatggttatcttccagattggctcgaggacaacctctctgagggcattcgcgagtggtgggcgctgaaacctggagccccgaagcccaaagccaaccagcaaaagcaggacgacggccggggtctggtgcttcctggctacaagtacctcggacccttcaacggactcgacaagggggagcccgtcaacgcggcggacgcggcggccctcgagcacgacaaggcctacgaccagcagctgcaggcgggtgacaatccgtacctgcggtataaccacgccgacgccgagtttcaggagcgtctgcaagaagatacgtcttttgggggcaacctcgggcgagcagtcttccaggccaagaagcgggttctcgaacctctcggtctggttgaggaaggcgctaagacggctcctggaaagaagagaccggtagagccatcaccccagcgttctccagactcctctacgggcatcggcaagaagggccaacagcccgccagaaaaagactcaattttggtcagactggcgactcagagtcagttccagaccctcaacctctcggagaacctccagcagcgccctctggtgtgggacctaatacaatggctgcaggcggtggcgcaccaatggcagacaataacgaaggcgccgacggagtgggtagttcctcgggaaattggcattgcgattccacatggctgggcgacagagtcatcaccaccagcacccgaacctgggccctgcccacctacaacaaccacctctacaagcaaatctccaacgggacatcgggaggagccaccaacgacaacacctacttcggctacagcaccccctgggggtattttgactttaacagattccactgccacttttcaccacgtgactggcagcgactcatcaacaacaactggggattccggcccaagagactcagcttcaagctcttcaacatccaggtcaaggaggtcacgcagaatgaaggcaccaagaccatcgccaataacctcaccagcaccatccaggtgtttacggactcggagtaccagctgccgtacgttctcggctctgcccaccagggctgcctgcctccgttcccggcggacgtgttcacgattccccagtacggctacctaacactcaacaacggtagtcaggccgtgggacgctcctccttctactgcctggaatactttccttcgcagatgctgagaaccggcaacaacttccagtttacttacaccttcgaggacgtgcctttccacagcagctacgcccacagccagagcttggaccggctgatgaatcctctgattgaccagtacctgtactacttgtctcggattcaaacaacaggaggcacggcaaatacgcagactctgggctccagccaaggtgggcctaatacaatggccaatcaggcaaagaactggctgccaggaccctgttaccgccaacaacgcgtctcaacgacaaccgggcaaaacaacaatagcaactttgcctggactgctgggaccaaataccatctgaatggaagaaattcattggctaatcctggcatcgctatggcaacacacaaagacgacgaggagcgtttttttcccagtaacgggatcctgatttttggcaaacaaaatgctgccagagacaatgcggattacagcgatgtcatgcccaccagcgaggaagaaatcaaaaccactaaccctgtggccacagaggaatacggtatcgtggcagataacttgcagcagcaaaacacggctcctcaaattggaactgtcaacagccagggggccttacccggtatggtctggcagaaccgggacgtgtacctgcagggtcccatctgggccaagattcctcacacggacggcaacttccacccgtctccgctgatgggcggctttggcctgaaacatcctccgcctcagatcctgatcaagaacacgcctgtacctgcggatcctccgaccaccttcaaccagtcaaagctgaactctttcatcacgcaatacagcaccggacaggtcagcgtggaaattgaatgggagctgcagaaggaaaacagcaagcgctggaaccccgagatccagtacacctccaactactacaaatctacaagtgtggactttgctgttaatacagaaggcgtgtactctgaaccccgccccattggcacccgttacctcacccgtaatctgtaa

SEQ ID NO: 3892 - DNA, 2217 bp, synthetic construct
  misc_feature 1..2217: note = source = /note="Description of Artificial Sequence: Synthetic polynucleotide"
  source 1..2217: mol_type = other DNA
atggctgccgatggttatcttccagattggctcgaggacaacctctctgagggcattcgcgagtggtgggcgctgaaacctggagccccgaagcccaaagccaaccagcaaaagcaggacgacggccggggtctggtgcttcctggctacaagtacctcggacccttcaacggactcgacaagggggagcccgtcaacgcggcggacgcggcggccctcgagcacgacaaggcctacgaccagcagctgcaggcgggtgacaatccgtacctgcggtataaccacgccgacgccgagtttcaggagcgtctgcaagaagatacgtcttttgggggcaacctcgggcgagcagtcttccaggccaagaagcgggttctcgaacctctcggtctggttgaggaaggcgctaagacggctcctggaaagaagagaccggtagagccatcaccccagcgttctccagactcctctacgggcatcggcaagaagggccaacagcccgccagaaaaagactcaattttggtcagactggcgactcagagtcagttccagaccctcaacctctcggagaacctccagcagcgccctctggtgtgggacctaatacaatggctgcaggcggtggcgcaccaatggcagacaataacgaaggcgccgacggagtgggtagttcctcgggaaattggcattgcgattccacatggctgggcgacagagtcatcaccaccagcacccgaacctgggccctgcccacctacaacaaccacctctacaagcaaatctccaacgggacatcgggaggagccaccaacgacaacacctacttcggctacagcaccccctgggggtattttgactttaacagattccactgccacttttcaccacgtgactggcagcgactcatcaacaacaactggggattccggcccaagagactcagcttcaagctcttcaacatccaggtcaaggaggtcacgcagaatgaaggcaccaagaccatcgccaataacctcaccagcaccatccaggtgtttacggactcggagtaccagctgccgtacgttctcggctctgcccaccagggctgcctgcctccgttcccggcggacgtgttcacgattccccagtacggctacctaacactcaacaacggtagtcaggccgtgggacgctcctccttctactgcctggaatactttccttcgcagatgctgagaaccggcaacaacttccagtttacttacaccttcgaggacgtgcctttccacagcagctacgcccacagccagagcttggaccggctgatgaatcctctgattggccagtacctgtactacttgtctcggattcaaacaacaggaggcacggcaaatacgcagactctgggcttcagccaaggtgggcctaatacaatggccaatcaggcaaagaactggctgccaggaccctgttaccgccaacaacgcgtctcaacgacaaccgggcaaaacaacaatagcaactttgcctggactgctgggaccaaataccatctgaatggaagaaattcattggctaatcctggcatcgctatggcaacacacaaagacgacgaggagcgtttttttcccagtaacgggatcctgatttttggcaaacaaaatgctgccagagacaatgcggattacagcgatgtcatgcccaccagcgaggaagaaatcaaaaccactaaccctgtggccacagaggaatacggtatcgtggcagataacttgcagcagcaaaacacggctcctcaaattggaactgtcaacagccagggggccttacccggtatggtctggcagaaccgggacgtgtacctgcagggtcccatctgggccaagattcctcacacggacggcaacttccacccgtctccgctgatgggcggctttggcctgaaacatcctccgcctcagatcctgatcaagaacacgcctgtacctgcggatcctccgaccaccttcaaccagtcaaagctgaactctttcatcacgcaatacagcaccggacaggtcagcgtggaaattgaatgggagctgcagaaggaaaacagcaagcgctggaaccccgagatccagtacacctccaactactacaaatctacaagtgtggactttgctgttaatacagaaggcgtgtactctgaaccccgccccattggcacccgttacctcacccgtaatctgtaa

SEQ ID NO: 3893 - DNA, 2217 bp, synthetic construct
  misc_feature 1..2217: note = source = /note="Description of Artificial Sequence: Synthetic polynucleotide"
  source 1..2217: mol_type = other DNA
atggctgccgatggttatcttccagattggctcgaggacaacctctctgagggcattcgcgagtggtgggcgctgaaacctggagccccgaagcccaaagccaaccagcaaaagcaggacgacggccggggtctggtgcttcctggctacaagtacctcggacccttcaacggactcgacaagggggagcccgtcaacgcggcggacgcggcggccctcgagcacgacaaggcctacgaccagcagctgcaggcgggtgacaatccgtacctgcggtataaccacgccgacgccgagtttcaggagcgtctgcaagaagatacgtcttttgggggcaacctcgggcgagcagtcttccaggccaagaagcgggttctcgaacctctcggtctggttgaggaaggcgctaagacggctcctggaaagaagagaccggtagagccatcaccccagcgttctccagactcctctacgggcatcggcaagaagggccaacagcccgccagaaaaagactcaattttggtcagactggcgactcagagtcagttccagaccctcaacctctcggagaacctccagcagcgccctctggtgtgggacctaatacaatggctgcaggcggtggcgcaccaatggcagacaataacgaaggcgccgacggagtgggtagttcctcgggaaattggcattgcgattccacatggctgggcgacagagtcatcaccaccagcacccgaacctgggccctgcccacctacaacaaccacctctacaagcaaatctccaacgggacatcgggaggagccaccaacgacaacacctacttcggctacagcaccccctgggggtattttgactttaacagattccactgccacttttcaccacgtgactggcagcgactcatcaacaacaactggggattccggcccaagagacccagcttcaagctcttcaacatccaggtcaaggaggtcacgcagaatgaaggcaccaagaccatcgccaataacctcaccagcaccatccaggtgtttacggactcggagtaccagctgccgtacgttctcggctctgcccaccagggctgcctgcctccgttcccggcggacgtgttcacgattccccagtacggctacctaacactcaacaacggtagtcaggccgtgggacgctcctccttctactgcctggaatactttccttcgcagatgctgagaaccggcaacaacttccagtttacttacaccttcgaggacgtgcctttccacagcagctacgcccacagccagagcttggaccggctgatgaatcctctgattgaccagtacctgtactacttgtctcggattcaaacaacaggaggcacggcaaatacgcagactctgggcttcagccaaggtgggcctaatacaatggccaatcaggcaaagaactggctgccaggaccctgttaccgccaacaacgcgtctcaacgacaaccgggcaaaacaacaatagcaactttgcctggactgctgggaccaaataccatctgaatggaagaaattcattggctaatcctggcatcgctatggcaacacacaaagacgacgaggagcgtttttttcccagtaacgggatcctgatttttggcaaacaaaatgctgccagagacaatgcggattacagcgatgtcatgcccaccagcgaggaagaaatcaaaaccactaaccctgtggccacagaggaatacggtatcgtggcagataacttgcagcagcaaaacacggctcctcaaattggaactgtcaacagccagggggccttacccggtatggtctggcagaaccgggacgtgtacctgcagggtcccatctgggccaagattcctcacacggacggcaacttccacccgtctccgctgatgggcggctttggcctgaaacatcctccgcctcagatcctgatcaagaacacgcctgtacctgcggatcctccgaccaccttcaaccagtcaaagctgaactctttcatcacgcaatacagcaccggacaggtcagcgtggaaattgaatgggagctgcagaaggaaaacagcaagcgctggaaccccgagatccagtacacctccaactactacaaatctacaagtgtggactttgctgttaatacagaaggcgtgtactctgaaccccgccccattggcacccgttacctcacccgtaatctgtaa

SEQ ID NO: 3894 - DNA, 2217 bp, synthetic construct
  misc_feature 1..2217: note = source = /note="Description of Artificial Sequence: Synthetic polynucleotide"
  source 1..2217: mol_type = other DNA
atggctgccgatggttatcttccagattggctcgaggacaacctctctgagggcattcgcgagtggtgggcgctgaaacctggagccccgaagcccaaagccaaccagcaaaagcaggacgacggccggggtctggtgcttcctggctacaagtacctcggacccttcaacggactcgacaagggggagcccgtcaacgcggcggacgcggcggccctcgagcacgacaaggcctacgaccagcagctgcaggcgggtgacaatccgtacctgcggtataaccacgccgacgccgagtttcaggagcgtctgcaagaagatacgtcttttgggggcaacctcgggcgagcagtcttccaggccaagaagcgggttctcgaacctctcggtctggttgaggaaggcgctaagacggctcctggaaagaagagaccggtagagccatcaccccagcgttctccagactcctctacgggcatcggcaagaagggccaacagcccgccagaaaaagactcaattttggtcagactggcgactcagagtcagttccagaccctcaacctctcggagaacctccagcagcgccctctggtgtgggacctaatacaatggctgcaggcggtggcgcaccaatggcagacaataacgaaggcgccgacggagtgggtagttcctcgggaaattggcattgcgattccacatggctgggcgacagagtcatcaccaccagcacccgaacctgggccctgcccacctacaacaaccacctctacaagcaaatctccaacgggacatcgggaggagccaccaacgacaacacctacttcggctacagcaccccctgggggtattttgactttaacagattccactgccacttttcaccacgtgactggcagcgactcatcaacaacaactggggattccggcccaagagactcagcttcaagctcttcaacatccaggtcaaggaggtcacgcagaatgaaggcaccaagaccatcgccaataacctcaccagcaccatccaggtgtttacggactcggagtaccagctgccgtacgttctcggctctgcccaccagggctgcctgcctccgttcccggcggacgtgttcacgattccccagtacggctacctaacactcaacaacggtagtcaggccgtgggacgctcctccttctactgcctggaatactttccttcgcagatgctgagaaccggcaacaacttccagtttacttacaccttcgaggacgtgcctttccacagcagctacgcccacagccagagcttggaccggctgatgaatcctctgattgaccagtacctgtactacttgtctcggattcaaacaacaggaggcacggcaaatacgcagactctgggcttcagccaaggtgggcctaatacaatggccaatcaggcaaagaactggctgccaggaccctgttaccgccaacaacgcgtctcaacgacaaccgggcaaaacaacaatagcaactttgcctggactgctgggaccaaataccatctgaatggaagaaattcattggctaatcctggcatcgctatggcaacacacaaagacgacggggagcgtttttttcccagtaacgggatcctgatttttggcaaacaaaatgctgccagagacaatgcggattacagcgatgtcatgcccaccagcgaggaagaaatcaaaaccactaaccctgtggccacagaggaatacggtatcgtggcagataacttgcagcagcaaaacacggctcctcaaattggaactgtcaacagccagggggccttacccggtatggtctggcagaaccgggacgtgtacctgcagggtcccatctgggccaagattcctcacacggacggcaacttccacccgtctccgctgatgggcggctttggcctgaaacatcctccgcctcagatcctgatcaagaacacgcctgtacctgcggatcctccgaccaccttcaaccagtcaaagctgaactctttcatcacgcaatacagcaccggacaggtcagcgtggaaattgaatgggagctgcagaaggaaaacagcaagcgctggaaccccgagatccagtacacctccaactactacaaatctacaagtgtggactttgctgttaatacagaaggcgtgtactctgaaccccgccccattggcacccgttacctcacccgtaatctgtaa

SEQ ID NO: 3895 - DNA, 2217 bp, synthetic construct
  misc_feature 1..2217: note = source = /note="Description of Artificial Sequence: Synthetic polynucleotide"
  source 1..2217: mol_type = other DNA
atggctgccgatggttatcttccagattggctcgaggacaacctctctgagggcattcgcgagtggtgggcgctgaaacctggagccccgaagcccaaagccaaccagcaaaagcaggacgacggccggggtctggtgcttcctggctacaagtacctcggacccttcaacggactcgacaagggggagcccgtcaacgcggcggacgcggcggccctcgagcacgacaaggcctacgaccagcagctgcaggcgggtgacaatccgtacctgcggtataaccacgccgacgccgagtttcaggagcgtctgcaagaagatacgtcttttgggggcaacctcgggcgagcagtcttccaggccaagaagcgggttctcgaacctctcggtctggttgaggaaggcgctaagacggctcctggaaagaagagaccggtagagccatcaccccagcgttctccagactcctctacgggcatcggcaagaagggccaacagcccgccagaaaaagactcaattttggtcagactggcgactcagagtcagttccagaccctcaacctctcggagaacctccagcagcgccctctggtgtgggacctaatacaatggctgcaggcggtggcgcaccaatggcagacaataacgaaggcgccgacggagtgggtagttcctcgggaaattggcattgcgattccacatggctgggcgacagagtcatcaccaccagcacccgaacctgggccccgcccacctacaacaaccacctctacaagcaaatctccaacgggacatcgggaggagccaccaacgacaacacctacttcggctacagcaccccctgggggtattttgactttaacagattccactgccacttttcaccacgtgactggcagcgactcatcaacaacaactggggattccggcccaagagactcagcttcaagctcttcaacatccaggtcaaggaggtcacgcagaatgaaggcaccaagaccatcgccaataacctcaccagcaccatccaggtgtttacggactcggagtaccagctgccgtacgttctcggctctgcccaccagggctgcctgcctccgttcccggcggacgtgttcacgattccccagtacggctacctaacactcaacaacggtagtcaggccgtgggacgctcctccttctactgcctggaatactttccttcgcagatgctgagaaccggcaacaacttccagtttacttacaccttcgaggacgtgcctttccacagcagctacgcccacagccagagcttggaccggctgatgaatcctctgattgaccagtacctgtactacttgtctcggattcaaacaacaggaggcacggcaaatacgcagactctgggcttcagccaaggtgggcctaatacaatggccaatcaggcaaagaactggctgccaggaccctgttaccgccaacaacgcgtctcaacgacaaccgggcaaaacaacaatagcaactttgcctggactgctgggaccaaataccatctgaatggaagaaattcattggctaatcctggcatcgctatggcaacacacaaagacgacgaggagcgtttttttcccagtaacgggatcctgatttttggcaaacaaaatgctgccagagacaatgcggattacagcgatgtcatgcccaccagcgaggaagaaatcaaaaccactaaccctgtggccacagaggaatacggtatcgtggcagataacttgcagcagcaaaacacggctcctcaaattggaactgtcaacagccagggggccttacccggtatggtctggcagaaccgggacgtgtacctgcagggtcccatctgggccaagattcctcacacggacggcaacttccacccgtctccgctgatgggcggctttggcctgaaacatcctccgcctcagatcctgatcaagaacacgcctgtacctgcggatcctccgaccaccttcaaccagtcaaagctgaactctttcatcacgcaatacagcaccggacaggtcagcgtggaaattgaatgggagctgcagaaggaaaacagcaagcgctggaaccccgagatccagtacacctccaactactacaaatctacaagtgtggactttgctgttaatacagaaggcgtgtactctgaaccccgccccattggcacccgttacctcacccgtaatctgtaa

SEQ ID NO: 3896 - DNA, 2217 bp, synthetic construct
  misc_feature 1..2217: note = source = /note="Description of Artificial Sequence: Synthetic polynucleotide"
  source 1..2217: mol_type = other DNA
atggctgccgatggttatcttccagattggctcgaggacaacctctctgagggcattcgcgagtggtgggcgctgaaacctggagccccgaagcccaaagccaaccagcaaaagcaggacgacggccggggtctggtgcttcctggctacaagtacctcggacccttcaacggactcgacaagggggagcccgtcaacgcggcggacgcggcggccctcgagcacgacaaggcctacgaccagcagctgcaggcgggtgacaatccgtacctgcggtataaccacgccgacgccgagtttcaggagcgtctgcaagaagatacgtcttttgggggcaacctcgggcgagcagtcttccaggccaagaagcgggttctcgaacctctcggtctggttgaggaaggcgctaagacggctcctggaaagaagagaccggtagagccatcaccccagcgttctccagactcctctacgggcatcggcaagaagggccaacagcccgccagaaaaagactcaattttggtcagactggcgactcagagtcagttccagaccctcaacctctcggagaacctccagcagcgccctctggtgtgggacctaatacaatggctgcaggcggtggcgcaccaatggcagacaataacgaaggcgccgacggagtgggtagttcctcgggaaattggcattgcgattccacatggctgggcgacagagtcatcaccaccagcacccgaacctgggccctgcccacctacaacaaccacctctacaagcaaatctccaacgggacatcgggaggagccaccaacgacaacacctacttcggctacagcaccccctgggggtattttgactttaacagattccactgccacttttcaccacgtgactggcagcgactcatcaacaacaactggggattccggcccaagagactcggcttcaagctcttcaacatccaggtcaaggaggtcacgcagaatgaaggcaccaagaccatcgccaataacctcaccagcaccatccaggtgtttacggactcggagtaccagctgccgtacgttctcggctctgcccaccagggctgcctgcctccgttcccggcggacgtgttcacgattccccagtacggctacctaacactcaacaacggtagtcaggccgtgggacgctcctccttctactgcctggaatactttccttcgcagatgctgagaaccggcaacaacttccagtttacttacaccttcgaggacgtgcctttccacagcagctacgcccacagccagagcttggaccggctgatgaatcctctgattgaccagtacctgtactacttgtctcggattcaaacaacaggaggcacggcaaatacgcagactctgggcttcagccaaggtgggcctaatacaatggccaatcaggcaaagaactggctgccaggaccctgttaccgccaacaacgcgtctcaacgacaaccgggcaaaacaacaatagcaactttgcctggactgctgggaccaaataccacctgaatggaagaaattcattggctaatcctggcatcgctatggcaacacacaaagacgacgaggagcgtttttttcccagtaacgggatcctgatttttggcaaacaaaatgctgccagagacaatgcggattacagcgatgtcatgcccaccagcgaggaagaaatcaaaaccactaaccctgtggccacagaggaatacggtatcgtggcagataacttgcagcagcaaaacacggctcctcaaattggaactgtcaacagccagggggccttacccggtatggtctggcagaaccgggacgtgtacctgcagggtcccatctgggccaagattcctcacacggacggcaacttccacccgtctccgctgatgggcggctttggcctgaaacatcctccgcctcagatcctgatcaagaacacgcctgtacctgcggatcctccgaccaccttcaaccagtcaaagctgaactctttcatcacgcaatacagcaccggacaggtcagcgtggaaattgaatgggagctgcagaaggaaaacagcaagcgctggaaccccgagatccagtacacctccaactactacaaatctacaagtgtggactttgctgttaatacagaaggcgtgtactctgaaccccgccccattggcacccgttacctcacccgtaatctgtaa

SEQ ID NO: 3897 - DNA, 2217 bp, synthetic construct
  misc_feature 1..2217: note = source = /note="Description of Artificial Sequence: Synthetic polynucleotide"
  source 1..2217: mol_type = other DNA
atggctgccgatggttatcttccagattggctcgaggacaacctctctgagggcattcgcgagtggtgggcgctgaaacctggagccccgaagcccaaagccaaccagcaaaagcaggacgacggccggggtctggtgcttcctggctacaagtacctcggacccttcaacggactcgacaagggggagcccgtcaacgcggcggacgcggcggccctcgagcacgacaaggcctacgaccagcagctgcaggcgggtgacaatccgtacctgcggtataaccacgccgacgccgagtttcaggagcgtctgcaagaagatacgtcttttgggggcaacctcgggcgagcagtcttccaggccaagaagcgggttctcgaacctctcggtctggttgaggaaggcgctaagacggctcctggaaagaagagaccggtagagccatcaccccagcgttctccagactcctctacgggcatcggcaagaagggccaacagcccgccagaaaaagactcaattttggtcggactggcgactcagagtcagttccagaccctcaacctctcggagaacctccagcagcgccctctggtgtgggacctaatacaatggctgcaggcggtggcgcaccaatggcagacaataacgaaggcgccgacggagtgggtagttcctcgggaaattggcattgcgattccacatggctgggcgacagagtcatcaccaccagcacccgaacctgggccctgcccacctacaacaaccacctctacaagcaaatctccaacgggacatcgggaggagccaccaacgacaacacctacttcggctacagcaccccctgggggtattttgactttaacagattccactgccacttttcaccacgtgactggcagcgactcatcaacaacaactggggattccggcccaagagactcagcttcaagctcttcaacatccaggtcaaggaggtcacgcagaatgaaggcaccaagaccatcgccaataacctcaccagcaccatccaggtgtttacggactcggagtaccagctgccgtacgttctcggctctgcccaccagggctgcctgcctccgttcccggcggacgtgttcacgattccccagtacggctacctaacactcaacaacggtagtcaggccgtgggacgctcctccttctactgcctggaatactttccttcgcagatgctgagaaccggcaacaacttccagtttacttacaccttcgaggacgtgcctttccacagcagctacgcccacagccagagcttggaccggctgatgaatcctctgattgaccagtacctgtactacttgtctcggattcaaacaacaggaggcacggcaaatacgcagactctgggcttcagccaaggtgggcctaatacaatggccaatcaggcaaagaactggctgccaggaccctgttaccgccaacaacgcgtctcaacgacaaccgggcaaaacaacaatagcaactttgcctggactgctgggaccaaataccatctgaatggaagaaattcattggctaatcctggcatcgctatggcaacacacaaagacgacgaggagcgtttttttcccagtaacgggatcctgatttttggcaaacaaaatgctgccagagacaatgcggattacagcgatgtcatgcccaccagcgaggaagaaatcaaaaccactaaccctgtggccacagaggaatacggtatcgtggcagataacttgcagcagcaaaacacggctcctcaaattggaactgtcaacagccagggggccttacccggtatggtctggcagaaccgggacgtgtacctgcagggtcccatctgggccaagattcctcacacggacggcaacttccacccgtctccgctgatgggcggctttggcctgaaacatcctccgcctcagatcctgatcaagaacacgcctgtacctgcggatcctccgaccaccttcaaccagtcaaagctgaactctttcatcacgcaatacagcaccggacaggtcagcgtggaaattgaatgggagctgcagaaggaaaacagcaagcgctggaaccccgagatccagtacacctccaactactacaaatctacaagtgtggactttgctgttaatacagaaggcgtgtactctgaaccccgccccattggcacccgttacctcacccgtaatctgtaa

SEQ ID NO: 3898 - DNA, 2217 bp, synthetic construct
  misc_feature 1..2217: note = source = /note="Description of Artificial Sequence: Synthetic polynucleotide"
  source 1..2217: mol_type = other DNA
atggctgccgatggttatcttccagattggctcgaggacaacctctctgagggcattcgcgagtggtgggcgctgaaacctggagccccgaagcccaaagccaaccagcaaaagcaggacgacggccggggtctggtgcttcctggctacaagtacctcggacccttcaacggactcgacaagggggagcccgtcaacgcggcggacgcggcggccctcgagcacgacaaggcctacgaccagcagctgcaggcgggtgacaatccgtacctgcggtataaccacgccgacgccgagtttcaggagcgtctgcaagaagatacgtcttttgggggcaacctcgggcgagcagtcttccaggccaagaagcgggttctcgaacctctcggtctggttgaggaaggcgctaagacggctcctggaaagaagagaccggtagagccatcaccccagcgttctccagactcctctacgggcatcggcaagaagggccaacagcccgccagaaaaagactcaattttggtcagactggcgactcagagtcagttccagaccctcaacctctcggagaacctccagcagcgccctctggtgtgggacctaatacaatggctgcaggcggtggcgcaccaatggcagacaataacgaaggcgccgacggagtgggtagttcctcgggaaattggcattgcgattccacatggctgggcgacagagtcatcaccaccagcacccgaacctgggccctgcccacctacaacaaccacctctacaagcaaatctccaacgggacatcgggaggagccaccaacgacaacacctacttcggctacagcaccccctgggggtattttgactttaacagattccactgccacttttcaccacgtgactggcagcgactcatcaacaacaactggggattccggcccaagagactcagcttcaagctcttcaacatccaggtcaaggaggtcacgcagaatgaaggcaccaagaccatcgccaataacctcaccagcaccatccaggtgtttacggactcggagtaccagctgccgtacgttctcggctctgcccaccagggctgcctgcctccgttcccggcggacgtgttcacgattccccagtacggctacctaacactcaacaacggtagtcaggccgtgggacgctcctccttctactgcctggaatactttccttcgcagatgctgagaaccggcaacaacttccagtttacttacaccttcgaggacgtgcctttccacagcagctacgcccacagccagagcttggaccggctgatgaatcctctgattgaccagtacctgtactacttgtctcggattcaaacaacaggaggcacggcaaatacgcagactctgggcttcagccaaggtgggcctaatacagtggccaatcaggcaaagaactggctgccaggaccctgttaccgccaacaacgcgtctcaacgacaaccgggcaaaacaacaatagcaactttgcctggactgctgggaccaaataccatctgaatggaagaaattcattggctaatcctggcatcgctatggcaacacacaaagacgacgaggagcgtttttttcccagtaacgggatcctgatttttggcaaacaaaatgctgccagagacaatgcggattacagcgatgtcatgcccaccagcgaggaagaaatcaaaaccactaaccctgtggccacagaggaatacggtatcgtggcagataacttgcagcagcaaaacacggctcctcaaattggaactgtcaacagccagggggccttacccggtatggtctggcagaaccgggacgtgtacctgcagggtcccatctgggccaagattcctcacacggacggcaacttccacccgtctccgctgatgggcggctttggcctgaaacatcctccgcctcagatcctgatcaagaacacgcctgtacctgcggatcctccgaccaccttcaaccagtcaaagctgaactctttcatcacgcaatacagcaccggacaggtcagcgtggaaattgaatgggagctgcagaaggaaaacagcaagcgctggaaccccgagatccagtacacctccaactactacaaatctacaagtgtggactttgctgttaatacagaaggcgtgtactctgaaccccgccccattggcacccgttacctcacccgtaatctgtaa

SEQ ID NO: 3899 - DNA, 2217 bp, synthetic construct
  misc_feature 1..2217: note = source = /note="Description of Artificial Sequence: Synthetic polynucleotide"
  source 1..2217: mol_type = other DNA
atggctgccgatggttatcttccagattggctcgaggacaacctctctgagggcattcgcgagtggtgggcgctgaaacctggagccccgaagcccaaagccaaccagcaaaagcaggacgacggccggggtctggtgcttcctggctacaagtacctcggacccttcaacggactcgacaagggggagcccgtcaacgcggcggacgcggcggccctcgagcacgacaaggcctacgaccagcagctgcaggcgggtgacaatccgtacctgcggtataaccacgccgacgccgagtttcaggagcgtctgcaagaagatacgtcttttgggggcaacctcgggcgagcagtcttccaggccaagaagcgggttctcgaacctctcggtctggttgaggaaggcgctaagacggctcctggaaagaagagaccggtagagccatcaccccagcgttctccagactcctctacgggcatcggcaagaagggccaacagcccgccagaaaaagactcaattttggtcagactggcgactcagagtcagttccagaccctcaacctctcggagaacctccagcagcgccctctggtgtgggacctaatacaatggctgcaggcggtggcgcaccaatggcagacaataacgaaggcgccgacggagtgggtagttcctcgggaaattggcattgcgattccacatggctgggcgacagagtcatcaccaccagcacccgaacctgggccctgcccacctacaacaaccacctctacaagcaaatctccaacgggacatcgggaggagccaccaacgacaacacctacttcggctacagcaccccctgggggtattttgactttaacagattccactgccacttttcaccacgtgactggcagcgactcatcaacaacaactggggattccggcccaagagactcagcttcaagctcttcaacatccaggtcaaggaggtcacgcagaatgaaggcaccaagaccatcgccaataacctcaccagcaccatccaggtgtttacggactcggagtaccagctgccgtacgttctcggctctgcccaccagggctgcctgcctccgttcccggcggacgtgttcacgattccccagtacggctacctaacactcaacaacggtagtcaggccgtgggacgctcctccttctactgcccggaatactttccttcgcagatgctgagaaccggcaacaacttccagtttacttacaccttcgaggacgtgcctttccacagcagctacgcccacagccagagcttggaccggctgatgaatcctctgattgaccagtacctgtactacttgtctcggattcaaacaacaggaggcacggcaaatacgcagactctgggcttcagccaaggtgggcctaatacaatggccaatcaggcaaagaactggctgccaggaccctgttaccgccaacaacgcgtctcaacgacaaccgggcaaaacaacaatagcaactttgcctggactgctgggaccaaataccatctgaatggaagaaattcattggctaatcctggcatcgctatggcaacacacaaagacgacgaggagcgtttttttcccagtaacgggatcctgatttttggcaaacaaaatgctgccagagacaatgcggattacagcgatgtcatgcccaccagcgaggaagaaatcaaaaccactaaccctgtggccacagaggaatacggtatcgtggcagataacttgcagcagcaaaacacggctcctcaaattggaactgtcaacagccagggggccttacccggtatggtctggcagaaccgggacgtgtacctgcagggtcccatctgggccaagattcctcacacggacggcaacttccacccgtctccgctgatgggcggctttggcctgaaacatcctccgcctcagatcctgatcaagaacacgcctgtacctgcggatcctccgaccaccttcaaccagtcaaagctgaactctttcatcacgcaatacagcaccggacaggtcagcgtggaaattgaatgggagctgcagaaggaaaacagcaagcgctggaaccccgagatccagtacacctccaactactacaaatctacaagtgtggactttgctgttaatacagaaggcgtgtactctgaaccccgccccattggcacccgttacctcacccgtaatctgtaa

SEQ ID NO: 3900 - DNA, 2217 bp, synthetic construct
  misc_feature 1..2217: note = source = /note="Description of Artificial Sequence: Synthetic polynucleotide"
  source 1..2217: mol_type = other DNA
atggctgccgatggttatcttccagattggctcgaggacaacctctctgagggcattcgcgagtggtgggcgctgaaacctggagccccgaagcccaaagccaaccagcaaaagcaggacgacggccggggtctggtgcttcctggctacaagtacctcggacccttcaacggactcgacaagggggagcccgtcaacgcggcggacgcggcggccctcgagcacgacaaggcctacgaccagcagctgcaggcgggtgacaatccgtacctgcggtataaccacgccgacgccgagtttcaggagcgtctgcaagaagatacgtcttttgggggcaacctcgggcgagcagtcttccaggccaagaagcgggttctcgaacctctcggtctggttgaggaaggcgctaagacggctcctggaaagaagagaccggtagagccatcaccccagcgttctccagactcctctacgggcatcggcaagaagggccaacagcccgccagaaaaagactcaattttggtcagactggcgactcagagtcagttccagaccctcaacctctcggagaacctccagcagcgccctctggtgtgggacctaatacaatggctgcaggcggtggcgcaccaatggcagacaataacgaaggcgccgacggagtgggtagttcctcgggaaattggcattgcgattccacatggctgggcgacagagtcatcaccaccagcacccgaacctgggccctgcccacctacaacaaccacctctacaagcaaatctccaacgggacatcgggaggagccaccaacgacaacacctacttcggctacagcaccccctgggggtattttgactttaacagattccactgccacttttcaccacgtgactggcagcgactcatcaacaacaactggggattccggcccaagagactcagcttcaagctcttcaacatccaggtcaaggaggtcacgcagaatgaaggcaccaagaccatcgccaataacctcaccagcaccatccaggtgtttacggactcggagtaccagctgccgtacgttctcggctctgcccaccagggctgcctgcctccgttcccggcggacgtgttcacgattccccagtacggctacctaacactcaacaacggtagtcaggccgtgggacgctcctccttctactgcctggaatactttccttcgcagatgctgagaaccggcaacaacttccagtttacttacaccttcgaggacgtgcctttccacagcagctacgcccacagccagagcttggaccggctgatgaatcctctgattgaccagtacctgtactacttgtctcggattcaaacaacaggaggcacggcaaatacgcagactctgggcttcagccaaggtgggcctaatacaatggccaatcaggcaaagaactggctgccaggaccctgttaccgccaacaacgcgtctcaacgacaaccgggcaaaacaacaatagcaactttgcctggactgctgggaccaaataccatctgaatggaagaaattcattggctaatcctggcatcgctatggcaacacacaaagacgacgaggagcgtttttttcccagtaacgggatcctgatttttggcaaacaaaatgctgccagagacaatgcggattacagcgatgtcatgcccaccagcgaggaagaaatcaaaaccactaaccctgtggccacagaggaatacggtatcgtggcagatagcttgcagcagcaaaacacggctcctcaaattggaactgtcaacagccagggggccttacccggtatggtctggcagaaccgggacgtgtacctgcagggtcccatctgggccaagattcctcacacggacggcaacttccacccgtctccgctgatgggcggctttggcctgaaacatcctccgcctcagatcctgatcaagaacacgcctgtacctgcggatcctccgaccaccttcaaccagtcaaagctgaactctttcatcacgcaatacagcaccggacaggtcagcgtggaaattgaatgggagctgcagaaggaaaacagcaagcgctggaaccccgagatccagtacacctccaactactacaaatctacaagtgtggactttgctgttaatacagaaggcgtgtactctgaaccccgccccattggcacccgttacctcacccgtaatctgtaa

SEQ ID NO: 3901 - DNA, 2217 bp, synthetic construct
  misc_feature 1..2217: note = source = /note="Description of Artificial Sequence: Synthetic polynucleotide"
  source 1..2217: mol_type = other DNA
atggctgccgatggttatcttccagattggctcgaggacaacctctctgagggcattcgcgagtggtgggcgctgaaacctggagccccgaagcccaaagccaaccagcaaaagcagggcgacggccggggtctggtgcttcctggctacaagtacctcggacccttcaacggactcgacaagggggagcccgtcaacgcggcggacgcggcggccctcgagcacgacaaggcctacgaccagcagctgcaggcgggtgacaatccgtacctgcggtataaccacgccgacgccgagtttcaggagcgtctgcaagaagatacgtcttttgggggcaacctcgggcgagcagtcttccaggccaagaagcgggttctcgaacctctcggtctggttgaggaaggcgctaagacggctcctggaaagaagagaccggtagagccatcaccccagcgttctccagactcctctacgggcatcggcaagaagggccaacagcccgccagaaaaagactcaattttggtcagactggcgactcagagtcagttccagaccctcaacctctcggagaacctccagcagcgccctctggtgtgggacctaatacaatggctgcaggcggtggcgcaccaatggcagacaataacgaaggcgccgacggagtgggtagttcctcgggaaattggcattgcgattccacatggctgggcgacagagtcatcaccaccagcacccgaacctgggccctgcccacctacaacaaccacctctacaagcaaatctccaacgggacatcgggaggagccaccaacgacaacacctacttcggctacagcaccccctgggggtattttgactttaacagattccactgccacttttcaccacgtgactggcagcgactcatcaacaacaactggggattccggcccaagagactcagcttcaagctcttcaacatccaggtcaaggaggtcacgcagaatgaaggcaccaagaccatcgccaataacctcaccagcaccatccaggtgtttacggactcggagtaccagctgccgtacgttctcggctctgcccaccagggctgcctgcctccgttcccggcggacgtgttcacgattccccagtacggctacctaacactcaacaacggtagtcaggccgtgggacgctcctccttctactgcctggaatactttccttcgcagatgctgagaaccggcaacaacttccagtttacttacaccttcgaggacgtgcctttccacagcagctacgcccacagccagagcttggaccggctgatgaatcctctgattgaccagtacctgtactacttgtctcggattcaaacaacaggaggcacggcaaatacgcagactctgggcttcagccaaggtgggcctaatacaatggccaatcaggcaaagaactggctgccaggaccctgttaccgccaacaacgcgtctcaacgacaaccgggcaaaacaacaatagcaactttgcctggactgctgggaccaaataccatctgaatggaagaaattcattggctaatcctggcatcgctatggcaacacacaaagacgacgaggagcgtttttttcccagtaacgggatcctgatttttggcaaacaaaatgctgccagagacaatgcggattacagcgatgtcatgcccaccagcgaggaagaaatcaaaaccactaaccctgtggccacagaggaatacggtatcgtggcagataacttgcagcagcaaaacacggctcctcaaattggaactgtcaacagccagggggccttacccggtatggtctggcagaaccgggacgtgtacctgcagggtcccatctgggccaagattcctcacacggacggcaacttccacccgtctccgctgatgggcggctttggcctgaaacatcctccgcctcagatcctgatcaagaacacgcctgtacctgcggatcctccgaccaccttcaaccagtcaaagctgaactctttcatcacgcaatacagcaccggacaggtcagcgtggaaattgaatgggagctgcagaaggaaaacagcaagcgctggaaccccgagatccagtacacctccaactactacaaatctacaagtgtggactttgctgttaatacagaaggcgtgtactctgaaccccgccccattggcacccgttacctcacccgtaatctgtaa

SEQ ID NO: 3902 - DNA, 2217 bp, synthetic construct
  misc_feature 1..2217: note = source = /note="Description of Artificial Sequence: Synthetic polynucleotide"
  source 1..2217: mol_type = other DNA
atggctgccgatggttatcttccagattggctcgaggacaacctctctgagggcattcgcgagtggtgggcgctgaaacctggagccccgaagcccaaagccaaccagcaaaagcaggacgacggccggggtctggtgcttcctggctacaagtacctcggacccttcaacggactcgacaagggggagcccgtcaacgcggcggacgcggcggccctcgagcacgacaaggcctacgaccagcagctgcaggcgggtgacaatccgtacctgcggtataaccacgccgacgccgagtttcaggagcgtctgcaagaagatacgtcttttgggggcaacctcgggcgagcagtcttccaggccaagaagcgggttctcgaacctctcggtctggttgaggaaggcgctaagacggctcctggaaagaagagaccggtagagccatcaccccagcgttctccagactcctctacgggcatcggcaagaagggccaacagcccgccagaaaaagactcaattttggtcagactggcgactcagagtcagttccagaccctcaacctctcggagaacctccagcagcgccctctggtgtgggacctaatacaatggctgcaggcggtggcgcaccaatggcagacaataacgaaggcgccgacggagtgggtagttcctcgggaaattggcattgcgattccacatggctgggcgacagagtcatcaccaccagcacccgaacctgggccctgcccacctacaacaaccacctctacaagcaaatctccaacgggacatcgggaggagccaccaacgacaacacctacttcggctacagcaccccctgggggtattttgactttaacagattccactgccacttttcaccacgtgactggcagcgactcatcaacaacaactggggattccggcccaagagactcagctccaagctcttcaacatccaggtcaaggaggtcacgcagaatgaaggcaccaagaccatcgccaataacctcaccagcaccatccaggtgtttacggactcggagtaccagctgccgtacgttctcggctctgcccaccagggctgcctgcctccgttcccggcggacgtgttcacgattccccagtacggctacctaacactcaacaacggtagtcaggccgtgggacgctcctccttctactgcctggaatactttccttcgcagatgctgagaaccggcaacaacttccagtttacttacaccttcgaggacgtgcctttccacagcagctacgcccacagccagagcttggaccggctgatgaatcctctgattgaccagtacctgtactacttgtctcggattcaaacaacaggaggcacggcaaatacgcagactctgggcttcagccaaggtgggcctaatacaatggccaatcaggcaaagaactggctgccaggaccctgttaccgccaacaacgcgtctcaacgacaaccgggcaaaacaacaatagcaactttgcctggactgctgggaccaaataccatctgaatggaagaaattcattggctaatcctggcatcgctatggcaacacacaaagacgacgaggagcgtttttttcccagtaacgggatcctgatttttggcaaacaaaatgctgccagagacaatgcggattacagcgatgtcatgcccaccagcgaggaagaaatcaaaaccactaaccctgtggccacagaggaatacggtatcgtggcagataacttgcagcagcaaaacacggctcctcaaattggaactgtcaacagccagggggccttacccggtatggtctggcagaaccgggacgtgtacctgcagggtcccatctgggccaagattcctcacacggacggcaacttccacccgtctccgctgatgggcggctttggcctgaaacatcctccgcctcagatcctgatcaagaacacgcctgtacctgcggatcctccgaccaccttcaaccagtcaaagctgaactctttcatcacgcaatacagcaccggacaggtcagcgtggaaattgaatgggagctgcagaaggaaaacagcaagcgctggaaccccgagatccagtacacctccaactactacaaatctacaagtgtggactttgctgttaatacagaaggcgtgtactctgaaccccgccccattggcacccgttacctcacccgtaatctgtaa

SEQ ID NO: 3903 - DNA, 2217 bp, synthetic construct
  misc_feature 1..2217: note = source = /note="Description of Artificial Sequence: Synthetic polynucleotide"
  source 1..2217: mol_type = other DNA
atggctgccgatggttatcttccagattggctcgaggacaacctctctgagggcattcgcgagtggtgggcgctgaaacctggagccccgaagcccaaagccaaccagcaaaagcaggacgacggccggggtctggtgcttcctggctacaagtacctcggacccttcaacggactcgacaagggggagcccgtcaacgcggcggacgcggcggccctcgagcacgacaaggcctacgaccagcagctgcaggcgggtgacaatccgtacctgcggtataaccacgccgacgccgagtttcaggagcgtctgcaagaagatacgtcttttgggggcaacctcgggcgagcagtcttccaggccaagaagcgggttctcgaacctctcggtctggttgaggaaggcgctaagacggctcctggaaagaagagaccggtagagccatcaccccagcgttctccagactcctctacgggcatcggcaagaagggccaacagcccgccagaaaaagactcaattttggtcagactggcgactcagagtcagttccagaccctcaacctctcggagaacctccagcagcgccctctggtgtgggacctaatacaatggctgcaggcggtggcgcaccaatggcagacaataacgaaggcgccgacggagtgggtagttcctcgggaaattggcattgcgattccacatggctgggcgacagagtcatcaccaccagcacccgaacctgggccctgcccacctacaacaaccacctctacaagcaaatctccaacgggacatcgggaggagccaccaacgacaacacctacttcggctacagcaccccctgggggtattttgactttaacagattccactgccacttttcaccacgtgactggcagcgactcatcaacaacaactggggattccggcccaagagactcagcttcaagctcttcaacatccaggtcaaggaggtcacgcagaatgaaggcaccaagaccatcgccaataacctcaccagcaccatccaggtgtttacggactcggagtaccagctgccgtacgttctcggctctgcccaccagggctgcctgcctccgttcccggcggacgtgttcacgattccccagtacggctacctaacactcaacaacggtagtcaggccgtgggacgctcctccttctactgcctggaatactttccttcgcagatgctgagaaccggcaacaacttccagtttacttacgccttcgaggacgtgcctttccacagcagctacgcccacagccagagcttggaccggctgatgaatcctctgattgaccagtacctgtactacttgtctcggattcaaacaacaggaggcacggcaaatacgcagactctgggcttcagccaaggtgggcctaatacaatggccaatcaggcaaagaactggctgccaggaccctgttaccgccaacaacgcgtctcaacgacaaccgggcaaaacaacaatagcaactttgcctggactgctgggaccaaataccatctgaatggaagaaattcattggctaatcctggcatcgctatggcaacacacaaagacgacgaggagcgtttttttcccagtaacgggatcctgatttttggcaaacaaaatgctgccagagacaatgcggattacagcgatgtcatgcccaccagcgaggaagaaatcaaaaccactaaccctgtggccacagaggaatacggtatcgtggcagataacttgcagcagcaaaacacggctcctcaaattggaactgtcaacagccagggggccttacccggtatggtctggcagaaccgggacgtgtacctgcagggtcccatctgggccaagattcctcacacggacggcaacttccacccgtctccgctgatgggcggctttggcctgaaacatcctccgcctcagatcctgatcaagaacacgcctgtacctgcggatcctccgaccaccttcaaccagtcaaagctgaactctttcatcacgcaatacagcaccggacaggtcagcgtggaaattgaatgggagctgcagaaggaaaacagcaagcgctggaaccccgagatccagtacacctccaactactacaaatctacaagtgtggactttgctgttaatacagaaggcgtgtactctgaaccccgccccattggcacccgttacctcacccgtaatctgtaa

SEQ ID NO: 3904 - DNA, 2217 bp, synthetic construct
  misc_feature 1..2217: note = source = /note="Description of Artificial Sequence: Synthetic polynucleotide"
  source 1..2217: mol_type = other DNA
atggctgccgatggttatcttccagattggctcgaggacaacctctctgagggcattcgcgagtggtgggcgctgaaacctggagccccgaagcccaaagccaaccagcaaaagcaggacgacggccggggtctggtgcttcctggctacaagtacctcggacccttcaacggactcgacaagggggagcccgtcaacgcggcggacgcggcggccctcgagcacgacaaggcctacgaccagcagctgcaggcgggtgacaatccgtacctgcggtataaccacgccgacgccgagtttcaggagcgtctgcaagaagatacgtcttttgggggcaacctcgggcgagcagtcttccaggccaagaagcgggttctcgaacctctcggtctggttgaggaaggcgctaagacggctcctggaaagaagagaccggtagagccatcaccccagcgttctccagactcctctacgggcatcggcaagaagggccaacagcccgccagaaaaagactcaattttggtcagactggcgactcagagtcagttccagaccctcaacctctcggagaacctccagcagcgccctctggtgtgggacctaatacaatggctgcaggcggtggcgcaccaatggcagacaataacgaaggcgccgacggagtgggtagttcctcgggaaattggcattgcgattccacatggctgggcgacagagtcatcaccaccagcacccgaacctgggccctgcccgcctacaacaaccacctctacaagcaaatctccaacgggacatcgggaggagccaccaacgacaacacctacttcggctacagcaccccctgggggtattttgactttaacagattccactgccacttttcaccacgtgactggcagcgactcatcaacaacaactggggattccggcccaagagactcagcttcaagctcttcaacatccaggtcaaggaggtcacgcagaatgaaggcaccaagaccatcgccaataacctcaccagcaccatccaggtgtttacggactcggagtaccagctgccgtacgttctcggctctgcccaccagggctgcctgcctccgttcccggcggacgtgttcacgattccccagtacggctacctaacactcaacaacggtagtcaggccgtgggacgctcctccttctactgcctggaatactttccttcgcagatgctgagaaccggcaacaacttccagtttacttacaccttcgaggacgtgcctttccacagcagctacgcccacagccagagcttggaccggctgatgaatcctctgattgaccagtacctgtactacttgtctcggattcaaacaacaggaggcacggcaaatacgcagactctgggcttcagccaaggtgggcctaatacaatggccaatcaggcaaagaactggctgccaggaccctgttaccgccaacaacgcgtctcaacgacaaccgggcaaaacaacaatagcaactttgcctggactgctgggaccaaataccatctgaatggaagaaattcattggctaatcctggcatcgctatggcaacacacaaagacgacgaggagcgtttttttcccagtaacgggatcctgatttttggcaaacaaaatgctgccagagacaatgcggattacagcgatgtcatgcccaccagcgaggaagaaatcaaaaccactaaccctgtggccacagaggaatacggtatcgtggcagataacttgcagcagcaaaacacggctcctcaaattggaactgtcaacagccagggggccttacccggtatggtctggcagaaccgggacgtgtacctgcagggtcccatctgggccaagattcctcacacggacggcaacttccacccgtctccgctgatgggcggctttggcctgaaacatcctccgcctcagatcctgatcaagaacacgcctgtacctgcggatcctccgaccaccttcaaccagtcaaagctgaactctttcatcacgcaatacagcaccggacaggtcagcgtggaaattgaatgggagctgcagaaggaaaacagcaagcgctggaaccccgagatccagtacacctccaactactacaaatctacaagtgtggactttgctgttaatacagaaggcgtgtactctgaaccccgccccattggcacccgttacctcacccgtaatctgtaa

SEQ ID NO: 3905 - DNA, 2217 bp, synthetic construct
  misc_feature 1..2217: note = source = /note="Description of Artificial Sequence: Synthetic polynucleotide"
  source 1..2217: mol_type = other DNA
atggctgccgatggttatcttccagattggctcgaggacaacctctctgagggcattcgcgagtggtgggcgctgaaacctggagccccgaagcccaaagccaaccagcaaaagcaggacgacggccggggtctggtgcttcctggctacaagtacctcggacccttcaacggactcgacaagggggagcccgtcaacgcggcggacgcggcggccctcgagcacgacaaggcctacgaccagcagctgcaggcgggtgacaatccgtacctgcggtataaccacgccgacgccgagtttcaggagcgtctgcaagaagatacgtcttttgggggcagcctcgggcgagcagtcttccaggccaagaagcgggttctcgaacctctcggtctggttgaggaaggcgctaagacggctcctggaaagaagagaccggtagagccatcaccccagcgttctccagactcctctacgggcatcggcaagaagggccaacagcccgccagaaaaagactcaattttggtcagactggcgactcagagtcagttccagaccctcaacctctcggagaacctccagcagcgccctctggtgtgggacctaatacaatggctgcaggcggtggcgcaccaatggcagacaataacgaaggcgccgacggagtgggtagttcctcgggaaattggcattgcgattccacatggctgggcgacagagtcatcaccaccagcacccgaacctgggccctgcccacctacaacaaccacctctacaagcaaatctccaacgggacatcgggaggagccaccaacgacaacacctacttcggctacagcaccccctgggggtattttgactttaacagattccactgccacttttcaccacgtgactggcagcgactcatcaacaacaactggggattccggcccaagagactcagcttcaagctcttcaacatccaggtcaaggaggtcacgcagaatgaaggcaccaagaccatcgccaataacctcaccagcaccatccaggtgtttacggactcggagtaccagctgccgtacgttctcggctctgcccaccagggctgcctgcctccgttcccggcggacgtgttcacgattccccagtacggctacctaacactcaacaacggtagtcaggccgtgggacgctcctccttctactgcctggaatactttccttcgcagatgctgagaaccggcaacaacttccagtttacttacaccttcgaggacgtgcctttccacagcagctacgcccacagccagagcttggaccggctgatgaatcctctgattgaccagtacctgtactacttgtctcggattcaaacaacaggaggcacggcaaatacgcagactctgggcttcagccaaggtgggcctaatacaatggccaatcaggcaaagaactggctgccaggaccctgttaccgccaacaacgcgtctcaacgacaaccgggcaaaacaacaatagcaactttgcctggactgctgggaccaaataccatctgaatggaagaaattcattggctaatcctggcatcgctatggcaacacacaaagacgacgaggagcgtttttttcccagtaacgggatcctgatttttggcaaacaaaatgctgccagagacaatgcggattacagcgatgtcatgcccaccagcgaggaagaaatcaaaaccactaaccctgtggccacagaggaatacggtatcgtggcagataacttgcagcagcaaaacacggctcctcaaattggaactgtcaacagccagggggccttacccggtatggtctggcagaaccgggacgtgtacctgcagggtcccatctgggccaagattcctcacacggacggcaacttccacccgtctccgctgatgggcggctttggcctgaaacatcctccgcctcagatcctgatcaagaacacgcctgtacctgcggatcctccgaccaccttcaaccagtcaaagctgaactctttcatcacgcaatacagcaccggacaggtcagcgtggaaattgaatgggagctgcagaaggaaaacagcaagcgctggaaccccgagatccagtacacctccaactactacaaatctacaagtgtggactttgctgttaatacagaaggcgtgtactctgaaccccgccccattggcacccgttacctcacccgtaatctgtaa

SEQ ID NO: 3906 - DNA, 2217 bp, synthetic construct
  misc_feature 1..2217: note = source = /note="Description of Artificial Sequence: Synthetic polynucleotide"
  source 1..2217: mol_type = other DNA
atggctgccgatggttatcttccagattggctcgaggacaacctctctgagggcattcgcgagtggtgggcgctgaaacctggagccccgaagcccaaagccaaccagcaaaagcaggacgacggccggggtctggtgcttcctggctacaagtacctcggacccttcaacggactcgacaagggggagcccgtcaacgcggcggacgcggcggccctcgagcacgacaaggcctacgaccagcagctgcaggcgggtgacaatccgtacctgcggtataaccacgccgacgccgagtttcaggagcgtctgcaagaagatacgtcttttgggggcaacctcgggcgagcagtcttccaggccaagaagcgggttctcgaacctctcggtctggttgaggaaggcgctaagacggctcctggaaagaagagaccggtagagccatcaccccagcgttctccagactcctctacgggcatcggcaagaagggccaacagcccgccagaaaaagactcaattttggtcagactggcgactcagagtcagttccagaccctcaacctctcggagaacctccagcagcgccctctggtgtgggacctaatacaatggctgcaggcggtggcgcaccaatggcagacaataacgaaggcgccgacggagtgggtagttcctcgggaaattggcattgcgattccacatggctgggcgacagagtcatcaccaccagcacccgaacctgggccctgcccacctacaacaaccacctctacaagcaaatctccaacgggacatcgggaggagccaccaacgacaacacctacttcggctacagcaccccctgggggtattttgactttaacagattccactgccacttttcaccacgtgactggcagcgactcatcaacaacaactggggattccggcccaagagactcagcttcaagctcttcaacatccaggtcaaggaggtcacgcagaatgaaggcaccaagaccatcgccaataacctcaccagcaccatccaggtgtttacggactcggagtaccagctgccgtacgttctcggctctgcccaccagggctgcctgcctccgttcccggcggacgtgttcacgattccccagtacggctacctaacactcaacaacggtagtcaggccgtgggacgctcctccttctactgcctggaatactttccttcgcagatgctgagaaccggcaacaacttccagtttacttacaccttcgaggacgtgcctttccacagcagctacgcccacagccagagcttggaccggctgatgaatcctctgattgaccagtacctgtactacttgtctcggattcaaacaacaggaggcacggcaaatacgcagactctgggcttcagccaaggtgggcctaatacaatggccaatcaggcaacgaactggctgccaggaccctgttaccgccaacaacgcgtctcaacgacaaccgggcaaaacaacaatagcaactttgcctggactgctgggaccaaataccatctgaatggaagaaattcattggctaatcctggcatcgctatggcaacacacaaagacgacgaggagcgtttttttcccagtaacgggatcctgatttttggcaaacaaaatgctgccagagacaatgcggattacagcgatgtcatgcccaccagcgaggaagaaatcaaaaccactaaccctgtggccacagaggaatacggtatcgtggcagataacttgcagcagcaaaacacggctcctcaaattggaactgtcaacagccagggggccttacccggtatggtctggcagaaccgggacgtgtacctgcagggtcccatctgggccaagattcctcacacggacggcaacttccacccgtctccgctgatgggcggctttggcctgaaacatcctccgcctcagatcctgatcaagaacacgcctgtacctgcggatcctccgaccaccttcaaccagtcaaagctgaactctttcatcacgcaatacagcaccggacaggtcagcgtggaaattgaatgggagctgcagaaggaaaacagcaagcgctggaaccccgagatccagtacacctccaactactacaaatctacaagtgtggactttgctgttaatacagaaggcgtgtactctgaaccccgccccattggcacccgttacctcacccgtaatctgtaa

SEQ ID NO: 3907 - DNA, 2217 bp, synthetic construct
  misc_feature 1..2217: note = source = /note="Description of Artificial Sequence: Synthetic polynucleotide"
  source 1..2217: mol_type = other DNA
atggctgccgatggttatcttccagattggctcgaggacaacctctctgagggcattcgcgagtggtgggcgctgaaacctggagccccgaagcccaaagccaaccagcaaaagcaggacgacggccggggtctggtgcttcctggctacaagtacctcggacccttcaacggactcgacaagggggagcccgtcaacgcggcggacgcggcggccctcgagcacgacaaggcctacggccagcagctgcaggcgggtgacaatccgtacctgcggtataaccacgccgacgccgagtttcaggagcgtctgcaagaagatacgtcttttgggggcaacctcgggcgagcagtcttccaggccaagaagcgggttctcgaacctctcggtctggttgaggaaggcgctaagacggctcctggaaagaagagaccggtagagccatcaccccagcgttctccagactcctctacgggcatcggcaagaagggccaacagcccgccagaaaaagactcaattttggtcagactggcgactcagagtcagttccagaccctcaacctctcggagaacctccagcagcgccctctggtgtgggacctaatacaatggctgcaggcggtggcgcaccaatggcagacaataacgaaggcgccgacggagtgggtagttcctcgggaaattggcattgcgattccacatggctgggcgacagagtcatcaccaccagcacccgaacctgggccctgcccacctacaacaaccacctctacaagcaaatctccaacgggacatcgggaggagccaccaacgacaacacctacttcggctacagcaccccctgggggtattttgactttaacagattccactgccacttttcaccacgtgactggcagcgactcatcaacaacaactggggattccggcccaagagactcagcttcaagctcttcaacatccaggtcaaggaggtcacgcagaatgaaggcaccaagaccatcgccaataacctcaccagcaccatccaggtgtttacggactcggagtaccagctgccgtacgttctcggctctgcccaccagggctgcctgcctccgttcccggcggacgtgttcacgattccccagtacggctacctaacactcaacaacggtagtcaggccgtgggacgctcctccttctactgcctggaatactttccttcgcagatgctgagaaccggcaacaacttccagtttacttacaccttcgaggacgtgcctttccacagcagctacgcccacagccagagcttggaccggctgatgaatcctctgattgaccagtacctgtactacttgtctcggattcaaacaacaggaggcacggcaaatacgcagactctgggcttcagccaaggtgggcctaatacaatggccaatcaggcaaagaactggctgccaggaccctgttaccgccaacaacgcgtctcaacgacaaccgggcaaaacaacaatagcaactttgcctggactgctgggaccaaataccatctgaatggaagaaattcattggctaatcctggcatcgctatggcaacacacaaagacgacgaggagcgtttttttcccagtaacgggatcctgatttttggcaaacaaaatgctgccagagacaatgcggattacagcgatgtcatgcccaccagcgaggaagaaatcaaaaccactaaccctgtggccacagaggaatacggtatcgtggcagataacttgcagcagcaaaacacggctcctcaaattggaactgtcaacagccagggggccttacccggtatggtctggcagaaccgggacgtgtacctgcagggtcccatctgggccaagattcctcacacggacggcaacttccacccgtctccgctgatgggcggctttggcctgaaacatcctccgcctcagatcctgatcaagaacacgcctgtacctgcggatcctccgaccaccttcaaccagtcaaagctgaactctttcatcacgcaatacagcaccggacaggtcagcgtggaaattgaatgggagctgcagaaggaaaacagcaagcgctggaaccccgagatccagtacacctccaactactacaaatctacaagtgtggactttgctgttaatacagaaggcgtgtactctgaaccccgccccattggcacccgttacctcacccgtaatctgtaa

SEQ ID NO: 3908 - DNA, 2217 bp, synthetic construct
  misc_feature 1..2217: note = source = /note="Description of Artificial Sequence: Synthetic polynucleotide"
  source 1..2217: mol_type = other DNA
atggctgccgatggttatcttccagattggctcgaggacaacctctctgagggcattcgcgagtggtgggcgctgaaacctggagccccgaagcccaaagccaaccagcaaaagcaggacgacggccggggtctggtgcttcctggctacaagtacctcggacccttcaacggactcgacaagggggagcccgtcaacgcggcggacgcggcggccctcgagcacgacaaggcctacgaccagcagctgcaggcgggtgacaatccgtacctgcggtataaccacgccgacgccgagtttcaggagcgtctgcaagaagatacgtcttttgggggcaacctcgggcgagcagtcttccaggccaagaagcgggttctcgaacctctcggtctggttgaggaaggcgctaagacggctcctggaaagaagagaccggtagagccatcaccccagcgttctccagactcctctacgggcatcggcaagaagggccaacagcccgccagaaaaagactcaattttggtcagactggcgactcagagtcagttccagaccctcaacctctcggagaacctccagcagcgccctctggtgtgggacctaatacaatggctgcaggcggtggcgcaccaatggcagacaataacgaaggcgccgacggagtgggtagttcctcgggaaattggcattgcgattccacatggctgggcgacagagtcatcaccaccagcacccgaacctgggccctgcccacctacaacaaccacctctacaagcaaatctccaacgggacatcgggaggagccaccaacgacaacacctacttcggctacagcaccccctgggggtattttgactttaacagattccactgccacttttcaccacgtgactggcagcgactcatcaacaacaactggggattccggcccaagagactcagcttcaagctcctcaacatccaggtcaaggaggtcacgcagaatgaaggcaccaagaccatcgccaataacctcaccagcaccatccaggtgtttacggactcggagtaccagctgccgtacgttctcggctctgcccaccagggctgcctgcctccgttcccggcggacgtgttcacgattccccagtacggctacctaacactcaacaacggtagtcaggccgtgggacgctcctccttctactgcctggaatactttccttcgcagatgctgagaaccggcaacaacttccagtttacttacaccttcgaggacgtgcctttccacagcagctacgcccacagccagagcttggaccggctgatgaatcctctgattgaccagtacctgtactacttgtctcggattcaaacaacaggaggcacggcaaatacgcagactctgggcttcagccaaggtgggcctaatacaatggccaatcaggcaaagaactggctgccaggaccctgttaccgccaacaacgcgtctcaacgacaaccgggcaaaacaacaatagcaactttgcctggactgctgggaccaaataccatctgaatggaagaaattcattggctaatcctggcatcgctatggcaacacacaaagacgacgaggagcgtttttttcccagtaacgggatcctgatttttggcaaacaaaatgctgccagagacaatgcggattacagcgatgtcatgcccaccagcgaggaagaaatcaaaaccactaaccctgtggccacagaggaatacggtatcgtggcagataacttgcagcagcaaaacacggctcctcaaattggaactgtcaacagccagggggccttacccggtatggtctggcagaaccgggacgtgtacctgcagggtcccatctgggccaagattcctcacacggacggcaacttccacccgtctccgctgatgggcggctttggcctgaaacatcctccgcctcagatcctgatcaagaacacgcctgtacctgcggatcctccgaccaccttcaaccagtcaaagctgaactctttcatcacgcaatacagcaccggacaggtcagcgtggaaattgaatgggagctgcagaaggaaaacagcaagcgctggaaccccgagatccagtacacctccaactactacaaatctacaagtgtggactttgctgttaatacagaaggcgtgtactctgaaccccgccccattggcacccgttacctcacccgtaatctgtaa

SEQ ID NO: 3909 - DNA, 2217 bp, synthetic construct
  misc_feature 1..2217: note = source = /note="Description of Artificial Sequence: Synthetic polynucleotide"
  source 1..2217: mol_type = other DNA
atggctgccgatggttatcttccagattggctcgaggacaacctctctgagggcattcgcgagtggtgggcgctgaaacctggagccccgaagcccaaagccaaccagcaaaagcaggacgacggccggggtctggtgcttcctggctacaagtacctcggacccttcaacggactcgacaagggggagcccgtcaacgcggcggacgcggcggccctcgagcacgacaaggcctacgaccagcagctgcaggcgggtgacaatccgtacctgcggtataaccacgccgacgccgagtttcaggagcgtctgcaagaagatacgtcttttgggggcaacctcgggcgagcagtcttccaggccaagaagcgggttctcgaacctctcggtctggttgaggaaggcgctaagacggctcctggaaagaagagaccggtagagccatcaccccagcgttctccagactcctctacgggcatcggcaagaagggccaacagcccgccagaaaaagactcaattttggtcagactggcgactcagagtcagttccagaccctcaacctctcggagaacctccagcagcgccctctggtgtgggacctaatacaatggctgcaggcggtggcgcaccaatggcagacaataacgaaggcgccgacggagtgggtagttcctcgggaaattggcattgcgattccacatggctgggcgacagagtcatcaccaccagcacccgaacctgggccctgcccacctacaacaaccacctctacaagcaaatctccaacgggacatcgggaggagccaccaacgacaacacctacttcggctacagcaccccctgggggtattttgactttaacagattccactgccacttttcaccacgtgactggcagcgactcatcaacaacaactggggattccggcccaagagactcagcttcaagctcttcaacatccaggtcaaggaggtcacgcagaatgaaggcaccaagaccatcgccaataacctcaccagcaccatccaggtgtttacggactcggagtaccagctgccgtacgttctcggctctgcccaccagggctgcctgcctccgttcccggcggacgtgttcacgattccccagtacggctacctaacactcaacaacggtagtcaggccgtgggacgctcctccttctactgcctggaatactttccttcgcagatgctgagaaccggcaacaacttccagtttacttacaccttcgaggacgtgcctttccacagcagctacgcccacagccagagcttggaccggctgatgaatcctctgattgaccagtacctgtactacttgtctcggattcaaacaacaggaggcacggcaaatacgcagactctgggcttcagccaaggtgggcctaatacaatggccaatcaggcaaagaactggctgccaggaccctgttaccgccaacaacgcgtctcaacgacaaccgggcaaaacaacaatagcaactttgcctggactgctgggaccaaataccatctgaatggaagaaattcattggctaatcctggcatcgctatggcaacacacaaagacgacgaggagcgtttttttcccagtaacgggatcctgatttttggcaaacaaaatgctgccagagacaatgcggattacagcgatgtcgtgcccaccagcgaggaagaaatcaaaaccactaaccctgtggccacagaggaatacggtatcgtggcagataacttgcagcagcaaaacacggctcctcaaattggaactgtcaacagccagggggccttacccggtatggtctggcagaaccgggacgtgtacctgcagggtcccatctgggccaagattcctcacacggacggcaacttccacccgtctccgctgatgggcggctttggcctgaaacatcctccgcctcagatcctgatcaagaacacgcctgtacctgcggatcctccgaccaccttcaaccagtcaaagctgaactctttcatcacgcaatacagcaccggacaggtcagcgtggaaattgaatgggagctgcagaaggaaaacagcaagcgctggaaccccgagatccagtacacctccaactactacaaatctacaagtgtggactttgctgttaatacagaaggcgtgtactctgaaccccgccccattggcacccgttacctcacccgtaatctgtaa

SEQ ID NO: 3910 - DNA, 2217 bp, synthetic construct
  misc_feature 1..2217: note = source = /note="Description of Artificial Sequence: Synthetic polynucleotide"
  source 1..2217: mol_type = other DNA
atggctgccgatggttatcttccagattggctcgaggacaacctctctgagggcattcgcgagtggtgggcgctgaaacctggagccccgaagcccaaagccaaccagcaaaagcaggacgacggccggggtctggtgcttcctggctacaagtacctcggacccttcaacggactcgacaagggggagcccgtcaacgcggcggacgcggcggccctcgagcacgacaaggcctacgaccagcagctgcaggcgggtgacaatccgtacctgcggtataaccacgccgacgccgagtttcaggagcgtctgcaagaagatacgtcttttgggggcaacctcgggcgagcagtcttccaggccaagaagcgggttctcgaacctctcggtctggttgaggaaggcgctaagacggctcctggaaagaagagaccggtagagccatcaccccagcgttctccagactcctctacgggcatcggcaagaagggccgacagcccgccagaaaaagactcaattttggtcagactggcgactcagagtcagttccagaccctcaacctctcggagaacctccagcagcgccctctggtgtgggacctaatacaatggctgcaggcggtggcgcaccaatggcagacaataacgaaggcgccgacggagtgggtagttcctcgggaaattggcattgcgattccacatggctgggcgacagagtcatcaccaccagcacccgaacctgggccctgcccacctacaacaaccacctctacaagcaaatctccaacgggacatcgggaggagccaccaacgacaacacctacttcggctacagcaccccctgggggtattttgactttaacagattccactgccacttttcaccacgtgactggcagcgactcatcaacaacaactggggattccggcccaagagactcagcttcaagctcttcaacatccaggtcaaggaggtcacgcagaatgaaggcaccaagaccatcgccaataacctcaccagcaccatccaggtgtttacggactcggagtaccagctgccgtacgttctcggctctgcccaccagggctgcctgcctccgttcccggcggacgtgttcacgattccccagtacggctacctaacactcaacaacggtagtcaggccgtgggacgctcctccttctactgcctggaatactttccttcgcagatgctgagaaccggcaacaacttccagtttacttacaccttcgaggacgtgcctttccacagcagctacgcccacagccagagcttggaccggctgatgaatcctctgattgaccagtacctgtactacttgtctcggattcaaacaacaggaggcacggcaaatacgcagactctgggcttcagccaaggtgggcctaatacaatggccaatcaggcaaagaactggctgccaggaccctgttaccgccaacaacgcgtctcaacgacaaccgggcaaaacaacaatagcaactttgcctggactgctgggaccaaataccatctgaatggaagaaattcattggctaatcctggcatcgctatggcaacacacaaagacgacgaggagcgtttttttcccagtaacgggatcctgatttttggcaaacaaaatgctgccagagacaatgcggattacagcgatgtcatgcccaccagcgaggaagaaatcaaaaccactaaccctgtggccacagaggaatacggtatcgtggcagataacttgcagcagcaaaacacggctcctcaaattggaactgtcaacagccagggggccttacccggtatggtctggcagaaccgggacgtgtacctgcagggtcccatctgggccaagattcctcacacggacggcaacttccacccgtctccgctgatgggcggctttggcctgaaacatcctccgcctcagatcctgatcaagaacacgcctgtacctgcggatcctccgaccaccttcaaccagtcaaagctgaactctttcatcacgcaatacagcaccggacaggtcagcgtggaaattgaatgggagctgcagaaggaaaacagcaagcgctggaaccccgagatccagtacacctccaactactacaaatctacaagtgtggactttgctgttaatacagaaggcgtgtactctgaaccccgccccattggcacccgttacctcacccgtaatctgtaa

SEQ ID NO: 3911 - DNA, 2217 bp, synthetic construct
  misc_feature 1..2217: note = source = /note="Description of Artificial Sequence: Synthetic polynucleotide"
  source 1..2217: mol_type = other DNA
atggctgccgatggttatcttccagattggctcgaggacaacctctctgagggcattcgcgagtggtgggcgctgaaacctggagccccgaagcccaaagccaaccagcaaaagcaggacgacggccggggtctggtgcttcctggctacaagtacctcggacccttcaacggactcgacaagggggagcccgtcaacgcggcggacgcggcggccctcgagcacgacaaggcctacgaccagcagctgcaggcgggtgacaatccgtacctgcggtataaccacgccgacgccgagtttcaggagcgtctgcaagaagatacgtcttttgggggcaacctcgggcgagcagtcttccaggccaagaagcgggttctcgaacctctcggtctggttgaggaaggcgctaagacggctcctggaaagaagagaccggtagagtcatcaccccagcgttctccagactcctctacgggcatcggcaagaagggccaacagcccgccagaaaaagactcaattttggtcagactggcgactcagagtcagttccagaccctcaacctctcggagaacctccagcagcgccctctggtgtgggacctaatacaatggctgcaggcggtggcgcaccaatggcagacaataacgaaggcgccgacggagtgggtagttcctcgggaaattggcattgcgattccacatggctgggcgacagagtcatcaccaccagcacccgaacctgggccctgcccacctacaacaaccacctctacaagcaaatctccaacgggacatcgggaggagccaccaacgacaacacctacttcggctacagcaccccctgggggtattttgactttaacagattccactgccacttttcaccacgtgactggcagcgactcatcaacaacaactggggattccggcccaagagactcagcttcaagctcttcaacatccaggtcaaggaggtcacgcagaatgaaggcaccaagaccatcgccaataacctcaccagcaccatccaggtgtttacggactcggagtaccagctgccgtacgttctcggctctgcccaccagggctgcctgcctccgttcccggcggacgtgttcacgattccccagtacggctacctaacactcaacaacggtagtcaggccgtgggacgctcctccttctactgcctggaatactttccttcgcagatgctgagaaccggcaacaacttccagtttacttacaccttcgaggacgtgcctttccacagcagctacgcccacagccagagcttggaccggctgatgaatcctctgattgaccagtacctgtactacttgtctcggattcaaacaacaggaggcacggcaaatacgcagactctgggcttcagccaaggtgggcctaatacaatggccaatcaggcaaagaactggctgccaggaccctgttaccgccaacaacgcgtctcaacgacaaccgggcaaaacaacaatagcaactttgcctggactgctgggaccaaataccatctgaatggaagaaattcattggctaatcctggcatcgctatggcaacacacaaagacgacgaggagcgtttttttcccagtaacgggatcctgatttttggcaaacaaaatgctgccagagacaatgcggattacagcgatgtcatgcccaccagcgaggaagaaatcaaaaccactaaccctgtggccacagaggaatacggtatcgtggcagataacttgcagcagcaaaacacggctcctcaaattggaactgtcaacagccagggggccttacccggtatggtctggcagaaccgggacgtgtacctgcagggtcccatctgggccaagattcctcacacggacggcaacttccacccgtctccgctgatgggcggctttggcctgaaacatcctccgcctcagatcctgatcaagaacacgcctgtacctgcggatcctccgaccaccttcaaccagtcaaagctgaactctttcatcacgcaatacagcaccggacaggtcagcgtggaaattgaatgggagctgcagaaggaaaacagcaagcgctggaaccccgagatccagtacacctccaactactacaaatctacaagtgtggactttgctgttaatacagaaggcgtgtactctgaaccccgccccattggcacccgttacctcacccgtaatctgtaa

SEQ ID NO: 3912 - DNA, 2217 bp, synthetic construct
  misc_feature 1..2217: note = source = /note="Description of Artificial Sequence: Synthetic polynucleotide"
  source 1..2217: mol_type = other DNA
atggctgccgatggttatcttccagattggctcgaggacaacctctctgagggcattcgcgagtggtgggcgctgaaacctggagccccgaagcccaaagccaaccagcaaaagcaggacgacggccggggtctggtgcttcctggctacaagtacctcggacccttcaacggactcgacaagggggagcccgtcaacgcggcggacgcggcggccctcgagcacgacaaggcctacgaccagcagctgcaggcgggtgacaatccgtacctgcggtataaccacgccgacgccgagtttcaggagcgtctgcaagaagatacgtcttttgggggcaacctcgggcgagcagtcttccaggccaagaagcgggttctcgaacctctcggtctggttgaggaaggcgctaagacggctcctggaaagaagagaccggtagagccatcaccccagcgttctccagactcctctacgggcatcggcaagaagggccaacagcccgccagaaaaagactcaattttggtcagactggcgactcagagtcagttccagaccctcaacctctcggagaacctccagcagcgccctctggtgcgggacctaatacaatggctgcaggcggtggcgcaccaatggcagacaataacgaaggcgccgacggagtgggtagttcctcgggaaattggcattgcgattccacatggctgggcgacagagtcatcaccaccagcacccgaacctgggccctgcccacctacaacaaccacctctacaagcaaatctccaacgggacatcgggaggagccaccaacgacaacacctacttcggctacagcaccccctgggggtattttgactttaacagattccactgccacttttcaccacgtgactggcagcgactcatcaacaacaactggggattccggcccaagagactcagcttcaagctcttcaacatccaggtcaaggaggtcacgcagaatgaaggcaccaagaccatcgccaataacctcaccagcaccatccaggtgtttacggactcggagtaccagctgccgtacgttctcggctctgcccaccagggctgcctgcctccgttcccggcggacgtgttcacgattccccagtacggctacctaacactcaacaacggtagtcaggccgtgggacgctcctccttctactgcctggaatactttccttcgcagatgctgagaaccggcaacaacttccagtttacttacaccttcgaggacgtgcctttccacagcagctacgcccacagccagagcttggaccggctgatgaatcctctgattgaccagtacctgtactacttgtctcggattcaaacaacaggaggcacggcaaatacgcagactctgggcttcagccaaggtgggcctaatacaatggccaatcaggcaaagaactggctgccaggaccctgttaccgccaacaacgcgtctcaacgacaaccgggcaaaacaacaatagcaactttgcctggactgctgggaccaaataccatctgaatggaagaaattcattggctaatcctggcatcgctatggcaacacacaaagacgacgaggagcgtttttttcccagtaacgggatcctgatttttggcaaacaaaatgctgccagagacaatgcggattacagcgatgtcatgcccaccagcgaggaagaaatcaaaaccactaaccctgtggccacagaggaatacggtatcgtggcagataacttgcagcagcaaaacacggctcctcaaattggaactgtcaacagccagggggccttacccggtatggtctggcagaaccgggacgtgtacctgcagggtcccatctgggccaagattcctcacacggacggcaacttccacccgtctccgctgatgggcggctttggcctgaaacatcctccgcctcagatcctgatcaagaacacgcctgtacctgcggatcctccgaccaccttcaaccagtcaaagctgaactctttcatcacgcaatacagcaccggacaggtcagcgtggaaattgaatgggagctgcagaaggaaaacagcaagcgctggaaccccgagatccagtacacctccaactactacaaatctacaagtgtggactttgctgttaatacagaaggcgtgtactctgaaccccgccccattggcacccgttacctcacccgtaatctgtaa

SEQ ID NO: 3913 - DNA, 2217 bp, synthetic construct
  misc_feature 1..2217: note = source = /note="Description of Artificial Sequence: Synthetic polynucleotide"
  source 1..2217: mol_type = other DNA
atggctgccgatggttatcttccagattggctcgaggacaacctctctgagggcattcgcgagtggtgggcgctgaaacctggagccccgaagcccaaagccaaccagcaaaagcaggacgacggccggggtctggtgcttcctggctacaagtacctcggacccttcaacggactcgacaagggggagcccgtcaacgcggcggacgcggcggccctcgagcacgacaaggcctacgaccagcagctgcaggcgggtgacaatccgtacctgcggtataaccacgccgacgccgagtttcaggagcgtctgcaagaagatacgtcttttgggggcaacctcgggcgagcagtcttccaggccaagaagcgggttctcgaacctctcggtctggttgaggaaggcgctaagacggctcctggaaagaagagaccggtagagccatcaccccagcgttctccagactcctctacgggcatcggcaagaagggccaacagcccgccagaaaaagactcaattttggtcagactggcgactcagagtcagttccagaccctcaacctctcggagaacctccagcagcgccctctggtgtgggacctaatacaatggctgcaggcggtggcgcaccaatggcagacaataacgaaggcgccgacggagtgggtagttcctcgggaaattggcattgcgattccacatggctgggcgacagagtcatcaccaccagcacccgaacctgggccctgcccacctacaacaaccacctctacaagcaaatctccaacgggacatcgggaggagccaccaacgacaacacctacttcggctacagcaccccctgggggtattttgactttaacagattccactgccacttttcaccacgtgactggcagcgactcatcaacaacaactggggattccggcccaagagactcagcttcaagctcttcaacatccaggtcaaggaggtcacgcagaatgaaggcaccaagaccatcgccaataacctcaccagcaccatccaggtgtttacggactcggagtaccagctgccgtacgttctcggctctgcccaccagggctgcctgcctccgttcccggcggacgtgttcacgattccccagtacggctacctaacactcaacaacggtagtcaggccgtgggacgctcctccttctactgcctggaatactttccttcgcagatgctgagaaccggcaacaacttccagtttacttacaccttcgaggacgtgcctttccacagcagctacgcccacagccagagcttggaccggctgatgaatcctctgattgaccagtacccgtactacttgtctcggattcaaacaacaggaggcacggcaaatacgcagactctgggcttcagccaaggtgggcctaatacaatggccaatcaggcaaagaactggctgccaggaccctgttaccgccaacaacgcgtctcaacgacaaccgggcaaaacaacaatagcaactttgcctggactgctgggaccaaataccatctgaatggaagaaattcattggctaatcctggcatcgctatggcaacacacaaagacgacgaggagcgtttttttcccagtaacgggatcctgatttttggcaaacaaaatgctgccagagacaatgcggattacagcgatgtcatgcccaccagcgaggaagaaatcaaaaccactaaccctgtggccacagaggaatacggtatcgtggcagataacttgcagcagcaaaacacggctcctcaaattggaactgtcaacagccagggggccttacccggtatggtctggcagaaccgggacgtgtacctgcagggtcccatctgggccaagattcctcacacggacggcaacttccacccgtctccgctgatgggcggctttggcctgaaacatcctccgcctcagatcctgatcaagaacacgcctgtacctgcggatcctccgaccaccttcaaccagtcaaagctgaactctttcatcacgcaatacagcaccggacaggtcagcgtggaaattgaatgggagctgcagaaggaaaacagcaagcgctggaaccccgagatccagtacacctccaactactacaaatctacaagtgtggactttgctgttaatacagaaggcgtgtactctgaaccccgccccattggcacccgttacctcacccgtaatctgtaa

SEQ ID NO: 3914 - DNA, 2217 bp, synthetic construct
  misc_feature 1..2217: note = source = /note="Description of Artificial Sequence: Synthetic polynucleotide"
  source 1..2217: mol_type = other DNA
atggctgccgatggttatcttccagattggctcgaggacaacctctctgagggcattcgcgagtggtgggcgctgaaacctggagccccgaagcccaaagccaaccagcaaaagcaggacgacggccggggtctggtgcttcctggctacaagtacctcggacccttcaacggactcgacaagggggagcccgtcaacgcggcggacgcggcggccctcgagcacgacaaggcctacgaccagcagctgcaggcgggtgacaatccgtacctgcggtataaccacgccgacgccgagtttcaggagcgtctgcaagaagatacgtcttttgggggcaacctcgggcgagcagtcttccaggccaagaagcgggttctcgaacctctcggtctggttgaggaaggcgctaagacggctcctggaaagaagagaccggtagagccatcaccccagcgttctccagactcctctacgggcatcggcaagaagggccaacagcccgccagaaaaagactcaattttggtcagactggcgactcagagtcagttccagaccctcaacctctcggagaacctccagcagcgccctctggtgtgggacctaatacaatggctgcaggcggtggcgcaccaatggcagacaataacgaaggcgccgacggagtgggtagttcctcgggaaattggcattgcgattccacatggctgggcgacagagtcatcaccaccagcacccgaacctgggccctgcccacctacaacaaccacctctacaagcaaatctccaacgggacatcgggaggagccaccaacgacaacacctacttcggctacagcaccccctgggggtattttgactttaacagattccactgccacttttcaccacgtgactggcagcgactcatcaacaacaactggggattccggcccaagagactcagcttcaagctcttcaacatccaggtcaaggaggtcacgcagaatgaaggcaccaagaccatcgccaataacctcaccagcaccatccaggtgtttacggactcggagtaccagctgccgtacgttctcggctctgcccaccagggctgcctgcctccgttcccggcggacgtgttcacgattccccagtacggctacctaacactcaacaacggtagtcaggccgtgggacgctcctccttctactgcctggaatactttccttcgcagatgctgagaaccggcaacaacttccagtttacttacaccttcgaggacgtgcctttccacagcagctacgcccacagccagagcttggaccggctgatgaatcctctgattgaccagtacctgtactacttgtctcggattcaaacaacaggaggcacggcaaatacgcagactctgggcttcagccaaggtgggcctaatacaatggccaatcaggcaaagaactggctgccaggaccctgttaccgccaacaacgcgtctcaacgacaaccgggcaaagcaacaatagcaactttgcctggactgctgggaccaaataccatctgaatggaagaaattcattggctaatcctggcatcgctatggcaacacacaaagacgacgaggagcgtttttttcccagtaacgggatcctgatttttggcaaacaaaatgctgccagagacaatgcggattacagcgatgtcatgcccaccagcgaggaagaaatcaaaaccactaaccctgtggccacagaggaatacggtatcgtggcagataacttgcagcagcaaaacacggctcctcaaattggaactgtcaacagccagggggccttacccggtatggtctggcagaaccgggacgtgtacctgcagggtcccatctgggccaagattcctcacacggacggcaacttccacccgtctccgctgatgggcggctttggcctgaaacatcctccgcctcagatcctgatcaagaacacgcctgtacctgcggatcctccgaccaccttcaaccagtcaaagctgaactctttcatcacgcaatacagcaccggacaggtcagcgtggaaattgaatgggagctgcagaaggaaaacagcaagcgctggaaccccgagatccagtacacctccaactactacaaatctacaagtgtggactttgctgttaatacagaaggcgtgtactctgaaccccgccccattggcacccgttacctcacccgtaatctgtaa

SEQ ID NO: 3915 - DNA, 2217 bp, synthetic construct
  misc_feature 1..2217: note = source = /note="Description of Artificial Sequence: Synthetic polynucleotide"
  source 1..2217: mol_type = other DNA
atggctgccgatggttatcttccagattggctcgaggacaacctctctgagggcattcgcgagtggtgggcgctgaaacctggagccccgaagcccaaagccaaccagcaaaagcaggacgacggccggggtctggtgcttcctggctacaagtacctcggacccttcaacggactcgacaagggggagcccgtcaacgcggcggacgcggcggccctcgagcacgacaaggcctacgaccagcagctgcaggcgggtgacaatccgtacctgcggtataaccacgccgacgccgagtttcaggagcgtctgcaagaagatacgtcttttgggggcaacctcgggcgagcagtcttccaggccaagaagcgggttctcgaacctctcggtctggttgaggaaggcgctaagacggctcctggaaagaagagaccggtagagccatcaccccagcgttctccagactcctctacgggcatcggcaagaagggccaacagcccgccagaaaaagactcaattttggtcagactggcgactcagagtcagttccagaccctcaacctctcggagaacctccagcagcgccctctggtgtgggacctaatacaatggctgcaggcggtggcgcaccaatggcagacaataacgaaggcgccgacggagtgggtagttcctcgggaaattggcattgcgattccacatggctgggcgacagagtcatcaccaccagcacccgaacctgggccctgcccacctacaacaaccacctctacaagcaaatctccaacgggacatcgggaggagccaccaacgacaacacctacttcggctacagcaccccctgggggtattttgactttaacagattccactgccacttttcaccacgtgactggcagcgactcatcaacaacaactggggattccggcccaagagactcagcttcaagctcttcaacatccaggtcaaggaggtcacgcagaatgaaggcaccaagaccatcgccaataacctcaccagcaccatccaggtgtttacggactcggagtaccagctgccgtacgttctcggctctgcccaccagggctgcctgcctccgttcccggcggacgtgttcacgattccccagtacggctacctaacactcaacaacggtagtcaggccgtgggacgctcctccttctactgcctggaatactttccttcgcagatgctgagaaccggcaacaacttccagtttacttacaccttcgaggacgtgcctttccacagcagctacgcccacagccagagcttggaccggctgatgaatcctctgattgaccagtacctgtactacttgtctcggattcaaacaacaggaggcacggcaaatacgcagactctgggcttcagccaaggtgggcctaatacaatggccaatcaggcaaagaactggctgccaggaccccgttaccgccaacaacgcgtctcaacgacaaccgggcaaaacaacaatagcaactttgcctggactgctgggaccaaataccatctgaatggaagaaattcattggctaatcctggcatcgctatggcaacacacaaagacgacgaggagcgtttttttcccagtaacgggatcctgatttttggcaaacaaaatgctgccagagacaatgcggattacagcgatgtcatgcccaccagcgaggaagaaatcaaaaccactaaccctgtggccacagaggaatacggtatcgtggcagataacttgcagcagcaaaacacggctcctcaaattggaactgtcaacagccagggggccttacccggtatggtctggcagaaccgggacgtgtacctgcagggtcccatctgggccaagattcctcacacggacggcaacttccacccgtctccgctgatgggcggctttggcctgaaacatcctccgcctcagatcctgatcaagaacacgcctgtacctgcggatcctccgaccaccttcaaccagtcaaagctgaactctttcatcacgcaatacagcaccggacaggtcagcgtggaaattgaatgggagctgcagaaggaaaacagcaagcgctggaaccccgagatccagtacacctccaactactacaaatctacaagtgtggactttgctgttaatacagaaggcgtgtactctgaaccccgccccattggcacccgttacctcacccgtaatctgtaa

SEQ ID NO: 3916 - DNA, 2217 bp, synthetic construct
  misc_feature 1..2217: note = source = /note="Description of Artificial Sequence: Synthetic polynucleotide"
  source 1..2217: mol_type = other DNA
atggctgccgatggttatcttccagattggctcgaggacaacctctctgagggcattcgcgagtggtgggcgctgaaacctggagccccgaagcccaaagccaaccagcaaaagcaggacgacggccggggtctggtgcttcctggctacaagtacctcggacccttcaacggactcgacaagggggagcccgtcaacgcggcggacgcggcggccctcgagcacgacaaggcctacgaccagcagctgcaggcgggtgacaatccgtacctgcggtataaccacgccgacgccgagtttcaggagcgtctgcaagaagatacgtcttttgggggcaacctcgggcgagcagtcttccaggccaagaagcgggttctcgaacctctcggtctggttgaggaaggcgctaagacggctcctggaaagaagagaccggtagagccatcaccccagcgttctccagactcctctacgggcatcggcaagaagggccaacagcccgccagaaaaagactcaattttggtcagactggcgactcagagtcagttccagaccctcaacctctcggagaacctccagcagcgccctctggtgtgggacctaatacaatggctgcaggcggtggcgcaccaatggcagacaataacgaaggcgccgacggagtgggtagttcctcgggaaattggcattgcgattccacatggctgggcgacagagtcatcaccaccagcacccgaacctgggccctgcccacctacaacaaccacctctacaagcaaatctccaacgggacatcgggaggagccaccaacgacaacacctacttcggctacagcaccccctgggggtattttgactttaacagattccactgccacttttcaccacgtgactggcagcgactcatcaacaacaactggggattccggcccaagagactcagcttcaagctcttcaacatccaggtcaaggaggtcacgcagaatgaaggcaccaagaccatcgccaataacctcaccagcaccatccaggtgtttacggactcggagtaccagctgccgtacgttctcggctctgcccaccagggctgcctgcctccgttcccggcggacgtgttcacgattccccagtacggctacctaacactcaacaacggtagtcaggccgtgggacgctcctccttctactgcctggaatactttccttcgcagatgctgagaaccggcaacaacttccagtttacttacaccttcgaggacgtgcctttccacagcagctacgcccacagccagagcttggaccggctgatgaatcctctgattgaccagtacctgtactacttgtctcggattcaaacaacaggaggcacggcaaatacgcagactctgggcttcagccaaggtgggcctaatacaatggccaatcaggcaaagaactggctgccaggaccctgttaccgccaacaacgcgtctcaacgacaaccgggcaaaacaacaatagcaactttgcctggactgctgggaccaaataccatctgaatggaagaaattcattggctaatcctggcatcgctatggcaacacacaaagacgacgaggagcgtttttttcccagtaacgggatcctgatttttggcaaacaaaatgctgccagagacaatgcggattacagcgatgtcatgcccaccagcgaggaagaaatcaaaaccactaaccctgtggccacagaggaatacggtatcgtggcagataacttgcagcagcaaaacacggctcctcaaattggaactgtcaacagccagggggccttacccggtatggtctggcagaaccgggacgtgtacctgcagggtcccatctgggccaagattcctcacacggacggcaacttccacccgtctccgctgatgggcggctttggcctgaaacatcctccgcctcagatcctgatcaagaacgcgcctgtacctgcggatcctccgaccaccttcaaccagtcaaagctgaactctttcatcacgcaatacagcaccggacaggtcagcgtggaaattgaatgggagctgcagaaggaaaacagcaagcgctggaaccccgagatccagtacacctccaactactacaaatctacaagtgtggactttgctgttaatacagaaggcgtgtactctgaaccccgccccattggcacccgttacctcacccgtaatctgtaa

SEQ ID NO: 3917 - DNA, 2217 bp, synthetic construct
  misc_feature 1..2217: note = source = /note="Description of Artificial Sequence: Synthetic polynucleotide"
  source 1..2217: mol_type = other DNA
atggctgccgatggttatcttccagattggctcgaggacaacctctctgagggcattcgcgagtggtgggcgctgaaacctggagccccgaagcccaaagccaaccagcaaaagcaggacgacggccggggtctggtgcttcctggctacaagtacctcggacccttcaacggactcgacaagggggagcccgtcaacgcggcggacgcggcggccctcgagcacgacaaggcctacgaccagcagctgcaggcgggtgacaatccgtacctgcggtataaccacgccgacgccgagtttcaggagcgtctgcaagaagatacgtcttttgggggcaacctcgggcgagcagtcttccaggccaagaagcgggttctcgaacctctcggtctggttgaggaaggcgctaagacggctcctggaaagaagagaccggtagagccatcaccccagcgttctccagactcctctacgggcatcggcaagaagggccaacagcccgccagaaaaagactcaattttggtcagactggcgactcagagtcagttccagaccctcaacctctcggagaacctccagcagcgccctctggtgtgggacctaatacaatggctgcaggcggtggcgcaccaatggcagacaataacgaaggcgccgacggagtgggtagttcctcgggaaattggcattgcgattccacatggctgggcgacagagtcatcaccaccagcacccgaacctgggccctgcccacctacaacaaccacctctacaagcaaatctccaacgggacatcgggaggagccaccaacgacaacacctacttcggctacagcaccccctgggggtattttgactttaacagattccactgccacttttcaccacgtgaccggcagcgactcatcaacaacaactggggattccggcccaagagactcagcttcaagctcttcaacatccaggtcaaggaggtcacgcagaatgaaggcaccaagaccatcgccaataacctcaccagcaccatccaggtgtttacggactcggagtaccagctgccgtacgttctcggctctgcccaccagggctgcctgcctccgttcccggcggacgtgttcacgattccccagtacggctacctaacactcaacaacggtagtcaggccgtgggacgctcctccttctactgcctggaatactttccttcgcagatgctgagaaccggcaacaacttccagtttacttacaccttcgaggacgtgcctttccacagcagctacgcccacagccagagcttggaccggctgatgaatcctctgattgaccagtacctgtactacttgtctcggattcaaacaacaggaggcacggcaaatacgcagactctgggcttcagccaaggtgggcctaatacaatggccaatcaggcaaagaactggctgccaggaccctgttaccgccaacaacgcgtctcaacgacaaccgggcaaaacaacaatagcaactttgcctggactgctgggaccaaataccatctgaatggaagaaattcattggctaatcctggcatcgctatggcaacacacaaagacgacgaggagcgtttttttcccagtaacgggatcctgatttttggcaaacaaaatgctgccagagacaatgcggattacagcgatgtcatgcccaccagcgaggaagaaatcaaaaccactaaccctgtggccacagaggaatacggtatcgtggcagataacttgcagcagcaaaacacggctcctcaaattggaactgtcaacagccagggggccttacccggtatggtctggcagaaccgggacgtgtacctgcagggtcccatctgggccaagattcctcacacggacggcaacttccacccgtctccgctgatgggcggctttggcctgaaacatcctccgcctcagatcctgatcaagaacacgcctgtacctgcggatcctccgaccaccttcaaccagtcaaagctgaactctttcatcacgcaatacagcaccggacaggtcagcgtggaaattgaatgggagctgcagaaggaaaacagcaagcgctggaaccccgagatccagtacacctccaactactacaaatctacaagtgtggactttgctgttaatacagaaggcgtgtactctgaaccccgccccattggcacccgttacctcacccgtaatctgtaa

SEQ ID NO: 3918 - DNA, 2217 bp, synthetic construct
  misc_feature 1..2217: note = source = /note="Description of Artificial Sequence: Synthetic polynucleotide"
  source 1..2217: mol_type = other DNA
atggctgccgatggttatcttccagattggctcgaggacaacctctctgagggcattcgcgagtggtgggcgctgaaacctggagccccgaagcccaaagccaaccagcaaaagcaggacgacggccggggtctggtgcttcctggctacaagtacctcggacccttcaacggactcgacaagggggagcccgtcaacgcggcggacgcggcggccctcgagcacgacaaggcctacgaccagcagctgcaggcgggtgacaatccgtacctgcggtataaccacgccgacgccgagtttcaggagcgtctgcaagaagatacgtcttttgggggcaacctcgggcgagcagtcttccaggccaagaagcgggttctcgaacctctcggtctggttgaggaaggcgctaagacggctcctggaaagaagagaccggtagagccatcaccccagcgttctccagactcctctacgggcatcggcaagaagggccaacagcccgccagaaaaagactcaattttggtcagactggcgactcagagtcagttccagaccctcaacctctcggagaacctccagcagcgccctctggtgtgggacctaatacaatggctgcaggcggtggcgcaccaatggcagacaataacgaaggcgccgacggagtgggtagttcctcgggaaattggcattgcgattccacatggctgggcgacagagtcatcaccaccagcacccgaacctgggccctgcccacctacaacaaccacctctacaagcaaatctccaacgggacatcgggaggagccaccaacgacaacacctacttcggctacagcaccccctgggggtattttgactttaacagattccactgccacttttcaccacgtgactggcagcgactcatcaacaacaactggggattccggcccaagagactcagcttcaagctcttcaacatccaggtcaaggaggtcacgcagaatgaaggcaccaagaccatcgccaataacctcaccagcaccatccaggtgtttacggactcggagtaccagctgccgtacgttctcggctctgcccaccagggctgcctgcctccgttcccggcggacgtgttcacgattccccagtacggctacctaacactcaacaacggtagtcaggccgtgggacgctcctccttctactgcctggaatactttccttcgcagatgctgagaaccggcaacaacttccagtttacttacaccttcgaggacgtgcctttccacagcagctacgcccacagccagagcttggaccggctgatgaatcctctgattgaccagtacctgtactacttgtctcggattcaaacaacaggaggcacggcaaatacgcagactctgggcttcagccaaggtgggcctaatacaatggccaatcaggcaaagaactggctgccaggaccctgttaccgccaacaacgcgtctcaacgacaaccgggcaaaacaacaatagcaactttgcctggactgctgggaccaaataccatctgaatggaagaaattcattggctaatcctggcatcgctatggcaacacacaaagacgacgaggagcgtttttttcccagtaacgggatcctgatttttggcaaacaaaatgctgccagagacaatgcggattacagcgatgtcatgcccaccagcgaggaagaaatcaaaaccactaaccctgtggccacagaggaatacggtatcgtggcagataacttgcagcagcaaaacacggctcctcaaattggaactgtcaacagccagggggccttacccggtatggtctggcagaaccgggacgtgtacctgcagggtcccatctgggccaagattcctcacacggacggcagcttccacccgtctccgctgatgggcggctttggcctgaaacatcctccgcctcagatcctgatcaagaacacgcctgtacctgcggatcctccgaccaccttcaaccagtcaaagctgaactctttcatcacgcaatacagcaccggacaggtcagcgtggaaattgaatgggagctgcagaaggaaaacagcaagcgctggaaccccgagatccagtacacctccaactactacaaatctacaagtgtggactttgctgttaatacagaaggcgtgtactctgaaccccgccccattggcacccgttacctcacccgtaatctgtaa

SEQ ID NO: 3919 - DNA, 2217 bp, synthetic construct
  misc_feature 1..2217: note = source = /note="Description of Artificial Sequence: Synthetic polynucleotide"
  source 1..2217: mol_type = other DNA
atggctgccgatggttatcttccagattggctcgaggacaacctctctgagggcattcgcgagtggtgggcgctgaaacctggagccccgaagcccaaagccaaccagcaaaagcaggacgacggccggggtctggtgcttcctggctacaagtacctcggacccttcaacggactcgacaagggggagcccgtcaacgcggcggacgcggcggccctcgagcacgacaaggcctacgaccagcagctgcaggcgggtgacaatccgtacctgcggtataaccacgccgacgccgagtttcaggagcgtctgcaagaagatacgtcttttgggggcaacctcgggcgagcagtcttccaggccaagaagcgggttctcgaacctctcggtctggttgaggaaggcgctaagacggctcctggaaagaagagaccggtagagccatcaccccagcgttctccagactcctctacgggcatcggcaagaagggccaacagcccgccagaaaaagactcaattttggtcagactggcgactcagagtcagttccagaccctcaacctctcggagaacctccaacagcgccctctggtgtgggacctaatacaatggctgcaggcggtggcgcaccaatggcagacaataacgaaggcgccgacggagtgggtagttcctcgggaaattggcattgcgattccacatggctgggcgacagagtcatcaccaccagcacccgaacctgggccctgcccacctacaacaaccacctctacaagcaaatctccaacgggacatcgggaggagccaccaacgacaacacctacttcggctacagcaccccctgggggtattttgactttaacagattccactgccacttttcaccacgtgactggcagcgactcatcaacaacaactggggattccggcccaagagactcagcttcaagctcttcaacatccaggtcaaggaggtcacgcagaatgaaggcaccaagaccatcgccaataacctcaccagcaccatccaggtgtttacggactcggagtaccagctgccgtacgttctcggctctgcccaccagggctgcctgcctccgttcccggcggacgtgttcacgattccccagtacggctacctaacactcaacaacggtagtcaggccgtgggacgctcctccttctactgcctggaatactttccttcgcagatgctgagaaccggcaacaacttccagtttacttacaccttcgaggacgtgcctttccacagcagctacgcccacagccagagcttggaccggctgatgaatcctctgattgaccagtacctgtactacttgtctcggattcaaacaacaggaggcacggcaaatacgcagactctgggcttcagccaaggtgggcctaatacaatggccaatcaggcaaagaactggctgccaggaccctgttaccgccaacaacgcgtctcaacgacaaccgggcaaaacaacaatagcaactttgcctggactgctgggaccaaataccatctgaatggaagaaattcattggctaatcctggcatcgctatggcaacacacaaagacgacgaggagcgtttttttcccagtaacgggatcctgatttttggcaaacaaaatgctgccagagacaatgcggattacagcgatgtcatgcccaccagcgaggaagaaatcaaaaccactaaccctgtggccacagaggaatacggtatcgtggcagataacttgcagcagcaaaacacggctcctcaaattggaactgtcaacagccagggggccttacccggtatggtctggcagaaccgggacgtgtacctgcagggtcccatctgggccaagattcctcacacggacggcaacttccacccgtctccgctgatgggcggctttggcctgaaacatcctccgcctcagatcctgatcaagaacacgcctgtacctgcggatcctccgaccaccttcaaccagtcaaagctgaactctttcatcacgcaatacagcaccggacaggtcagcgtggaaattgaatgggagctgcagaaggaaaacagcaagcgctggaaccccgagatccagtacacctccaactactacaaatctacaagtgtggactttgctgttaatacagaaggcgtgtactctgaaccccgccccattggcacccgttacctcacccgtaatctgtaa

SEQ ID NO: 3920 - DNA, 2217 bp, synthetic construct
  misc_feature 1..2217: note = source = /note="Description of Artificial Sequence: Synthetic polynucleotide"
  source 1..2217: mol_type = other DNA
atggctgccgatggttatcttccagattggctcgaggacaacctctctgagggcattcgcgagtggtgggcgctgaaacctggagccccgaagcccaaagccaaccagcaaaagcaggacgacggccggggtctggtgcttcctggctacaagtacctcggacccttcaacggactcgacaagggggagcccgtcaacgcggcggacgcggcggccctcgagcacgacaaggcctacgaccagcagctgcaggcgggtgacaatccgtacctgcggtataaccacgccgacgccgagtttcaggagcgtctgcaagaagatacgtcttttgggggcaacctcgggcgagcagtcttccaggccaagaagcgggttctcgaacctctcggtctggttgaggaaggcgctaagacggctcctggaaagaagagaccggtagagccatcaccccagcgttctccagactcctctacgggcatcggcaagaagggccaacagcccgccagaaaaagactcaattttggtcagactggcgactcagagtcagttccagaccctcaacctctcggagaacctccagcagcgccctctggtgtgggacctaatacaatggctgcaggcggtggcgcaccaatggcagacaataacgaaggcgccgacggagtgggtagttcctcgggaaattggcattgcgattccacatggctgggcgacagagtcatcaccaccagcacccgaacctgggccctgcccacctacaacaaccacctctacaagcaaatctccaacgggacatcgggaggagccaccaacgacaacacctacttcggctacagcaccccctgggggtattttgactttaacagattccactgccacttttcaccacgtgactggcagcgactcatcaacaacaactggggattccggcccaagagactcagcttcaagctcttcaacatccaggtcaaggaggtcacgcagaatgaaggcaccaagaccatcgccaataacctcaccagcaccatccaggtgtttacggactcggagtaccagctgccgtacgttctcggctctgcccaccagggctgcctgcctccgttcccggcggacgtgttcacgattccccagtacggctacctaacactcaacaacggtagtcaggccgtgggacgctcctccttctactgcctggaatactttccttcgcagatgctgagaaccggcaacaacttccagtttacttacaccttcgaggacgtgcctttccacagcagctacgcccacagccagagcttggaccggctgatgaatcctctgattgaccagtacctgtactacttgtctcggattcaaacaacaggaggcacggcaaatacgcagactctgggcttcagccaaggtgggcctaatacaatggccaatcaggcaaagaactggctgccaggaccctgttaccgccaacaacgcgtctcaacgacaaccgggcaaaacaacaatagcaactttgcctggactgctgggaccaaataccatctgaatggaagaaattcattggctaatcctggcatcgctatggcaacacacaaagacgacgaggagcgtttttttcccagtaacgggatcctgatttttggcaaacaaaatgctgccagagacaatgcggattacagcgatgtcatgcccaccagcgaggaagaaatcaaaaccactaaccctgtggccacagaggaatacggtatcgtggcagataacttgcagcagcaaaacacggctcctcaaattggaactgtcaacagccagggggccttacccggtatggtctggcagaaccgggacgtgtacctgcagggtcccatctgggccaagattcctcacacggacggcaacttccacccgtctccgctgatgggcggctttggcctgaaacatcctccgcctcagatcctgatcaagaacacgcctgtacctgcggatcctccgaccaccttcaaccagtcaaagctgaactctttcatcacgcaatacagcaccggacaggtcagcgtggaaattgaatgggagctgcagaaggaaaacagcaagcgctggaaccccgagatccagtacacctccaactactacaaatctacaagtgtggactttgctgttaatgcagaaggcgtgtactctgaaccccgccccattggcacccgttacctcacccgtaatctgtaa

SEQ ID NO: 3921 - DNA, 2217 bp, synthetic construct
  misc_feature 1..2217: note = source = /note="Description of Artificial Sequence: Synthetic polynucleotide"
  source 1..2217: mol_type = other DNA
atggctgccgatggttatcttccagattggctcgaggacaacctctctgagggcattcgcgagtggtgggcgctgaaacctggagccccgaagcccaaagccaaccagcaaaagcaggacgacggccggggtctggtgcttcctggctacaagtacctcggacccttcaacggactcgacaagggggagcccgtcaacgcggcggacgcggcggccctcgagcacgacaaggcctacgaccagcagctgcaggcgggtgacaatccgtacctgcggtataaccacgccgacgccgagtttcaggagcgtctgcaagaagatacgtcttttgggggcaacctcgggcgagcagtcttccaggccaagaagcgggttctcgaacctctcggtctggttgaggaaggcgctaagacggctcctggaaagaagagaccggtagagccatcaccccagcgttctccagactcctctacgggcatcggcaagaagggccaacagcccgccagaaaaagactcaattttggtcagactggcgactcagagtcagttccagaccctcaacctctcggagaacctccagcagcgccctctggtgtgggacctaatacaatggctgcaggcggtggcgcaccaatggcagacaataacgaaggcgccgacggagcgggtagttcctcgggaaattggcattgcgattccacatggctgggcgacagagtcatcaccaccagcacccgaacctgggccctgcccacctacaacaaccacctctacaagcaaatctccaacgggacatcgggaggagccaccaacgacaacacctacttcggctacagcaccccctgggggtattttgactttaacagattccactgccacttttcaccacgtgactggcagcgactcatcaacaacaactggggattccggcccaagagactcagcttcaagctcttcaacatccaggtcaaggaggtcacgcagaatgaaggcaccaagaccatcgccaataacctcaccagcaccatccaggtgtttacggactcggagtaccagctgccgtacgttctcggctctgcccaccagggctgcctgcctccgttcccggcggacgtgttcacgattccccagtacggctacctaacactcaacaacggtagtcaggccgtgggacgctcctccttctactgcctggaatactttccttcgcagatgctgagaaccggcaacaacttccagtttacttacaccttcgaggacgtgcctttccacagcagctacgcccacagccagagcttggaccggctgatgaatcctctgattgaccagtacctgtactacttgtctcggattcaaacaacaggaggcacggcaaatacgcagactctgggcttcagccaaggtgggcctaatacaatggccaatcaggcaaagaactggctgccaggaccctgttaccgccaacaacgcgtctcaacgacaaccgggcaaaacaacaatagcaactttgcctggactgctgggaccaaataccatctgaatggaagaaattcattggctaatcctggcatcgctatggcaacacacaaagacgacgaggagcgtttttttcccagtaacgggatcctgatttttggcaaacaaaatgctgccagagacaatgcggattacagcgatgtcatgcccaccagcgaggaagaaatcaaaaccactaaccctgtggccacagaggaatacggtatcgtggcagataacttgcagcagcaaaacacggctcctcaaattggaactgtcaacagccagggggccttacccggtatggtctggcagaaccgggacgtgtacctgcagggtcccatctgggccaagattcctcacacggacggcaacttccacccgtctccgctgatgggcggctttggcctgaaacatcctccgcctcagatcctgatcaagaacacgcctgtacctgcggatcctccgaccaccttcaaccagtcaaagctgaactctttcatcacgcaatacagcaccggacaggtcagcgtggaaattgaatgggagctgcagaaggaaaacagcaagcgctggaaccccgagatccagtacacctccaactactacaaatctacaagtgtggactttgctgttaatacagaaggcgtgtactctgaaccccgccccattggcacccgttacctcacccgtaatctgtaa

SEQ ID NO: 3922 - DNA, 2217 bp, synthetic construct
  misc_feature 1..2217: note = source = /note="Description of Artificial Sequence: Synthetic polynucleotide"
  source 1..2217: mol_type = other DNA
atggctgccgatggttatcttccagattggctcgaggacaacctctctgagggcattcgcgagtggtgggcgctgaaacctggagccccgaagcccaaagccaaccagcaaaagcaggacgacggccggggtctggtgcttcctggctacaagtacctcggacccttcaacggactcgacaagggggagcccgtcaacgcggcggacgcggcggccctcgagcacgacaaggcctacgaccagcagctgcaggcgggtgacaatccgtacctgcggtataaccacgccgacgccgagtttcaggagcgtctgcaagaagatacgtcttttgggggcaacctcgggcgagcagtcttccaggccaagaagcgggttctcgaacctctcggtctggttgaggaaggcgctaagacggctcctggaaagaagagaccggtagagccatcaccccagcgttctccagactcctctacgggcatcggcaagaagggccaacagcccgccagaaaaagactcaattttggtcagactggcgactcagagtcagttccagaccctcaacctctcggagaacctccagcagcgccctctggtgtgggacctaatacaatggctgcaggcggtggcgcaccaatggcagacaataacgaaggcgccgacggagtgggtagttcctcgggaaattggcattgcgattccacatggctgggcgacagagccatcaccaccagcacccgaacctgggccctgcccacctacaacaaccacctctacaagcaaatctccaacgggacatcgggaggagccaccaacgacaacacctacttcggctacagcaccccctgggggtattttgactttaacagattccactgccacttttcaccacgtgactggcagcgactcatcaacaacaactggggattccggcccaagagactcagcttcaagctcttcaacatccaggtcaaggaggtcacgcagaatgaaggcaccaagaccatcgccaataacctcaccagcaccatccaggtgtttacggactcggagtaccagctgccgtacgttctcggctctgcccaccagggctgcctgcctccgttcccggcggacgtgttcacgattccccagtacggctacctaacactcaacaacggtagtcaggccgtgggacgctcctccttctactgcctggaatactttccttcgcagatgctgagaaccggcaacaacttccagtttacttacaccttcgaggacgtgcctttccacagcagctacgcccacagccagagcttggaccggctgatgaatcctctgattgaccagtacctgtactacttgtctcggattcaaacaacaggaggcacggcaaatacgcagactctgggcttcagccaaggtgggcctaatacaatggccaatcaggcaaagaactggctgccaggaccctgttaccgccaacaacgcgtctcaacgacaaccgggcaaaacaacaatagcaactttgcctggactgctgggaccaaataccatctgaatggaagaaattcattggctaatcctggcatcgctatggcaacacacaaagacgacgaggagcgtttttttcccagtaacgggatcctgatttttggcaaacaaaatgctgccagagacaatgcggattacagcgatgtcatgcccaccagcgaggaagaaatcaaaaccactaaccctgtggccacagaggaatacggtatcgtggcagataacttgcagcagcaaaacacggctcctcaaattggaactgtcaacagccagggggccttacccggtatggtctggcagaaccgggacgtgtacctgcagggtcccatctgggccaagattcctcacacggacggcaacttccacccgtctccgctgatgggcggctttggcctgaaacatcctccgcctcagatcctgatcaagaacacgcctgtacctgcggatcctccgaccaccttcaaccagtcaaagctgaactctttcatcacgcaatacagcaccggacaggtcagcgtggaaattgaatgggagctgcagaaggaaaacagcaagcgctggaaccccgagatccagtacacctccaactactacaaatctacaagtgtggactttgctgttaatacagaaggcgtgtactctgaaccccgccccattggcacccgttacctcacccgtaatctgtaa

SEQ ID NO: 3923 - DNA, 2217 bp, synthetic construct
  misc_feature 1..2217: note = source = /note="Description of Artificial Sequence: Synthetic polynucleotide"
  source 1..2217: mol_type = other DNA
atggctgccgatggttatcttccagattggctcgaggacaacctctctgagggcattcgcgagtggtgggcgctgaaacctggagccccgaagcccaaagccaaccagcaaaagcaggacgacggccggggtctggtgcttcctggctacaagtacctcggacccttcaacggactcgacaagggggagcccgtcaacgcggcggacgcggcggccctcgagcacgacaaggcctacgaccagcagctgcaggcgggtgacaatccgtacctgcggtataaccacgccgacgccgagtttcaggagcgtctgcaagaagatacgtcttttgggggcaacctcgggcgagcagtcttccaggccaagaagcgggttctcgaacctctcggtctggttgaggaaggcgctaagacggctcctggaaagaagagaccggtagagccatcaccccagcgttctccagactcctctacgggcatcggcaagaagggccaacagcccgccagaaaaagactcaattttggtcagactggcgactcagagtcagttccagaccctcaacctctcggagaacctccagcagcgccctctggtgtgggacctaatacaatggctgcaggcggtggcgcaccaatggcagacaataacgaaggcgccgacggagtgggtagttcctcgggaaattggcattgcgattccacatggctgggcgacagagtcatcaccaccagcacccgaacctgggccctgcccacctacaacaaccacctctacaagcaaatctccaacgggacatcgggaggagccaccaacgacaacacctacttcggctacagcaccccctgggggtattttgactttaacagattccactgccacttttcaccacgtgactggcagcgactcatcaacaacaactggggattccggcccaagagactcagcttcaagctcttcaacatccaggtcaaggaggtcacgcagaatgaaggcaccaagaccatcgccaataacctcaccagcaccatccaggtgtttacggactcggagtaccagctgccgtacgttctcggctctgcccaccagggctgcctgcctccgttcccggcggacgtgttcacgattccccagtacggctacctaacactcaacaacggtagtcaggccgtgggacgctcctccttctactgcctggaatactttccttcgcagatgctgagaaccggcaacaacttccagtttacttacaccttcgaggacgtgcctttccacagcagctacgcccacagccagagcttggaccggctgatgaatcctctgattgaccagtacctgtactacttgtctcggattcaaacaacaggaggcacggcaaatacgcagactctgggcttcagccaaggtgggcctaatacaatggccaatcaggcaaagaactggctgccaggaccctgttaccgccaacaacgcgtctcaacgacaaccgggcaaaacaacaatagcaactttgcctggactgctgggaccaaataccatctgaatggaagaaattcattggctaatcctggcgtcgctatggcaacacacaaagacgacgaggagcgtttttttcccagtaacgggatcctgatttttggcaaacaaaatgctgccagagacaatgcggattacagcgatgtcatgcccaccagcgaggaagaaatcaaaaccactaaccctgtggccacagaggaatacggtatcgtggcagataacttgcagcagcaaaacacggctcctcaaattggaactgtcaacagccagggggccttacccggtatggtctggcagaaccgggacgtgtacctgcagggtcccatctgggccaagattcctcacacggacggcaacttccacccgtctccgctgatgggcggctttggcctgaaacatcctccgcctcagatcctgatcaagaacacgcctgtacctgcggatcctccgaccaccttcaaccagtcaaagctgaactctttcatcacgcaatacagcaccggacaggtcagcgtggaaattgaatgggagctgcagaaggaaaacagcaagcgctggaaccccgagatccagtacacctccaactactacaaatctacaagtgtggactttgctgttaatacagaaggcgtgtactctgaaccccgccccattggcacccgttacctcacccgtaatctgtaa

SEQ ID NO: 3924 - DNA, 2217 bp, synthetic construct
  misc_feature 1..2217: note = source = /note="Description of Artificial Sequence: Synthetic polynucleotide"
  source 1..2217: mol_type = other DNA
atggctgccgatggttatcttccagattggctcgaggacaacctctctgagggcattcgcgagtggtgggcgctgaaacctggagccccgaagcccaaagccaaccagcaaaagcaggacgacggccggggtctggtgcttcctggctacaagtacctcggacccttcaacggactcgacaagggggagcccgtcaacgcggcggacgcggcggccctcgagcacgacaaggcctacgaccagcagctgcaggcgggtgacaatccgtacctgcggtataaccacgccgacgccgagtttcaggagcgtctgcaagaagatacgtcttttgggggcaacctcgggcgagcagtcttccaggccaagaagcgggttctcgaacctctcggtctggttgaggaaggcgctaagacggctcctggaaagaagagaccggtagagccatcaccccagcgttctccagactcctctacgggcatcggcaagaagggccaacagcccgccagaaaaagactcaattttggtcagactggcgactcagagtcagttccagaccctcaacctctcggagaacctccagcagcgccctctggtgtgggacctaatacaatggctgcaggcggtggcgcaccaatggcagacaataacgaaggcgccgacggagtgggtagttcctcgggaaattggcattgcgattccacatggctgggcgacagagtcatcaccaccagcacccgaacctgggccctgcccacctacaacaaccacctctacaagcaaatctccaacgggacatcgggaggagccaccaacgacaacacctacttcggctacagcaccccctgggggtattttgactttaacagattccactgccacttttcaccacgtgactggcagcgactcatcaacaacaactggggattccggcccaagagactcagcttcaagctcttcaacatccaggtcaaggaggtcacgcagaatgaaggcaccaagaccatcgccaataacctcaccggcaccatccaggtgtttacggactcggagtaccagctgccgtacgttctcggctctgcccaccagggctgcctgcctccgttcccggcggacgtgttcacgattccccagtacggctacctaacactcaacaacggtagtcaggccgtgggacgctcctccttctactgcctggaatactttccttcgcagatgctgagaaccggcaacaacttccagtttacttacaccttcgaggacgtgcctttccacagcagctacgcccacagccagagcttggaccggctgatgaatcctctgattgaccagtacctgtactacttgtctcggattcaaacaacaggaggcacggcaaatacgcagactctgggcttcagccaaggtgggcctaatacaatggccaatcaggcaaagaactggctgccaggaccctgttaccgccaacaacgcgtctcaacgacaaccgggcaaaacaacaatagcaactttgcctggactgctgggaccaaataccatctgaatggaagaaattcattggctaatcctggcatcgctatggcaacacacaaagacgacgaggagcgtttttttcccagtaacgggatcctgatttttggcaaacaaaatgctgccagagacaatgcggattacagcgatgtcatgcccaccagcgaggaagaaatcaaaaccactaaccctgtggccacagaggaatacggtatcgtggcagataacttgcagcagcaaaacacggctcctcaaattggaactgtcaacagccagggggccttacccggtatggtctggcagaaccgggacgtgtacctgcagggtcccatctgggccaagattcctcacacggacggcaacttccacccgtctccgctgatgggcggctttggcctgaaacatcctccgcctcagatcctgatcaagaacacgcctgtacctgcggatcctccgaccaccttcaaccagtcaaagctgaactctttcatcacgcaatacagcaccggacaggtcagcgtggaaattgaatgggagctgcagaaggaaaacagcaagcgctggaaccccgagatccagtacacctccaactactacaaatctacaagtgtggactttgctgttaatacagaaggcgtgtactctgaaccccgccccattggcacccgttacctcacccgtaatctgtaa

SEQ ID NO: 3925 - DNA, 2217 bp, synthetic construct
  misc_feature 1..2217: note = source = /note="Description of Artificial Sequence: Synthetic polynucleotide"
  source 1..2217: mol_type = other DNA
atggctgccgatggttatcttccagattggctcgaggacaacctctctgagggcattcgcgagtggtgggcgctgaaacctggagccccgaagcccaaagccaaccagcaaaagcaggacgacggccggggtctggtgcttcctggctacaagtacctcggacccttcaacggactcgacaagggggagcccgtcaacgcggcggacgcggcggccctcgagcacgacaaggcctacgaccagcagctgcaggcgggtgacaatccgtacctgcggtataaccacgccgacgccgagtttcaggagcgtctgcaagaagatacgtcttttgggggcaacctcgggcgagcagtcttccaggccaagaagcgggttctcgaacctctcggtctggttgaggaaggcgctaagacggctcctggaaagaagagaccggtagagccatcaccccagcgttctccagactcctctacgggcatcggcaagaagggccaacagcccgccagaaaaagactcaattttggtcagactggcgactcagagtcagttccagaccctcaacctctcggagaacctccagcagcgccctctggtgtgggacctaatacaatggctgcaggcggtggcgcaccaatggcagacaataacgaaggcgccgacggagtgggtagttcctcgggaaattggcattgcgattccacatggctgggcgacagagtcatcaccaccagcacccgaacctgggccctgcccacctacaacaaccacctctacaagcaaatctccaacgggacatcgggaggagccaccaacgacaacacctacttcggctacagcaccccctgggggtattttgactttaacagattccactgccacttttcaccacgtgactggcagcgactcatcaacaacaactggggattccggcccaagagactcagcttcaagctcttcaacatccaggtcaaggaggtcacgcagaatgaaggcaccaagaccatcgccaataacctcaccagcaccatccaggtgtttacggactcggagtaccagctgccgtacgttctcggctctgcccaccagggctgcctgcctccgttcccggcggacgtgttcacgattccccagtacggctacctaacactcaacaacggtagtcaggccgtgggacgctcctccttctactgcctggaatactttccttcgcagatgctgagaaccggcaacaacttccagtttacttacaccttcgaggacgtgcctttccacagcagctacgcccacagccagagcttggaccggctgatgaatcctctgattgaccagtacctgtactacttgtctcggattcaaacaacaggaggcacggcaaatacgcagactctgggcttcagccaaggtgggcctaatacaatggccaatcaggcaaagaactggctgccaggaccctgttaccgccaacaacgcgtctcaacgacaaccgggcaaaacaacaatagcaactttgcctggactgctgggaccaaataccatctgaatggaagaaattcattggctaatcctggcatcgctatggcaacacacaaagacgacgaggagcgtttttttcccagtaacgggatcctgatttttggcaaacaaaatgctgtcagagacaatgcggattacagcgatgtcatgcccaccagcgaggaagaaatcaaaaccactaaccctgtggccacagaggaatacggtatcgtggcagataacttgcagcagcaaaacacggctcctcaaattggaactgtcaacagccagggggccttacccggtatggtctggcagaaccgggacgtgtacctgcagggtcccatctgggccaagattcctcacacggacggcaacttccacccgtctccgctgatgggcggctttggcctgaaacatcctccgcctcagatcctgatcaagaacacgcctgtacctgcggatcctccgaccaccttcaaccagtcaaagctgaactctttcatcacgcaatacagcaccggacaggtcagcgtggaaattgaatgggagctgcagaaggaaaacagcaagcgctggaaccccgagatccagtacacctccaactactacaaatctacaagtgtggactttgctgttaatacagaaggcgtgtactctgaaccccgccccattggcacccgttacctcacccgtaatctgtaa

SEQ ID NO: 3926 - DNA, 2217 bp, synthetic construct
  misc_feature 1..2217: note = source = /note="Description of Artificial Sequence: Synthetic polynucleotide"
  source 1..2217: mol_type = other DNA
atggctgccgatggttatcttccagattggctcgaggacaacctctctgagggcattcgcgagtggtgggcgctgaaacctggagccccgaagcccaaagccaaccagcaaaagcaggacgacggccggggtctggtgcttcctggctacaagtacctcggacccttcaacggactcgacaagggggagcccgtcaacgcggcggacgcggcggccctcgagcacgacaaggcctacgaccagcagctgcaggcgggtgacaatccgtacctgcggtataaccacgccgacgccgagtttcaggagcgtctgcaagaagatacgtcttttgggggcaacctcgggcgagcagtcttccaggccaagaagcgggttctcgaacctctcggtctggttgaggaaggcgctaagacggctcctggaaagaagagaccggtagagccatcaccccagcgttctccagactcctctacgggcatcggcaagaagggccaacagcccgccagaaaaagactcaattttggtcagactggcgactcagagtcagttccagaccctcaacctctcggagaacctccagcagcgccctctggtgtgggacctaatacaatggctgcaggcggtggcgcaccaatggcagacaataacgaaggcgccgacggagtgggtagttcctcgggaaattggcattgcgattccacatggctgggcgacagagtcatcaccaccagcacccgaacctgggccctgcccacctacaacaaccacctctacaagcaaatctccaacgggacatcgggaggagccaccaacgacaacacctacttcggctacagcaccccctgggggtattttgactttaacagattccactgccacttttcaccacgtgactggcagcgactcatcaacaacaactggggattccggcccaagagactcagcttcaagctcttcaacatccaggtcaaggaggtcacgcagaatgaaggcaccaagaccatcgccaataacctcaccagcaccatccaggtgtttacggactcggagtaccagctgccgtacgttctcggctctgcccaccagggctgcctgcctccgttcccggcggacgtgttcacgattccccagtacggctacctaacactcaacaacggtagtcaggccgtgggacgctcctccttctactgcctggaatactttccttcgcagatgctgagaaccggcaacaacttccagtttacttacaccttcgaggacgtgcctttccacagcagctacgcccacagccagagcttggaccggctgatgaatcctctgattgaccagtacctgtactacttgtctcggattcaaacaacaggaggcacggcaaatacgcagactctgggcttcagccaaggtgggcctaatacaatggccaatcaggcaaagaactggctgccaggaccctgttaccgccaacaacgcgtctcaacgacaaccgggcaaaacaacaatagcaactttgcctggactgctgggaccaaataccatctgaatggaagaaattcattggctaatcctggcatcgctatggcaacacacaaagacgacgaggagcgtttttttcccagtaacgggatcctgatttttggcaaacaaaatgctgccagagacaatgcggattacagcgatgtcatgcccaccagcgaggaagaaatcaaaaccactaaccctgtggccacagaggaatacggtatcgtggcagataacttgcagcagcaaaacacggctcctcaaattggaactgtcaacagccagggggccttacccggtatggtctggcagaaccgggacgtgtacctgcagggtcccatctgggccaagattcctcacacggacggcaacttccacccgtctccgctgatgggcggctttggcctgaaacatcctccgcctcagatcctgatcaagaacacgcctgtacctgcggatcctccgaccaccttcaaccagtcaaagctgaactctttcatcgcgcaatacagcaccggacaggtcagcgtggaaattgaatgggagctgcagaaggaaaacagcaagcgctggaaccccgagatccagtacacctccaactactacaaatctacaagtgtggactttgctgttaatacagaaggcgtgtactctgaaccccgccccattggcacccgttacctcacccgtaatctgtaa

SEQ ID NO: 3927 - DNA, 2217 bp, synthetic construct
  misc_feature 1..2217: note = source = /note="Description of Artificial Sequence: Synthetic polynucleotide"
  source 1..2217: mol_type = other DNA
atggctgccgatggttatcttccagattggctcgaggacaacctctctgagggcattcgcgagtggtgggcgctgaaacctggagccccgaagcccaaagccaaccagcaaaagcaggacgacggccggggtctggtgcttcctggctacaagtacctcggacccttcaacggactcgacaagggggagcccgtcaacgcggcggacgcggcggccctcgagcacgacaaggcctacgaccagcagctgcaggcgggtgacaatccgtacctgcggtataaccacgccgacgccgagtttcaggagcgtctgcaagaagatacgtcttttgggggcaacctcgggcgagcagtcttccaggccaagaagcgggttctcgaacctctcggtctggttgaggaaggcgctaagacggctcctggaaagaagagaccggtagagccatcaccccagcgttctccagactcctctacgggcatcggcaagaagggccaacagcccgccagaaaaagactcaattttggtcagactggcgactcagagtcagttccagaccctcaacctctcggagaacctccagcagcgccctctggtgtgggacctaatacaatggctgcaggcggtggcgcaccaatggcagacaataacgaaggcgccgacggagtgggtagttcctcgggaaattggcattgcgattccacatggctgggcgacagagtcatcaccaccagcacccgaacctgggccctgcccacctacaacaaccacctctacaagcaaatctccaacgggacatcgggaggagccaccaacgacaacacctacttcggctacagcaccccctgggggtattttgactttaacagattccactgccacttttcaccacgtgactggcagcgactcatcaacaacaactggggattccggcccaagagactcagcttcaagctcttcaacatccaggtcaaggaggtcacgcagaatgaaggcaccaagaccatcgccaataacctcaccagcaccatccaggtgtttacggactcggagtaccagctgccgtacgttctcggctctgcccaccagggctgcctgcctccgttcccggcggacgtgttcacgattccccagtacggctacctaacactcaacaacggtagtcaggccgtgggacgctcctccttctactgcctggaatactttccttcgcagatgctgagaaccggcaacaacttccagtttacttacaccttcgaggacgtgcctttccacagcagctacgcccacagccagagcttggaccggctgatgaatcctctgattgaccagtacctgtactacttgtctcggattcaaacaacaggaggcacggcaaatacgcagactctgggcttcagccaaggtgggcctaatacaatggccaatcaggcaaagaactggctgccaggaccctgttaccgccaacaacgcgtctcaacgacaaccgggcaaaacaacaatagcaactttgcctggactgctgggaccaaataccatctgaatggaagaaattcattggctaatcctggcatcgctatggcaacacacaaagacggcgaggagcgtttttttcccagtaacgggatcctgatttttggcaaacaaaatgctgccagagacaatgcggattacagcgatgtcatgcccaccagcgaggaagaaatcaaaaccactaaccctgtggccacagaggaatacggtatcgtggcagataacttgcagcagcaaaacacggctcctcaaattggaactgtcaacagccagggggccttacccggtatggtctggcagaaccgggacgtgtacctgcagggtcccatctgggccaagattcctcacacggacggcaacttccacccgtctccgctgatgggcggctttggcctgaaacatcctccgcctcagatcctgatcaagaacacgcctgtacctgcggatcctccgaccaccttcaaccagtcaaagctgaactctttcatcacgcaatacagcaccggacaggtcagcgtggaaattgaatgggagctgcagaaggaaaacagcaagcgctggaaccccgagatccagtacacctccaactactacaaatctacaagtgtggactttgctgttaatacagaaggcgtgtactctgaaccccgccccattggcacccgttacctcacccgtaatctgtaa

SEQ ID NO: 3928 - DNA, 2217 bp, synthetic construct
  misc_feature 1..2217: note = source = /note="Description of Artificial Sequence: Synthetic polynucleotide"
  source 1..2217: mol_type = other DNA
atggctgccgatggttatcttccagattggctcgaggacaacctctctgagggcattcgcgagtggtgggcgctgaaacctggagccccgaagcccaaagccaaccagcaaaagcaggacgacggccggggtctggtgcttcctggctacaagtacctcggacccttcaacggactcgacaagggggagcccgtcaacgcggcggacgcggcggccctcgagcacgacaaggcctacgaccagcagctgcaggcgggtgacaatccgtacctgcggtataaccacgccgacgccgagtttcaggagcgtctgcaagaagatacgtcttttgggggcaacctcgggcgagcagtcttccaggccaagaagcgggttctcgaacctctcggtctggttgaggaaggcgctaagacggctcctggaaagaagagaccggtagagccatcaccccagcgttctccagactcctctacgggcatcggcaagaagggccaacagcccgccagaaaaagactcaattttggtcagactggcgactcagagtcagttccagaccctcaacctctcggagaacctccagcagcgccctctggtgtgggacctaatacaatggctgcaggcggtggcgcaccaatggcagacaataacgaaggcgccgacggagtgggtagttcctcgggaaattggcattgcgattccacatggctgggcgacagagtcatcaccaccagcacccgaacctgggccctgcccacctacaacaaccacctctacaagcaaatctccaacgggacatcgggaggagccaccaacgacaacacctacttcggctacagcaccccctgggggtattttgactttaacagattccactgccacttttcaccacgtgactggcagcgactcatcaacaacaactggggattccggcccaagagactcagcttcaagctcttcaacatccaggtcaaggaggtcacgcagaatgaaggcaccaagaccatcgccaataacctcaccagcaccatccaggtgtttacggactcggagtaccagctgccgtacgttctcggctctgcccaccagggctgcctgcctccgttcccggcggacgtgttcacgattccccagtacggctacctaacactcaacaacggtagtcaggccgtgggacgctcctccttctactgcctggaatactttccttcgcagatgctgagaaccggcaacaacttccagtttacttacaccttcgaggacgtgcctttccacagcagctacgcccacagccagagcttggaccggctgatgaatcctctgattgaccagtacctgtactacttgtctcggattcaaacaacaggaggcacggcaaatacgcagactctgggcttcagccaaggtgggcctaatacaatggccaatcaggcaaagaactggctgccaggaccctgttaccgccaacaacgcgtctcaacgacaaccgggcaaaacaacaatagcaactttgcctggactgctgggaccaaataccatctgaatggaagaaattcattggctaatcctggcatcgctatggcaacacacaaaggcgacgaggagcgtttttttcccagtaacgggatcctgatttttggcaaacaaaatgctgccagagacaatgcggattacagcgatgtcatgcccaccagcgaggaagaaatcaaaaccactaaccctgtggccacagaggaatacggtatcgtggcagataacttgcagcagcaaaacacggctcctcaaattggaactgtcaacagccagggggccttacccggtatggtctggcagaaccgggacgtgtacctgcagggtcccatctgggccaagattcctcacacggacggcaacttccacccgtctccgctgatgggcggctttggcctgaaacatcctccgcctcagatcctgatcaagaacacgcctgtacctgcggatcctccgaccaccttcaaccagtcaaagctgaactctttcatcacgcaatacagcaccggacaggtcagcgtggaaattgaatgggagctgcagaaggaaaacagcaagcgctggaaccccgagatccagtacacctccaactactacaaatctacaagtgtggactttgctgttaatacagaaggcgtgtactctgaaccccgccccattggcacccgttacctcacccgtaatctgtaa

SEQ ID NO: 3929 - DNA, 2217 bp, synthetic construct
  misc_feature 1..2217: note = source = /note="Description of Artificial Sequence: Synthetic polynucleotide"
  source 1..2217: mol_type = other DNA
atggctgccgatggttatcttccagattggctcgaggacaacctctctgagggcattcgcgagtggtgggcgctgaaacctggagccccgaagcccaaagccaaccagcaaaagcaggacgacggccggggtctggtgcttcctggctacaagtacctcggacccttcaacggactcgacaagggggagcccgtcaacgcggcggacgcggcggccctcgagcacgacaaggcctacaaccagcagctgcaggcgggtgacaatccgtacctgcggtataaccacgccgacgccgagtttcaggagcgtctgcaagaagatacgtcttttgggggcaacctcgggcgagcagtcttccaggccaagaagcgggttctcgaacctctcggtctggttgaggaaggcgctaagacggctcctggaaagaagagaccggtagagccatcaccccagcgttctccagactcctctacgggcatcggcaagaagggccaacagcccgccagaaaaagactcaattttggtcagactggcgactcagagtcagttccagaccctcaacctctcggagaacctccagcagcgccctctggtgtgggacctaatacaatggctgcaggcggtggcgcaccaatggcagacaataacgaaggcgccgacggagtgggtagttcctcgggaaattggcattgcgattccacatggctgggcgacagagtcatcaccaccagcacccgaacctgggccctgcccacctacaacaaccacctctacaagcaaatctccaacgggacatcgggaggagccaccaacgacaacacctacttcggctacagcaccccctgggggtattttgactttaacagattccactgccacttttcaccacgtgactggcagcgactcatcaacaacaactggggattccggcccaagagactcagcttcaagctcttcaacatccaggtcaaggaggtcacgcagaatgaaggcaccaagaccatcgccaataacctcaccagcaccatccaggtgtttacggactcggagtaccagctgccgtacgttctcggctctgcccaccagggctgcctgcctccgttcccggcggacgtgttcacgattccccagtacggctacctaacactcaacaacggtagtcaggccgtgggacgctcctccttctactgcctggaatactttccttcgcagatgctgagaaccggcaacaacttccagtttacttacaccttcgaggacgtgcctttccacagcagctacgcccacagccagagcttggaccggctgatgaatcctctgattgaccagtacctgtactacttgtctcggattcaaacaacaggaggcacggcaaatacgcagactctgggcttcagccaaggtgggcctaatacaatggccaatcaggcaaagaactggctgccaggaccctgttaccgccaacaacgcgtctcaacgacaaccgggcaaaacaacaatagcaactttgcctggactgctgggaccaaataccatctgaatggaagaaattcattggctaatcctggcatcgctatggcaacacacaaagacgacgaggagcgtttttttcccagtaacgggatcctgatttttggcaaacaaaatgctgccagagacaatgcggattacagcgatgtcatgcccaccagcgaggaagaaatcaaaaccactaaccctgtggccacagaggaatacggtatcgtggcagataacttgcagcagcaaaacacggctcctcaaattggaactgtcaacagccagggggccttacccggtatggtctggcagaaccgggacgtgtacctgcagggtcccatctgggccaagattcctcacacggacggcaacttccacccgtctccgctgatgggcggctttggcctgaaacatcctccgcctcagatcctgatcaagaacacgcctgtacctgcggatcctccgaccaccttcaaccagtcaaagctgaactctttcatcacgcaatacagcaccggacaggtcagcgtggaaattgaatgggagctgcagaaggaaaacagcaagcgctggaaccccgagatccagtacacctccaactactacaaatctacaagtgtggactttgctgttaatacagaaggcgtgtactctgaaccccgccccattggcacccgttacctcacccgtaatctgtaa

SEQ ID NO: 3930 - DNA, 2217 bp, synthetic construct
  misc_feature 1..2217: note = source = /note="Description of Artificial Sequence: Synthetic polynucleotide"
  source 1..2217: mol_type = other DNA
atggctgccgatggttatcttccagattggctcgaggacaacctctctgagggcattcgcgagtggtgggcgctgaaacctggagccccgaagcccaaagccaaccagcaaaagcaggacgacggccggggtctggtgcttcctggctacaagtacctcggacccttcaacggactcgacaagggggagcccgtcaacgcggcggacgcggcggccctcgagcacgacaaggcctacgaccagcagctgcaggcgggtgacaatccgtacctgcggtataaccacgccgacgccgagtttcaggagcgtctgcaagaagatacgtcttttgggggcaacctcgggcgagcagtcttccaggccaagaagcgggttctcgaacctctcggtctggttgaggaaggcgctaagacggctcctggaaagaagagaccggtagagccatcaccccagcgttctccagactcctctacgggcatcggcaagaagggccaacagcccgccagaaaaagactcaattttggtcagactggcgactcagagtcagttccagaccctcaacctctcggagaacctccagcagcgccctctggtgtgggacctaatacaatggctgcaggcggtggcgcaccaatggcagacaataacgaaggcgccgacggagtgggtagttcctcgggaaattggcattgcgattccacatggctgggcgacagagtcatcaccaccagcacccgaacctgggccctgcccacctacaacaaccacctctacaagcaaatctccaacgggacatcgggaggagccaccaacgacaacacctacttcggctacagcaccccctgggggtattttgactttaacagattccactgccacttttcaccacgtgactggcagcgactcatcaacaacaactggggattccggcccaagagactcagcttcaagctcttcaacatccaggtcaaggaggtcacgcagaatgaaggcaccaagaccatcgccaataacctcaccagcaccatccaggtgtttacggactcggagtaccagctgccgtacgttctcggctctgcccaccagggctgcctgcctccgttcccggcggacgtgttcacgattccccagtacggctacctaacactcaacaacggtagtcaggccgtgggacgctcctccttctactgcctggaatactttccttcgcagatgctgagaaccggcaacaacttccagtttacttacaccttcgaggacgtgcctttccacagcagctacgcccacagccagagcttggaccggctgatgaatcctctgattgaccagtacctgtactacttgtctcggattcaaacaacaggaggcacggcaaatacgcagactctgggcttcagccaaggtgggcctaatacaatggccaatcaggcaaagaactggctgccaggaccctgttaccgccaacaacgcgtctcaacgacaaccgggcaaaacaacaatagcaactttgcctggactgctgggaccaaataccatctgaatggaagaaattcattggctaatcctggcatcgctatggcaacacacaaagacgacgaggagcgtttttttcccagtaacgggatcctgatttttggcaaacaaaatgctgccagagacaatgcggattacagcgatgtcatgcccaccagcgaggaagaaatcaaaaccactaaccctgtggccacagaggaatacggtatcgtggcagataacttgcagcagcaaaacacggctcctcaaattggaactgtcaacagccagggggccttacccggtatggtctggcagaaccgggacgtgtacctgcagggtcccacctgggccaagattcctcacacggacggcaacttccacccgtctccgctgatgggcggctttggcctgaaacatcctccgcctcagatcctgatcaagaacacgcctgtacctgcggatcctccgaccaccttcaaccagtcaaagctgaactctttcatcacgcaatacagcaccggacaggtcagcgtggaaattgaatgggagctgcagaaggaaaacagcaagcgctggaaccccgagatccagtacacctccaactactacaaatctacaagtgtggactttgctgttaatacagaaggcgtgtactctgaaccccgccccattggcacccgttacctcacccgtaatctgtaa

SEQ ID NO: 3931 - DNA, 2217 bp, synthetic construct
  misc_feature 1..2217: note = source = /note="Description of Artificial Sequence: Synthetic polynucleotide"
  source 1..2217: mol_type = other DNA
atggctgccgatggttatcttccagattggctcgaggacaacctctctgagggcattcgcgagtggtgggcgctgaaacctggagccccgaagcccaaagccaaccagcaaaagcaggacgacggccggggtctggtgcttcctggctacaagtacctcggacccttcaacggactcgacaagggggagcccgtcaacgcggcggacgcggcggccctcgagcacgacaaggcctacgaccagcagctgcaggcgggtgacaatccgtacctgcggtataaccacgccgacgccgagtttcaggagcgtctgcaagaagatacgtcttttgggggcaacctcgggcgagcagtcttccaggccaagaagcgggttctcgaacctctcggtctggttgaggaaggcgctaagacggctcctggaaagaagagaccggtagagccatcaccccagcgttctccagactcctctacgggcatcggcaagaagggccaacagcccgccagaaaaagactcaattttggtcagactggcgactcagagtcagttccagaccctcaacctctcggagaacctccagcagcgccctctggtgtgggacctaatacaatggctgcaggcggtggcgcaccaatggcagacaataacgaaggcgccgacggagtgggtagttcctcgggaaattggcattgcgattccacatggctgggcgacagagtcatcaccaccagcacccgaacctgggccctgcccacctacaacaaccacctctacaagcaaatctccaacgggacatcgggaggagccaccaacgacaacacctacttcggctacagcaccccctgggggtattttgactttaacagattccactgccacttttcaccacgtgactggcagcgactcatcaacaacaactggggattccggcccaagagactcagcttcaagctcttcaacatccaggtcaaggaggtcacgcagaatgaaggcaccaagaccatcgccaataacctcaccagcaccatccaggtgtttacggactcggagtaccagctgccgtacgttctcggctctgcccaccagggctgcctgcctccgttcccggcggacgtgttcacgattccccagtacggctacctaacactcaacaacggtagtcaggccgtgggacgctcctccttctactgcctggaatactttccttcgcagatgctgagaaccggcaacaacttccagtttacttacaccttcgaggacgtgcctttccacagcagctacgcccacagccagagcttggaccggctgatgaatcctctgattgaccagtacctgtactacttgtctcggattcaaacaacaggaggcacggcaaatacgcagactctgggcttcagccaaggtgggcctaatacaatggccaatcaggcaaagaactggctgccaggaccctgttaccgccaacaacgcgtctcaacgacaaccgggcaaaacaacaatagcaactttgcctggactgctgggaccaaataccatctgaatggaagaaattcattggctaatcctggcatcgctatggcaacacacaaagacgacgaggagcgtttttttcccagtaacgggatcctgatttttggcaaacaaaatgctgccagagacaatgcggattacagcgatgtcatgcccaccagcgaggaagaaatcaaaaccactaaccctgtggccacagaggaatacggtatcgtggcagataacttgcggcagcaaaacacggctcctcaaattggaactgtcaacagccagggggccttacccggtatggtctggcagaaccgggacgtgtacctgcagggtcccatctgggccaagattcctcacacggacggcaacttccacccgtctccgctgatgggcggctttggcctgaaacatcctccgcctcagatcctgatcaagaacacgcctgtacctgcggatcctccgaccaccttcaaccagtcaaagctgaactctttcatcacgcaatacagcaccggacaggtcagcgtggaaattgaatgggagctgcagaaggaaaacagcaagcgctggaaccccgagatccagtacacctccaactactacaaatctacaagtgtggactttgctgttaatacagaaggcgtgtactctgaaccccgccccattggcacccgttacctcacccgtaatctgtaa

SEQ ID NO: 3932 - DNA, 2217 bp, synthetic construct
  misc_feature 1..2217: note = source = /note="Description of Artificial Sequence: Synthetic polynucleotide"
  source 1..2217: mol_type = other DNA
atggctgccgatggttatcttccagattggctcgaggacaacctctctgagggcattcgcgagtggtgggcgctgaaacctggagccccgaagcccaaagccaaccagcaaaagcaggacgacggccggggtctggtgcttcctggctacaagtacctcggacccttcaacggactcgacaagggggagcccgtcaacgcggcggacgcggcggccctcgagcacgacaaggcctacgaccagcagctgcaggcgggtgacaatccgtacctgcggtataaccacgccgacgccgagtttcaggagcgtctgcaagaagatacgtcttttgggggcaacctcgggcgagcagtcttccaggccaagaagcgggttctcgaacctctcggtctggttgaggaaggcgctaagacggctcctggaaagaagagaccggtagagccatcaccccagcgttctccagactcctctacgggcatcggcaagaagggccaacagcccgccagaaaaagactcaattttggtcagactggcgactcagagtcagttccagaccctcaacctctcggagaacctccagcagcgccctctggtgtgggacctaatacaatggctgcaggcggtggcgcaccaatggcagacaataacgaaggcgccgacggagtgggtagttcctcgggaaattggcattgcgattccacatggctgggcgacagagtcatcaccaccagcacccgaacctgggccctgcccacctacaacaaccacctctacaagcaaatctccaacgggacatcgggaggagccaccaacgacaacacctacttcggctacagcaccccctgggggtattttgactttaacagattccactgccacttttcaccacgtgactggcagcgactcatcaacaacaactggggattccggcccaagagactcagcttcaagctcttcaacatccaggtcaaggaggtcacgcagaatgaaggcaccaagaccatcgccaataacctcaccagcaccatccaggtgtttacggactcggagtaccagctgccgtacgttctcggctctgcccaccagggctgcctgcctccgttcccggcggacgtgttcacgattccccagtacggctacctaacactcaacaacggtagtcaggccgtgggacgctcctccttctactgcctggaatactttccttcgcagatgctgagaaccggcaacaacttccagtttacttacaccttcgaggacgtgcctttccacagcagctacgcccacagccagagcttggaccggctgatgaatcctctgattgaccagtacctgtactacttgtctcggattcaaacaacaggaggcacggcaaatacgcagactctgggcttcagccaaggtgggcctaatacaatggccaatcaggcaaagaactggctgccaggaccctgttaccgccaacaacgcgtctcaacgacaaccgggcaaaacaacaatagcaactttgcctggactgctgggaccaaataccatctgaatggaagaaattcattggctaatcctggcatcgctatggcaacacacaaagacgacgaggagcgtttttttcccagtaacgggatcctgatttttggcaaacaaaatgctgccagagacaatgcggattacagcgatgccatgcccaccagcgaggaagaaatcaaaaccactaaccctgtggccacagaggaatacggtatcgtggcagataacttgcagcagcaaaacacggctcctcaaattggaactgtcaacagccagggggccttacccggtatggtctggcagaaccgggacgtgtacctgcagggtcccatctgggccaagattcctcacacggacggcaacttccacccgtctccgctgatgggcggctttggcctgaaacatcctccgcctcagatcctgatcaagaacacgcctgtacctgcggatcctccgaccaccttcaaccagtcaaagctgaactctttcatcacgcaatacagcaccggacaggtcagcgtggaaattgaatgggagctgcagaaggaaaacagcaagcgctggaaccccgagatccagtacacctccaactactacaaatctacaagtgtggactttgctgttaatacagaaggcgtgtactctgaaccccgccccattggcacccgttacctcacccgtaatctgtaa

SEQ ID NO: 3933 - DNA, 2217 bp, synthetic construct
  misc_feature 1..2217: note = source = /note="Description of Artificial Sequence: Synthetic polynucleotide"
  source 1..2217: mol_type = other DNA
atggctgccgatggttatcttccagattggctcgaggacaacctctctgagggcattcgcgagtggtgggcgctgaaacctggagccccgaagcccaaagccaaccagcaaaagcaggacgacggccggggtctggtgcttcctggctacaagtacctcggacccttcaacggactcgacaagggggagcccgtcaacgcggcggacgcggcggccctcgagcacgacaaggcctacgaccagcagctgcaggcgggtgacaatccgtacctgcggtataaccacgccgacgccgagtttcaggagcgtctgcaagaagatacgtcttttgggggcaacctcgggcgagcagtcttccaggccaagaagcgggttctcgaacctctcggtctggttgaggaaggcgctaagacggctcctggaaagaagagaccggtagagccatcaccccagcgttctccagactcctctacgggcatcggcaagaagggccaacagcccgccagaaaaagactcaattttggtcagactggcgactcagagtcagttccagaccctcaacctctcggagaacctccagcagcgccctctggtgtgggacctaatacaatggctgcaggcggtggcgcaccaatggcagacaataacgaaggcgccgacggagtgggtagttcctcgggaaattggcattgcgattccacatggctgggcgacagagtcatcaccaccagcacccgaacctgggccctgcccacctacaacaaccacctctacaagcaaatctccaacgggacatcgggaggagccaccaacggcaacacctacttcggctacagcaccccctgggggtattttgactttaacagattccactgccacttttcaccacgtgactggcagcgactcatcaacaacaactggggattccggcccaagagactcagcttcaagctcttcaacatccaggtcaaggaggtcacgcagaatgaaggcaccaagaccatcgccaataacctcaccagcaccatccaggtgtttacggactcggagtaccagctgccgtacgttctcggctctgcccaccagggctgcctgcctccgttcccggcggacgtgttcacgattccccagtacggctacctaacactcaacaacggtagtcaggccgtgggacgctcctccttctactgcctggaatactttccttcgcagatgctgagaaccggcaacaacttccagtttacttacaccttcgaggacgtgcctttccacagcagctacgcccacagccagagcttggaccggctgatgaatcctctgattgaccagtacctgtactacttgtctcggattcaaacaacaggaggcacggcaaatacgcagactctgggcttcagccaaggtgggcctaatacaatggccaatcaggcaaagaactggctgccaggaccctgttaccgccaacaacgcgtctcaacgacaaccgggcaaaacaacaatagcaactttgcctggactgctgggaccaaataccatctgaatggaagaaattcattggctaatcctggcatcgctatggcaacacacaaagacgacgaggagcgtttttttcccagtaacgggatcctgatttttggcaaacaaaatgctgccagagacaatgcggattacagcgatgtcatgcccaccagcgaggaagaaatcaaaaccactaaccctgtggccacagaggaatacggtatcgtggcagataacttgcagcagcaaaacacggctcctcaaattggaactgtcaacagccagggggccttacccggtatggtctggcagaaccgggacgtgtacctgcagggtcccatctgggccaagattcctcacacggacggcaacttccacccgtctccgctgatgggcggctttggcctgaaacatcctccgcctcagatcctgatcaagaacacgcctgtacctgcggatcctccgaccaccttcaaccagtcaaagctgaactctttcatcacgcaatacagcaccggacaggtcagcgtggaaattgaatgggagctgcagaaggaaaacagcaagcgctggaaccccgagatccagtacacctccaactactacaaatctacaagtgtggactttgctgttaatacagaaggcgtgtactctgaaccccgccccattggcacccgttacctcacccgtaatctgtaa

SEQ ID NO: 3934 - DNA, 2217 bp, synthetic construct
  misc_feature 1..2217: note = source = /note="Description of Artificial Sequence: Synthetic polynucleotide"
  source 1..2217: mol_type = other DNA
atggctgccgatggttatcttccagattggctcgaggacaacctctctgagggcattcgcgagtggtgggcgctgaaacctggagccccgaagcccaaagccaaccagcaaaagcaggacgacggccggggtctggtgcttcctggctacaagtacctcggacccttcaacggactcgacaagggggagcccgtcaacgcggcggacgcggcggccctcgagcacgacaaggcctacgaccagcagctgcaggcgggtgacaatccgtacctgcggtataaccacgccgacgccgagtttcaggagcgtctgcaagaagatacgtcttttgggggcaacctcgggcgagcagtcttccaggccaagaagcgggttctcgaacctctcggtctggttgaggaaggcgctaagacggctcctggaaagaagagaccggtagagccatcaccccagcgttctccagactcctctacgggcatcggcaagaagggccaacagcccgccagaaaaagactcaattttggtcagactggcgactcagagtcagttccagaccctcaacctctcggagaacctccagcagcgccctctggtgtgggacctaatacaatggctgcaggcggtggcgcaccaatggcagacaataacgaaggcgccgacggagtgggtagttcctcgggaaattggcattgcgattccacatggctgggcgacagagtcatcaccaccagcacccgaacctgggccctgcccacctacaacaaccacctctacaagcaaatctccaacgggacatcgggaggagccaccaacgacaacacctacttcggctacagcaccccctgggggtattttgactttaacagattccactgccacttttcaccacgtgactggcagcgactcatcaacaacaactggggattccggcccaagagactcagcttcaagctcttcaacatccaggtcaaggaggtcgcgcagaatgaaggcaccaagaccatcgccaataacctcaccagcaccatccaggtgtttacggactcggagtaccagctgccgtacgttctcggctctgcccaccagggctgcctgcctccgttcccggcggacgtgttcacgattccccagtacggctacctaacactcaacaacggtagtcaggccgtgggacgctcctccttctactgcctggaatactttccttcgcagatgctgagaaccggcaacaacttccagtttacttacaccttcgaggacgtgcctttccacagcagctacgcccacagccagagcttggaccggctgatgaatcctctgattgaccagtacctgtactacttgtctcggattcaaacaacaggaggcacggcaaatacgcagactctgggcttcagccaaggtgggcctaatacaatggccaatcaggcaaagaactggctgccaggaccctgttaccgccaacaacgcgtctcaacgacaaccgggcaaaacaacaatagcaactttgcctggactgctgggaccaaataccatctgaatggaagaaattcattggctaatcctggcatcgctatggcaacacacaaagacgacgaggagcgtttttttcccagtaacgggatcctgatttttggcaaacaaaatgctgccagagacaatgcggattacagcgatgtcatgcccaccagcgaggaagaaatcaaaaccactaaccctgtggccacagaggaatacggtatcgtggcagataacttgcagcagcaaaacacggctcctcaaattggaactgtcaacagccagggggccttacccggtatggtctggcagaaccgggacgtgtacctgcagggtcccatctgggccaagattcctcacacggacggcaacttccacccgtctccgctgatgggcggctttggcctgaaacatcctccgcctcagatcctgatcaagaacacgcctgtacctgcggatcctccgaccaccttcaaccagtcaaagctgaactctttcatcacgcaatacagcaccggacaggtcagcgtggaaattgaatgggagctgcagaaggaaaacagcaagcgctggaaccccgagatccagtacacctccaactactacaaatctacaagtgtggactttgctgttaatacagaaggcgtgtactctgaaccccgccccattggcacccgttacctcacccgtaatctgtaa

SEQ ID NO: 3935 - DNA, 2217 bp, synthetic construct
  misc_feature 1..2217: note = source = /note="Description of Artificial Sequence: Synthetic polynucleotide"
  source 1..2217: mol_type = other DNA
atggctgccgatggttatcttccagattggctcgaggacaacctctctgagggcattcgcgagtggtgggcgctgaaacctggagccccgaagcccaaagccaaccagcaaaagcaggacgacggccggggtctggtgcttcctggctacaagtacctcggacccttcaacggactcgacaagggggagcccgtcaacgcggcggacgcggcggccctcgagcacgacaaggcctacgaccagcagctgcaggcgggtgacaatccgtacctgcggtataaccacgccgacgccgagtttcaggagcgtctgcaagaagatacgtcttttgggggcaacctcgggcgagcagtcttccaggccaagaagcgggttctcgaacctctcggtctggttgaggaaggcgctaagacggctcctggaaagaagagaccggtagagccatcaccccagcgttctccagactcctctacgggcatcggcaagaagggccaacagcccgccagaaaaagactcaattttggtcagactggcgactcagagtcagttccagaccctcaacctctcggagaacctccagcagcgccctctggtgtgggacctaatacaatggctgcaggcggtggcgcaccaatggcagacaataacgaaggcgccgacggagtgggtagttcctcgggaaattggcattgcgattccacatggctgggcgacagagtcatcaccaccagcacccgaacctgggccctgcccacctacaacaaccacctctacaagcaaatctccaacgggacatcgggaggagccaccaacgacaacacctacttcggctacagcaccccctgggggtattttgactttaacagattccactgccacttttcaccacgtgactggcagcgactcatcaacaacaactggggattccggcccaagagactcagcttcaagctcttcaacatccaggtcaaggaggtcacgcagaatgaaggcaccaagaccatcgccaataacctcaccagcaccatccaggtgtttacggactcggagtaccagctgccgtacgttctcggctctgcccaccagggctgcctgcctccgttcccggcggacgtgttcacgattccccagtacggctacctaacactcaacaacggtagtcaggccgtgggacgctcctccttctactgcctggaatactttccttcgcagatgctgagaaccggcaacaacttccagtttacttacaccttcgaggacgtgcctttccacagcagctacgcccacagccagagcttggaccggctgatgaatcctctgattgaccagtacctgtactacttgtctcggattcaaacaacaggaggcacggcaaatacgcagactctgggcttcagccaaggtgggcctaatacaatggccaatcaggcaaagaactggctgccaggaccctgttaccgccaacaacgcgtctcaacgacaaccgggcaaaacaacaatagcaactttgcctggactgctgggaccaaataccatctgaatggaagaaattcattggctaatcctggcatcgctatggcaacacacaaagacgacgaggagcgtttttttcccagtaacgggatcctgatttttggcaaacaaaatgctgccagagacaatgcggattacagcgatgtcatgcccaccagcgaggaagaaatcaaaaccactaaccctgtggccacagaggaatacggtatcgtggcagataacttgcagcagcaaaacacggctcctcaaattggaactgtcaacagccagggggccttacccggtatggtctggcagaaccgggacgtgtacctgcagggtcccatctgggccaagattcctcacacggacggcaacttccacccgtctccgctgatgggcggctttggcctgaaacatcctccgcctcagatcctgatcaagaacacgcctgtacctgcggatcctccgaccaccttcaaccagtcaaagctgaactctttcatcacgcaatacagcaccggacaggtcagcgcggaaattgaatgggagctgcagaaggaaaacagcaagcgctggaaccccgagatccagtacacctccaactactacaaatctacaagtgtggactttgctgttaatacagaaggcgtgtactctgaaccccgccccattggcacccgttacctcacccgtaatctgtaa

SEQ ID NO: 3936 - DNA, 2217 bp, synthetic construct
  misc_feature 1..2217: note = source = /note="Description of Artificial Sequence: Synthetic polynucleotide"
  source 1..2217: mol_type = other DNA
atggctgccgatggttatcttccagattggctcgaggacaacctctctgagggcattcgcgagtggtgggcgctgaaacctggagccccgaagcccaaagccaaccagcaaaagcaggacgacggccggggtctggtgcttcctggctacaagtacctcggacccttcaacggactcgacaagggggagcccgtcaacgcggcggacgcggcggccctcgagcacgacaaggcctacgaccagcagctgcaggcgggtgacaatccgtacctgcggtataaccacgccgacgccgagtttcaggagcgtctgcaagaagatacgtcttttgggggcaacctcgggcgagcagtcttccaggccaagaagcgggttctcgaacctctcggtctggttgaggaaggcgctaagacggctcctggaaagaagagaccggtagagccatcaccccagcgttctccagactcctctacgggcatcggcaagaagggccaacagcccgccagaaaaagactcaattttggtcagactggcgactcagagtcagttccagaccctcaacctctcggagaacctccagcagcgccctctggtgtgggacctaatacaatggctgcaggcggtggcgcaccaatggcagacaataacgaaggcgccgacggagtgggtagttcctcgggaaattggcattgcgattccacatggctgggcgacagagtcatcaccaccagcacccgaacctgggccctgcccacctacaacaaccacctctacaagcaaatctccaacgggacatcgggaggagccaccaacgacaacacctacttcggctacagcaccccctgggggtattttgactttaacagattccactgccacttttcaccacgtgactggcagcgactcatcaacaacaactggggattccggcccaagagactcagcttcaagctcttcaacatccaggtcaaggaggtcacgcagaatgaaggcaccaagaccatcgccaataacctcaccagcaccatccaggtgtttacggactcggagtaccagctgccgtacgttctcggctctgcccaccagggctgcctgcctccgttcccggcggacgtgttcacgattccccagtacggctacctaacactcaacaacggtagtcaggccgtgggacgctcctccttctactgcctggaatactttccttcgcagatgctgagaaccggcaacaacttccagtttacttacaccttcgaggacgtgcctttccacagcagctacgcccacagccagggcttggaccggctgatgaatcctctgattgaccagtacctgtactacttgtctcggattcaaacaacaggaggcacggcaaatacgcagactctgggcttcagccaaggtgggcctaatacaatggccaatcaggcaaagaactggctgccaggaccctgttaccgccaacaacgcgtctcaacgacaaccgggcaaaacaacaatagcaactttgcctggactgctgggaccaaataccatctgaatggaagaaattcattggctaatcctggcatcgctatggcaacacacaaagacgacgaggagcgtttttttcccagtaacgggatcctgatttttggcaaacaaaatgctgccagagacaatgcggattacagcgatgtcatgcccaccagcgaggaagaaatcaaaaccactaaccctgtggccacagaggaatacggtatcgtggcagataacttgcagcagcaaaacacggctcctcaaattggaactgtcaacagccagggggccttacccggtatggtctggcagaaccgggacgtgtacctgcagggtcccatctgggccaagattcctcacacggacggcaacttccacccgtctccgctgatgggcggctttggcctgaaacatcctccgcctcagatcctgatcaagaacacgcctgtacctgcggatcctccgaccaccttcaaccagtcaaagctgaactctttcatcacgcaatacagcaccggacaggtcagcgtggaaattgaatgggagctgcagaaggaaaacagcaagcgctggaaccccgagatccagtacacctccaactactacaaatctacaagtgtggactttgctgttaatacagaaggcgtgtactctgaaccccgccccattggcacccgttacctcacccgtaatctgtaa

SEQ ID NO: 3937 - DNA, 2217 bp, synthetic construct
  misc_feature 1..2217: note = source = /note="Description of Artificial Sequence: Synthetic polynucleotide"
  source 1..2217: mol_type = other DNA
atggctgccgatggttatcttccagattggctcgaggacaacctctctgagggcattcgcgagtggtgggcgctgaaacctggagccccgaagcccaaagccaaccagcaaaagcaggacgacggccggggtctggtgcttcctggctacaagtacctcggacccttcaacggactcgacaagggggagcccgtcaacgcggcggacgcggcggccctcgagcacgacaaggcctacgaccagcagctgcaggcgggtgacaatccgtacctgcggtataaccacgccgacgccgagtttcaggagcgtctgcaagaagatacgtcttttgggggcaacctcgggcgagcagtcttccaggccaagaagcgggttctcgaacctctcggtctggttgaggaaggcgctaagacggctcctggaaagaagagaccggtagagccatcaccccagcgttctccagactcctctacgggcatcggcaagaagggccaacagcccgccagaaaaagactcaattttggtcagactggcgactcagagtcagttccagaccctcaacctctcggagaacctccagcagcgccctctggtgtgggacctaatacaatggctgcaggcggtggcgcaccaatggcagacaataacgaaggcgccgacggagtgggtagttcctcgggaaattggcattgcgattccacatggctgggcgacagagtcatcaccaccagcacccgaacctgggccctgcccacctacaacaaccacctctacaagcaaatctccaacgggacatcgggaggagccaccaacgacaacacctacttcggctacagcaccccctgggggtattttgactttaacagattccactgccacttttcaccacgtgactggcagcgactcatcaacaacaactggggattccggcccaagagactcagcttcaagctcttcaacatccaggtcaaggaggtcacgcagaatgaaggcaccaagaccatcgccaataacctcaccagcaccatccaggtgtttacggactcggagtaccagctgccgtacgttctcggctctgcccaccagggctgcctgcctccgttcccggcggacgtgttcacgattccccagtacggctacctaacactcaacaacggtagtcaggccgtgggacgctcctccttctactgcctggaatactttccttcgcagatgctgagaaccggcagcaacttccagtttacttacaccttcgaggacgtgcctttccacagcagctacgcccacagccagagcttggaccggctgatgaatcctctgattgaccagtacctgtactacttgtctcggattcaaacaacaggaggcacggcaaatacgcagactctgggcttcagccaaggtgggcctaatacaatggccaatcaggcaaagaactggctgccaggaccctgttaccgccaacaacgcgtctcaacgacaaccgggcaaaacaacaatagcaactttgcctggactgctgggaccaaataccatctgaatggaagaaattcattggctaatcctggcatcgctatggcaacacacaaagacgacgaggagcgtttttttcccagtaacgggatcctgatttttggcaaacaaaatgctgccagagacaatgcggattacagcgatgtcatgcccaccagcgaggaagaaatcaaaaccactaaccctgtggccacagaggaatacggtatcgtggcagataacttgcagcagcaaaacacggctcctcaaattggaactgtcaacagccagggggccttacccggtatggtctggcagaaccgggacgtgtacctgcagggtcccatctgggccaagattcctcacacggacggcaacttccacccgtctccgctgatgggcggctttggcctgaaacatcctccgcctcagatcctgatcaagaacacgcctgtacctgcggatcctccgaccaccttcaaccagtcaaagctgaactctttcatcacgcaatacagcaccggacaggtcagcgtggaaattgaatgggagctgcagaaggaaaacagcaagcgctggaaccccgagatccagtacacctccaactactacaaatctacaagtgtggactttgctgttaatacagaaggcgtgtactctgaaccccgccccattggcacccgttacctcacccgtaatctgtaa

SEQ ID NO: 3938 - DNA, 2217 bp, synthetic construct
  misc_feature 1..2217: note = source = /note="Description of Artificial Sequence: Synthetic polynucleotide"
  source 1..2217: mol_type = other DNA
atggctgccgatggttatcttccagattggctcgaggacaacctctctgagggcattcgcgagtggtgggcgctgaaacctggagccccgaagcccaaagccaaccagcaaaagcaggacgacggccggggtctggtgcttcctggctacaagtacctcggacccttcaacggactcgacaagggggagcccgtcaacgcggcggacgcggcggccctcgagcacgacaaggcctacgaccagcagctgcaggcgggtgacaatccgtacctgcggtataaccacgccgacgccgagtttcaggagcgtctgcaagaagatacgtcttttgggggcaacctcgggcgagcagtcttccaggccaagaagcgggttctcgaacctctcggtctggttgaggaaggcgctaagacggctcctggaaagaagagaccggtagagccatcaccccagcgttctccagactcctctacgggcatcggcaagaagggccaacagcccgccagaaaaagactcaattttggtcagactggcgactcagagtcagttccagaccctcaacctctcggagaacctccagcagcgccctctggtgtgggacctaatacaatggctgcaggcggtggcgcaccaatggcagacaataacgaaggcgccgacggagtgggtagttcctcgggaaattggcattgcgattccacatggctgggcgacagagtcatcaccaccagcacccgaacctgggccctgcccacctacaacaaccacctctacaagcaaatctccaacgggacatcgggaggagccaccaacgacaacacctacttcggctacagcaccccctgggggtattttgactttaacagattccactgccacttttcaccacgtgactggcagcgactcatcaacaacaactggggattccggcccaagagactcagcttcaagctcttcaacatccaggtcaaggaggtcacgcagaatgaaggcaccaagaccatcgccaataacctcaccagcaccatccaggtgtttacggactcggagtaccagctgccgtacgttctcggctctgcccaccagggctgcctgcctccgttcccggcggacgtgttcacgattccccagtacggctacctaacactcaacaacggtagtcaggccgtgggacgctcctccttctactgcctggaatactttccttcgcagatgctgagaaccggcaacaacttccagtttacttacaccttcgaggacgtgcctttccacagcagctacgcccacagccagagcttggaccggctgatgaatcctctgattgaccagtacctgtactacttgtctcggattcaaacaacaggaggcacggcaaatacgcagactctgggcttcagccaaggtgggcctaatacaatggccaatcaggcaaagaactggctgccaggaccctgttaccgccaacaacgcgtctcaacgacaaccgggcaaaacaacaatagcaactttgcctggactgctgggaccaaataccatctgaatggaagaaattcattggctaatcctggcatcgctatggcaacacacaaagacgacgaggagcgtttttttcccagtaacgggatcctgatttttggcaaacaaaatgctgccagagacaatgcggattacagcgatgtcatgcccaccagcgaggaagaaatcaaaaccactaaccctgtggccacagaggaatacggtatcgtggcagataacttgcagcagcaaaacacggctcctcaaattggaactgtcaacagccagggggccttacccggtatggtctggcagaaccgggacgtgtacctgcagggtcccatctgggccaagattcctcacacggacggcaacttccacccgtctccgctgatgggcggctttggcctgaaacatcctccgcctcagatcctgatcaagaacacgcctgtacctgcggatcctccgaccaccttcaaccagtcaaagctgaactctttcatcacgcaatacagcaccggacaggtcagcgtggaaattgaatgggagctgcggaaggaaaacagcaagcgctggaaccccgagatccagtacacctccaactactacaaatctacaagtgtggactttgctgttaatacagaaggcgtgtactctgaaccccgccccattggcacccgttacctcacccgtaatctgtaa

SEQ ID NO: 3939 - DNA, 2217 bp, synthetic construct
  misc_feature 1..2217: note = source = /note="Description of Artificial Sequence: Synthetic polynucleotide"
  source 1..2217: mol_type = other DNA
atggctgccgatggttatcttccagattggctcgaggacaacctctctgagggcattcgcgagtggtgggcgctgaaacctggagccccgaagcccaaagccaaccagcaaaagcaggacgacggccggggtctggtgcttcctggctacaagtacctcggacccttcaacggactcgacaagggggagcccgtcaacgcggcggacgcggcggccctcgagcacgacaaggcctacgaccagcagctgcaggcgggtgacaatccgtacctgcggtataaccacgccgacgccgagtttcaggagcgtctgcaagaagatacgtcttttgggggcaacctcgggcgagcagtcttccaggccaagaagcgggttctcgaacctctcggtctggttgaggaaggcgctaagacggctcctggaaagaagagaccggtagagccatcaccccagcgttctccagactcctctacgggcatcggcaagaagggccaacagcccgccagaaaaagactcaattttggtcagactggcgactcagagtcagttccagaccctcaacctctcggagaacctccagcagcgccctctggtgtgggacctaatacaatggctgcaggcggtggcgcaccaatggcagacaataacgaaggcgccgacggagtgggtagttcctcgggaaattggcattgcgattccacatggctgggcgacagagtcatcaccaccagcacccgaacctgggccctgcccacctacaacaaccacctctacaagcaaatctccaacgggacatcgggaggagccaccaacgacaacacctacttcggctacagcaccccctgggggtattttgactttaacagattccactgccacttttcaccacgtgactggcagcgactcatcaacaacaactggggattccggcccaagagactcagcttcaagctcttcaacatccaggtcaaggaggtcacgcagaatgaaggcaccaagaccatcgccaataacctcaccagcaccatccaggtgtttacggactcggagtaccagctgccgtacgttctcggctctgcccaccagggctgcctgcctccgttcccggcggacgtgttcacgattccccagtacggctacctaacactcaacaacggtagtcaggccgtgggacgctcctccttctactgcctggaatactttccttcgcagatgctgagaaccggcaacaacttccagtttacttacaccttcgaggacgcgcctttccacagcagctacgcccacagccagagcttggaccggctgatgaatcctctgattgaccagtacctgtactacttgtctcggattcaaacaacaggaggcacggcaaatacgcagactctgggcttcagccaaggtgggcctaatacaatggccaatcaggcaaagaactggctgccaggaccctgttaccgccaacaacgcgtctcaacgacaaccgggcaaaacaacaatagcaactttgcctggactgctgggaccaaataccatctgaatggaagaaattcattggctaatcctggcatcgctatggcaacacacaaagacgacgaggagcgtttttttcccagtaacgggatcctgatttttggcaaacaaaatgctgccagagacaatgcggattacagcgatgtcatgcccaccagcgaggaagaaatcaaaaccactaaccctgtggccacagaggaatacggtatcgtggcagataacttgcagcagcaaaacacggctcctcaaattggaactgtcaacagccagggggccttacccggtatggtctggcagaaccgggacgtgtacctgcagggtcccatctgggccaagattcctcacacggacggcaacttccacccgtctccgctgatgggcggctttggcctgaaacatcctccgcctcagatcctgatcaagaacacgcctgtacctgcggatcctccgaccaccttcaaccagtcaaagctgaactctttcatcacgcaatacagcaccggacaggtcagcgtggaaattgaatgggagctgcagaaggaaaacagcaagcgctggaaccccgagatccagtacacctccaactactacaaatctacaagtgtggactttgctgttaatacagaaggcgtgtactctgaaccccgccccattggcacccgttacctcacccgtaatctgtaa

SEQ ID NO: 3940 - DNA, 2217 bp, synthetic construct
  misc_feature 1..2217: note = source = /note="Description of Artificial Sequence: Synthetic polynucleotide"
  source 1..2217: mol_type = other DNA
atggctgccgatggttatcttccagattggctcgaggacaacctctctgagggcattcgcgagtggtgggcgctgaaacctggagccccgaagcccaaagccaaccagcaaaagcaggacgacggccggggtctggtgcttcctggctacaagtacctcggacccttcaacggactcgacaagggggagcccgtcaacgcggcggacgcggcggccctcgagcacgacaaggcctacgaccagcagctgcaggcgggtgacaatccgtacctgcggtataaccacgccgacgccgagtttcaggagcgtctgcaagaagatacgtcttttgggggcaacctcgggcgagcagtcttccaggccaagaagcgggttctcgaacctctcggtctggttgaggaaggcgctaagacggctcctggaaagaagagaccggtagagccatcaccccagcgttctccagactcctctacgggcatcggcaagaagggccaacagcccgccagaaaaagactcaattttggtcagactggcgactcagagtcagttccagaccctcaacctctcggagaacctccagcagcgccctctggtgtgggacctaatacaatggctgcaggcggtggcgcaccaatggcagacaataacgaaggcgccgacggagtgggtagttcctcgggaaattggcattgcgattccacatggctgggcgacagagtcatcaccgccagcacccgaacctgggccctgcccacctacaacaaccacctctacaagcaaatctccaacgggacatcgggaggagccaccaacgacaacacctacttcggctacagcaccccctgggggtattttgactttaacagattccactgccacttttcaccacgtgactggcagcgactcatcaacaacaactggggattccggcccaagagactcagcttcaagctcttcaacatccaggtcaaggaggtcacgcagaatgaaggcaccaagaccatcgccaataacctcaccagcaccatccaggtgtttacggactcggagtaccagctgccgtacgttctcggctctgcccaccagggctgcctgcctccgttcccggcggacgtgttcacgattccccagtacggctacctaacactcaacaacggtagtcaggccgtgggacgctcctccttctactgcctggaatactttccttcgcagatgctgagaaccggcaacaacttccagtttacttacaccttcgaggacgtgcctttccacagcagctacgcccacagccagagcttggaccggctgatgaatcctctgattgaccagtacctgtactacttgtctcggattcaaacaacaggaggcacggcaaatacgcagactctgggcttcagccaaggtgggcctaatacaatggccaatcaggcaaagaactggctgccaggaccctgttaccgccaacaacgcgtctcaacgacaaccgggcaaaacaacaatagcaactttgcctggactgctgggaccaaataccatctgaatggaagaaattcattggctaatcctggcatcgctatggcaacacacaaagacgacgaggagcgtttttttcccagtaacgggatcctgatttttggcaaacaaaatgctgccagagacaatgcggattacagcgatgtcatgcccaccagcgaggaagaaatcaaaaccactaaccctgtggccacagaggaatacggtatcgtggcagataacttgcagcagcaaaacacggctcctcaaattggaactgtcaacagccagggggccttacccggtatggtctggcagaaccgggacgtgtacctgcagggtcccatctgggccaagattcctcacacggacggcaacttccacccgtctccgctgatgggcggctttggcctgaaacatcctccgcctcagatcctgatcaagaacacgcctgtacctgcggatcctccgaccaccttcaaccagtcaaagctgaactctttcatcacgcaatacagcaccggacaggtcagcgtggaaattgaatgggagctgcagaaggaaaacagcaagcgctggaaccccgagatccagtacacctccaactactacaaatctacaagtgtggactttgctgttaatacagaaggcgtgtactctgaaccccgccccattggcacccgttacctcacccgtaatctgtaa

SEQ ID NO: 3941 - DNA, 2217 bp, synthetic construct
  misc_feature 1..2217: note = source = /note="Description of Artificial Sequence: Synthetic polynucleotide"
  source 1..2217: mol_type = other DNA
atggctgccgatggttatcttccagattggctcgaggacaacctctctgagggcattcgcgagtggtgggcgctgaaacctggagccccgaagcccaaagccaaccagcaaaagcaggacgacggccggggtctggtgcttcctggctacaagtacctcggacccttcaacggactcgacaagggggagcccgtcaacgcggcggacgcggcggccctcgagcacgacaaggcctacgaccagcagctgcaggcgggtgacaatccgtacctgcggtataaccacgccgacgccgagtttcaggagcgtctgcaagaagatacgtcttttgggggcaacctcgggcgagcagtcttccaggccaagaagcgggttctcgaacctctcggtctggttgaggaaggcgctaagacggctcctggaaagaagagaccggtagagccatcaccccagcgttctccagactcctctacgggcatcggcaagaagggccaacagcccgccagaaaaagactcaattttggtcagactggcgactcagagtcagttccagaccctcaacctctcggagaacctccagcagcgccctctggtgtgggacctaatacaatggctgcaggcggtggcgcaccaatggcagacaataacgaaggcgccgacggagtgggtagttcctcgggaaattggcattgcgattccacatggctgggcgacagagtcatcaccaccagcacccgaacctgggccctgcccacctacaacaaccacctctacaagcaaatctccaacgggacatcgggaggagccaccaacgacaacacctacttcggctacagcaccccctgggggtattttgactttaacagattccactgccacttttcaccacgtgactggcagcgactcatcaacaacaactggggattccggcccaagagactcagcttcaagctcttcaacatccaggtcaaggaggtcacgcagaatgaaggcaccaagaccatcgccaataacctcaccagcaccatccaggtgtttacggactcggagtaccagctgccgtacgttctcggctctgcccaccagggctgcctgcctccgttcccggcggacgtgttcacgattccccagtacggctacctaacactcaacaacggtagtcaggccgtgggacgctcctccttctactgcctggaatactttccttcgcagatgctgagaaccggcaacaacttccagtttacttacaccttcgaggacgtgcctttccacagcagctacgcccacagccagagcttggaccggctgatgaatcctctgattgaccagtacctgtactacttgtctcggattcaaacaacaggaggcacggcaaatacgcagactctgggcttcagccaaggtgggcctaatacaatggccaatcaggcaaagaactggctgccaggaccctgttaccgccaacaacgcgtctcaacgacaaccgggcaaaacaacaatagcaactttgcctggactgctgggaccaaataccatctgaatggaagaaattcattggctaatcctggcatcgctatggcaacacacaaagacgacgaggagcgtttttttcccagtaacgggatcctgatttttggcaaacaaaatgctgccagagacaatgcggattacagcgatgtcatgcccaccagcgaggaagaaatcaaaaccactaaccctgtggccacagaggaatacggtatcgtggcagataacttgcagcagcaaaacacggctcctcaaattggaactgtcaacagccagggggccttacccggtatggtctggcagaaccgggacgtgtacctgcagggtcccatctgggccaagattcctcacacggacggcaacttccacccgtctccgctgatgggcggctttggcctgaaacatcctccgcctcagatcctgatcaagaacacgcctgtacctgcggatcctccgaccaccttcaaccagtcaaagctgaactctttcatcacgcaatacagcaccggacaggtcagcgtggaaattgaatgggagctgcagaaggaaaacagcaagcgccggaaccccgagatccagtacacctccaactactacaaatctacaagtgtggactttgctgttaatacagaaggcgtgtactctgaaccccgccccattggcacccgttacctcacccgtaatctgtaa

SEQ ID NO: 3942 - DNA, 2217 bp, synthetic construct
  misc_feature 1..2217: note = source = /note="Description of Artificial Sequence: Synthetic polynucleotide"
  source 1..2217: mol_type = other DNA
atggctgccgatggttatcttccagattggctcgaggacaacctctctgagggcattcgcgagtggtgggcgctgaaacctggagccccgaagcccaaagccaaccagcaaaagcaggacgacggccggggtctggtgcttcctggctacaagtacctcggacccttcaacggactcgacaagggggagcccgtcaacgcggcggacgcggcggccctcgagcacgacaaggcctacgaccagcagctgcaggcgggtgacaatccgtacctgcggtataaccacgccgacgccgagtttcaggagcgtctgcaagaagatacgtcttttgggggcaacctcgggcgagcagtcttccaggccaagaagcgggttctcgaacctctcggtctggttgaggaaggcgctaagacggctcctggaaagaagagaccggtagagccatcaccccagcgttctccagactcctctacgggcatcggcaagaagggccaacagcccgccagaaaaagactcaattttggtcagactggcgactcagagccagttccagaccctcaacctctcggagaacctccagcagcgccctctggtgtgggacctaatacaatggctgcaggcggtggcgcaccaatggcagacaataacgaaggcgccgacggagtgggtagttcctcgggaaattggcattgcgattccacatggctgggcgacagagtcatcaccaccagcacccgaacctgggccctgcccacctacaacaaccacctctacaagcaaatctccaacgggacatcgggaggagccaccaacgacaacacctacttcggctacagcaccccctgggggtattttgactttaacagattccactgccacttttcaccacgtgactggcagcgactcatcaacaacaactggggattccggcccaagagactcagcttcaagctcttcaacatccaggtcaaggaggtcacgcagaatgaaggcaccaagaccatcgccaataacctcaccagcaccatccaggtgtttacggactcggagtaccagctgccgtacgttctcggctctgcccaccagggctgcctgcctccgttcccggcggacgtgttcacgattccccagtacggctacctaacactcaacaacggtagtcaggccgtgggacgctcctccttctactgcctggaatactttccttcgcagatgctgagaaccggcaacaacttccagtttacttacaccttcgaggacgtgcctttccacagcagctacgcccacagccagagcttggaccggctgatgaatcctctgattgaccagtacctgtactacttgtctcggattcaaacaacaggaggcacggcaaatacgcagactctgggcttcagccaaggtgggcctaatacaatggccaatcaggcaaagaactggctgccaggaccctgttaccgccaacaacgcgtctcaacgacaaccgggcaaaacaacaatagcaactttgcctggactgctgggaccaaataccatctgaatggaagaaattcattggctaatcctggcatcgctatggcaacacacaaagacgacgaggagcgtttttttcccagtaacgggatcctgatttttggcaaacaaaatgctgccagagacaatgcggattacagcgatgtcatgcccaccagcgaggaagaaatcaaaaccactaaccctgtggccacagaggaatacggtatcgtggcagataacttgcagcagcaaaacacggctcctcaaattggaactgtcaacagccagggggccttacccggtatggtctggcagaaccgggacgtgtacctgcagggtcccatctgggccaagattcctcacacggacggcaacttccacccgtctccgctgatgggcggctttggcctgaaacatcctccgcctcagatcctgatcaagaacacgcctgtacctgcggatcctccgaccaccttcaaccagtcaaagctgaactctttcatcacgcaatacagcaccggacaggtcagcgtggaaattgaatgggagctgcagaaggaaaacagcaagcgctggaaccccgagatccagtacacctccaactactacaaatctacaagtgtggactttgctgttaatacagaaggcgtgtactctgaaccccgccccattggcacccgttacctcacccgtaatctgtaa

SEQ ID NO: 3943 - DNA, 2217 bp, synthetic construct
  misc_feature 1..2217: note = source = /note="Description of Artificial Sequence: Synthetic polynucleotide"
  source 1..2217: mol_type = other DNA
atggctgccgatggttatcttccagattggctcgaggacaacctctctgagggcattcgcgagtggtgggcgctgaaacctggagccccgaagcccaaagccaaccagcaaaagcaggacgacggccggggtctggtgcttcctggctacaagtacctcggacccttcaacggactcgacaagggggagcccgtcaacgcggcggacgcggcggccctcgagcacgacaaggcctacgaccagcagctgcaggcgggtgacaatccgtacctgcggtataaccacgccgacgccgagtttcaggagcgtctgcaagaagatacgtcttttgggggcaacctcgggcgagcagtcttccaggccaagaagcgggttctcgaacctctcggtctggttgaggaaggcgctaagacggctcctggaaagaagagaccggtagagccatcaccccagcgttctccagactcctctacgggcatcggcaagaagggccaacagcccgccagaaaaagactcaattttggtcagactggcgactcagagtcagttccagaccctcaacctctcggagaacctccagcagcgccctctggtgtgggacctaatacaatggctgcaggcggtggcgcaccaatggcagacaataacgaaggcgccgacggagtgggtagttcctcgggaaattggcattgcgattccacatggctgggcgacagagtcatcaccaccagcacccgaacctgggccctgcccacctacaacaaccacctctacaagcaaatctccaacgggacatcgggaggagccaccaacgacaacacctacttcggctacagcaccccctgggggtattttgactttaacagattccactgccacttttcaccacgtgactggcagcgactcatcaacaacaactggggattccggcccaagagactcagcttcaagctcttcaacatccaggtcaaggaggtcacgcagaatgaaggcaccaagaccatcgccaataacctcaccagcaccatccaggtgtttacggactcggagtaccagctgccgtacgttctcggctctgcccaccagggctgcctgcctccgttcccggcggacgtgttcacgattccccagtacggctacctaacactcaacaacggtagtcaggccgtgggacgctcctccttctactgcctggaatactttccttcgcagatgctgagaaccggcaacaacttccagtttacttacaccttcgaggacgtgcctttccacagcagctacgcccacagccagagcttggaccggctgatgaatcctctgattgaccagtacctgtactacttgtctcggattcaaacaacaggaggcacggcaaatacgcagactctgggcttcagccaaggtgggcctaatacaatggccaatcaggcaaagaactggctgccaggaccctgttaccgccaacaacgcgtctcaacgacaaccgggcaaaacaacaatagcaactttgcctggactgctgggaccaaataccatctgaatggaagaaattcattggctaatcctggcatcgctatggcaacacacaaagacgacgaggagcgtttttttcccagtaacgggatcccgatttttggcaaacaaaatgctgccagagacaatgcggattacagcgatgtcatgcccaccagcgaggaagaaatcaaaaccactaaccctgtggccacagaggaatacggtatcgtggcagataacttgcagcagcaaaacacggctcctcaaattggaactgtcaacagccagggggccttacccggtatggtctggcagaaccgggacgtgtacctgcagggtcccatctgggccaagattcctcacacggacggcaacttccacccgtctccgctgatgggcggctttggcctgaaacatcctccgcctcagatcctgatcaagaacacgcctgtacctgcggatcctccgaccaccttcaaccagtcaaagctgaactctttcatcacgcaatacagcaccggacaggtcagcgtggaaattgaatgggagctgcagaaggaaaacagcaagcgctggaaccccgagatccagtacacctccaactactacaaatctacaagtgtggactttgctgttaatacagaaggcgtgtactctgaaccccgccccattggcacccgttacctcacccgtaatctgtaa

SEQ ID NO: 3944 - DNA, 2217 bp, synthetic construct
  misc_feature 1..2217: note = source = /note="Description of Artificial Sequence: Synthetic polynucleotide"
  source 1..2217: mol_type = other DNA
atggctgccgatggttatcttccagattggctcgaggacaacctctctgagggcattcgcgagtggtgggcgctgaaacctggagccccgaagcccaaagccaaccagcaaaagcaggacgacggccggggtctggtgcttcctggctacaagtacctcggacccttcaacggactcgacaagggggagcccgtcaacgcggcggacgcggcggccctcgagcacgacaaggcctacgaccagcagctgcaggcgggtgacaatccgtacctgcggtataaccacgccgacgccgagtttcaggagcgtctgcaagaagatacgtcttttgggggcaacctcgggcgagcagtcttccaggccaagaagcgggttctcgaacctctcggtctggttgaggaaggcgctaagacggctcctggaaagaagagaccggtagagccatcaccccagcgttctccagactcctctacgggcatcggcaagaagggccaacagcccgccagaaaaagactcaattttggtcagactggcgactcagagtcagttccagaccctcaacctctcggagaacctccagcagcgccctctggtgtgggacctaatacaatggctgcaggcggtggcgcaccaatggcagacaataacgaaggcgccgacggagtgggtagttcctcgggaaattggcattgcgattccacatggctgggcgacagagtcatcaccaccagcacccgaacctgggccctgcccacctacaacaaccacctctacaagcaaatctccaacgggacatcgggaggagccaccaacgacaacacctacttcggctacagcaccccctgggggtattttgactttaacagattccactgccacttttcaccacgtgactggcagcgactcatcaacaacaactggggattccggcccaagagactcagcttcaagctcttcaacatccaggtcaaggaggtcacgcagaatgaaggcaccaagaccatcgccaataacctcaccagcaccatccaggtgtttacggactcggagtaccagctgccgtacgttctcggctctgcccaccagggctgcctgcctccgttcccggcggacgtgttcacgattccccagtacggctacctaacactcaacaacggtagtcaggccgtgggacgctcctccttctactgcctggaatactttccttcgcagatgctgagaaccggcaacaacttccagtttacttacaccttcgaggacgtgcctttccacagcagctacgcccacagccagagcttggaccggctgatgaatcctctgattgaccagtacctgtactacttgtctcggattcaaacaacaggaggcacggcaaatacgcagactctgggcttcagccaaggtgggcctaatacaatggccaatcaggcaaagaactggctgccaggaccctgttaccgccaacaacgcgtctcaacgacaaccgggcaaaacaacaatagcaactttgcctggactgctgggaccaaataccatctgaatggaagaaattcattggctaatcctggcatcgctatggcaacacacaaagacgacgaggagcgtttttttcccagtaacgggatcctgatttttggcaaacaaaatgctgccagagacaatgcggattacagcgatgtcatgcccaccagcgaggaagaaatcaaaaccactaaccctgtggccacagaggaatacggtatcgtggcagataacttgcagcagcaaaacacggctcctcaaattggaactgtcaacagccagggggccttacccggtatggtctggcagaaccgggacgtgtacctgcagggtcccatctgggccaagattcctcacacggacggcaacttccacccgtctccgctgatgggcggctttggcctgaaacatcctccgcctcagatcctgatcaagaacacgcctgtacctgcggatcctccgaccaccttcaaccagtcaaagctgaactctttcatcacgcaatacagcaccggacaggtcagcgtggaaattgaatgggagctgcagaaggaaaacagcaagcgctggaaccccgagatccagcacacctccaactactacaaatctacaagtgtggactttgctgttaatacagaaggcgtgtactctgaaccccgccccattggcacccgttacctcacccgtaatctgtaa

SEQ ID NO: 3945 - DNA, 2217 bp, synthetic construct
  misc_feature 1..2217: note = source = /note="Description of Artificial Sequence: Synthetic polynucleotide"
  source 1..2217: mol_type = other DNA
atggctgccgatggttatcttccagattggctcgaggacaacctctctgagggcattcgcgagtggtgggcgctgaaacctggagccccgaagcccaaagccaaccagcaaaagcaggacgacggccggggtctggtgcttcctggctacaagtacctcggacccttcaacggactcgacaagggggagcccgtcaacgcggcggacgcggcggccctcgagcacgacaaggcctacgaccagcagctgcaggcgggtgacaatccgtacctgcggtataaccacgccgacgccgagtttcaggagcgtctgcaagaagatacgtcttttgggggcaacctcgggcgagcagtcttccaggccaagaagcgggttctcgaacctctcggtctggttgaggaaggcgctaagacggctcctggaaagaagagaccggtagagccatcaccccagcgttctccagactcctctacgggcatcggcaagaagggccaacagcccgccagaaaaagactcaattttggtcagactggcgactcagagtcagttccagaccctcaacctctcggagaacctccagcagcgccctctggtgtgggacctaatacaatggctgcaggcggtggcgcaccaatggcagacaataacgaaggcgccgacggagtgggtagttcctcgggaaattggcattgcgattccacatggctgggcgacagagtcatcaccaccagcacccgaacctgggccctgcccacctacaacaaccacctctacaagcaaatctccaacgggacatcgggaggagccaccaacgacaacacctacttcggctacagcaccccctgggggtattttgactttaacagattccactgccacttttcaccacgtgactggcagcgactcatcaacaacaactggggattccggcccaagagactcagcttcaagctcttcaacatccaggtcaaggaggtcacgcagaatgaaggcaccaagaccatcgccaataacctcaccagcaccatccaggtgtttacggactcggagtaccagctgccgtacgttctcggctctgcccaccagggctgcctgcctccgttcccggcggacgtgttcacgattccccagtacggctacctaacactcaacaacggtagtcaggccgtgggacgctcctccttctactgcctggaatactttccttcgcagatgctgagaaccggcaacaacttccagtttacttacaccttcgaggacgtgcctttccacagcagctacgcccacagccagagcttggaccggctgatgaatcctctgattgaccagtacctgtactacttgtctcggattcaaacaacaggaggcacggcaaatacgcagactctgggcttcagccaaggtgggcctaatacaatggccaatcaggcaaagaactggctgccaggaccctgttaccgccaacaacgcgtctcaacgacaaccgggcaaaacaacaatagcaactttgcctggactgctgggaccaaataccatctgaatggaagaaattcattggctaatcctggcatcgctatggcaacacacaaagacgacgaggagcgtttttttcccagtaacgggatcctgatttttggcaaacaaaatgctgccagagacaatgcggattacagcgatgtcatgcccaccagcgaggaagaaatcaaaaccactaaccctgtggccacagaggaatacggtatcgtggcagataacttgcagcagcaaaacacggctcctcaaattggaactgtcaacagccagggggccttacccggtatggtctggcagaaccgggacgtgtacctgcagggtcccatctgggccaagattcctcacacggacggcaacttccacccgtctccgctgatgggcggctttggcctgaaacatcctccgcctcagatcctgatcaagaacacgcctgtacctgcggatcctccgaccaccttcaaccagtcaaagctgaaccctttcatcacgcaatacagcaccggacaggtcagcgtggaaattgaatgggagctgcagaaggaaaacagcaagcgctggaaccccgagatccagtacacctccaactactacaaatctacaagtgtggactttgctgttaatacagaaggcgtgtactctgaaccccgccccattggcacccgttacctcacccgtaatctgtaa

SEQ ID NO: 3946 - DNA, 2217 bp, synthetic construct
  misc_feature 1..2217: note = source = /note="Description of Artificial Sequence: Synthetic polynucleotide"
  source 1..2217: mol_type = other DNA
atggctgccgatggttatcttccagattggctcgaggacaacctctctgagggcattcgcgagtggtgggcgctgaaacctggagccccgaagcccaaagccaaccagcaaaagcaggacgacggccggggtctggtgcttcctggctacaagtacctcggacccttcaacggactcgacaagggggagcccgtcaacgcggcggacgcggcggccctcgagcacgacaaggcctacgaccagcagctgcaggcgggtgacaatccgtacctgcggtataaccacgccgacgccgagtttcaggagcgtctgcaagaagatacgtcttttgggggcaacctcgggcgagcagtcttccaggccaagaagcgggttctcgaacctctcggtctggttgaggaaggcgctaagacggctcctggaaagaagagaccggtagagccatcaccccagcgttctccagactcctctacgggcatcggcaagaagggccaacagcccgccagaaaaagactcaattttggtcagactggcgactcagagtcagttccagaccctcaacctctcggagaacctccagcagcgccctctggtgtgggacctaatacaatggctgcaggcggtggcgcaccaatggcagacaataacgaaggcgccgacggagtgggtagttcctcgggaaattggcattgcgattccacatggctgggcgacagagtcatcaccaccagcacccgaacctgggccctgcccacctacaacaaccacctctacaagcaaatctccaacgggacatcgggaggagccaccaacgacaacacctacttcggctacagcaccccctgggggtattttgactttaacagattccactgccacttttcaccacgtgactggcagcgactcatcaacaacaactggggattccggcccaagagactcagcttcaagctcttcaacatccaggtcaaggaggtcacgcagaatgaaggcaccaagaccatcgccaataacctcaccagcaccatccaggtgtttacggactcggagtaccagctgccgtacgttctcggctctgcccaccagggctgcctgcctccgttcccggcggacgtgttcacgattccccagtacggctacctaacactcaacaacggtagtcaggccgtgggacgctcctccttctactgcctggaatactttccttcgcagatgctgagaaccggcaacaacttccagtttacttacaccttcgaggacgtgcctttccacagcagctacgcccacagccagagcttggaccggctgatgaatcctctgattgaccagtacctgtactacttgtctcggattcaaacaacaggaggcacggcaaatacgcagactctgggcttcagccaaggtgggcctaatacaatggccaatcaggcaaagaactggctgccaggaccctgttaccgccaacaacgcgtctcaacgacaaccgggcaaaacaacaatagcaactttgcctggactgctgggaccaaataccatctgaatggaagaaattcattggctaatcctggcatcgctatggcaacacacaaagacgacgaggagcgtttttttcccagtaacgggatcctgatttttggcaaacaaaatgctgccagagacaatgcggattacagcgatgtcatgcccaccagcgaggaagaaatcaaaaccactaaccctgtggccacagaggaatacggtatcgtggcagataacttgcagcagcaaaacacggctcctcaaattggaactgtcaacagccagggggccttacccggtatggtctggcagaaccgggacgtgtacctgcagggtcccatctgggccaagattcctcacacggacggcaacttccgcccgtctccgctgatgggcggctttggcctgaaacatcctccgcctcagatcctgatcaagaacacgcctgtacctgcggatcctccgaccaccttcaaccagtcaaagctgaactctttcatcacgcaatacagcaccggacaggtcagcgtggaaattgaatgggagctgcagaaggaaaacagcaagcgctggaaccccgagatccagtacacctccaactactacaaatctacaagtgtggactttgctgttaatacagaaggcgtgtactctgaaccccgccccattggcacccgttacctcacccgtaatctgtaa

SEQ ID NO: 3947 - DNA, 2217 bp, synthetic construct
  misc_feature 1..2217: note = source = /note="Description of Artificial Sequence: Synthetic polynucleotide"
  source 1..2217: mol_type = other DNA
atggctgccgatggttatcttccagattggctcgaggacaacctctctgagggcattcgcgagtggtgggcgctgaaacctggagccccgaagcccaaagccaaccagcaaaagcaggacgacggccggggtctggtgcttcctggctacaagtacctcggacccttcaacggactcgacaagggggagcccgtcaacgcggcggacgcggcggccctcgagcacgacaaggcctacgaccagcagctgcaggcgggtgacaatccgtacctgcggtataaccacgccgacgccgagtttcaggagcgtctgcaagaagatacgtcttttgggggcaacctcgggcgagcagtcttccaggccaagaagcgggttctcgaacctctcggtctggttgaggaaggcgctaagacggctcctggaaagaagagaccggtagagccatcaccccagcgttctccagactcctctacgggcatcggcaagaagggccaacagcccgccagaaaaagactcaattttggtcagactggcgactcagagtcagttccagaccctcaacctctcggagaacctccagcagcgccctctggtgtgggacctaatacaatggctgcaggcggtggcgcaccaatggcagacaataacgaaggcgccgacggagtgggtagttcctcgggaaattggcattgcgattccacatggctgggcgacagagtcatcaccaccagcacccgaacctgggccctgcccacctacaacaaccacctctacaagcaaatctccaacgggacatcgggaggagccaccaacgacaacacctacttcggctacagcaccccctgggggtattttgactttaacagattccactgccacttttcaccacgtgactggcagcgactcatcaacaacaactggggattccggcccaagagactcagcttcaagctcttcaacatccaggtcaaggaggtcacgcagaatgaaggcaccaagaccatcgccaataacctcaccagcaccatccaggtgtttacggactcggagtaccagctgccgtacgttctcggctctgcccaccagggctgcctgcctccgttcccggcggacgtgttcacgattccccagtacggctacctaacactcaacaacggtagtcaggccgtgggacgctcctccttctactgcctggaatactttccttcgcagatgctgagaaccggcaacaacttccagtttacttacaccttcgaggacgtgcctttccacagcagctacgcccacagccagagcttggaccggctgatgaatcctctgattgaccagtacctgtactacttgtctcggattcaaacaacaggaggcacggcaaatacgcagactctgggcttcagccaaggtgggcctaatacaatggccaatcaggcaaagaactggctgccaggaccctgttaccgccaacaacgcgtctcaacgacaaccgggcaaaacaacaatagcaactttgcctggactgctgggaccaaataccatctgaatggaagaaattcattggctaatcctggcatcgctatggcaacacacaaagacgacgaggagcgtttttttcccagtaacgggatcctgatttttggcaaacaaaatgctgccagagacaatgcggattacagcgatgtcatgcccaccagcgaggaagaaatcaaaaccactaaccctgtggccacagaggaatacggtatcgtggcagataacttgcagcagcaaaacacggctcctcaaattggaactgtcaacagccagggggccttacccggtatggtctggcagaaccgggacgtgtacctgcagggtcccatctgggccaagattcctcacacggacggcaacttccacccgtctccgctgatgggcggctttggcctgaaacatcctccgcctcagatcctgatcaagaacacgcctgtacctgcggatcctccgaccaccttcaaccagtcaaagctgaactctttcatcacgcaatacagcaccggacaggtcagcgtggaaattgaatgggagctgcagaaggaaaacagcaagcgctggaaccccgagatccagtacacctccaactactacaaatctacaagtgtggactttgctgttaatacagaaggcgtgtactctgaaccccgccccattggcgcccgttacctcacccgtaatctgtaa

SEQ ID NO: 3948 - DNA, 2217 bp, synthetic construct
  misc_feature 1..2217: note = source = /note="Description of Artificial Sequence: Synthetic polynucleotide"
  source 1..2217: mol_type = other DNA
atggctgccgatggttatcttccagattggctcgaggacaacctctctgagggcattcgcgagtggtgggcgctgaaacctggagccccgaagcccaaagccaaccagcaaaagcaggacgacggccggggtctggtgcttcctggctacaagtacctcggacccttcaacggactcgacaagggggagtccgtcaacgcggcggacgcggcggccctcgagcacgacaaggcctacgaccagcagctgcaggcgggtgacaatccgtacctgcggtataaccacgccgacgccgagtttcaggagcgtctgcaagaagatacgtcttttgggggcaacctcgggcgagcagtcttccaggccaagaagcgggttctcgaacctctcggtctggttgaggaaggcgctaagacggctcctggaaagaagagaccggtagagccatcaccccagcgttctccagactcctctacgggcatcggcaagaagggccaacagcccgccagaaaaagactcaattttggtcagactggcgactcagagtcagttccagaccctcaacctctcggagaacctccagcagcgccctctggtgtgggacctaatacaatggctgcaggcggtggcgcaccaatggcagacaataacgaaggcgccgacggagtgggtagttcctcgggaaattggcattgcgattccacatggctgggcgacagagtcatcaccaccagcacccgaacctgggccctgcccacctacaacaaccacctctacaagcaaatctccaacgggacatcgggaggagccaccaacgacaacacctacttcggctacagcaccccctgggggtattttgactttaacagattccactgccacttttcaccacgtgactggcagcgactcatcaacaacaactggggattccggcccaagagactcagcttcaagctcttcaacatccaggtcaaggaggtcacgcagaatgaaggcaccaagaccatcgccaataacctcaccagcaccatccaggtgtttacggactcggagtaccagctgccgtacgttctcggctctgcccaccagggctgcctgcctccgttcccggcggacgtgttcacgattccccagtacggctacctaacactcaacaacggtagtcaggccgtgggacgctcctccttctactgcctggaatactttccttcgcagatgctgagaaccggcaacaacttccagtttacttacaccttcgaggacgtgcctttccacagcagctacgcccacagccagagcttggaccggctgatgaatcctctgattgaccagtacctgtactacttgtctcggattcaaacaacaggaggcacggcaaatacgcagactctgggcttcagccaaggtgggcctaatacaatggccaatcaggcaaagaactggctgccaggaccctgttaccgccaacaacgcgtctcaacgacaaccgggcaaaacaacaatagcaactttgcctggactgctgggaccaaataccatctgaatggaagaaattcattggctaatcctggcatcgctatggcaacacacaaagacgacgaggagcgtttttttcccagtaacgggatcctgatttttggcaaacaaaatgctgccagagacaatgcggattacagcgatgtcatgcccaccagcgaggaagaaatcaaaaccactaaccctgtggccacagaggaatacggtatcgtggcagataacttgcagcagcaaaacacggctcctcaaattggaactgtcaacagccagggggccttacccggtatggtctggcagaaccgggacgtgtacctgcagggtcccatctgggccaagattcctcacacggacggcaacttccacccgtctccgctgatgggcggctttggcctgaaacatcctccgcctcagatcctgatcaagaacacgcctgtacctgcggatcctccgaccaccttcaaccagtcaaagctgaactctttcatcacgcaatacagcaccggacaggtcagcgtggaaattgaatgggagctgcagaaggaaaacagcaagcgctggaaccccgagatccagtacacctccaactactacaaatctacaagtgtggactttgctgttaatacagaaggcgtgtactctgaaccccgccccattggcacccgttacctcacccgtaatctgtaa

SEQ ID NO: 3949 - DNA, 2217 bp, synthetic construct
  misc_feature 1..2217: note = source = /note="Description of Artificial Sequence: Synthetic polynucleotide"
  source 1..2217: mol_type = other DNA
atggctgccgatggttatcttccagattggctcgaggacaacctctctgagggcattcgcgagtggtgggcgctgaaacctggagccccgaagcccaaagccaaccagcaaaagcaggacgacggccggggtctggtgcttcctggctacaagtacctcggacccttcaacggactcgacaagggggagcccgtcaacgcggcggacgcggcggccctcgagcacgacaaggcctacgaccagcagctgcaggcgggtgacaatccgtacctgcggtataaccacgccgacgccgagtttcaggagcgtctgcaagaagatacgtcttttgggggcaacctcgggcgagcagtcttccaggccaagaagcgggttctcgaacctctcggtctggttgaggaaggcgctaagacggctcctggaaagaagagaccggtagagccatcaccccagcgttctccagactcctctacgggcatcggcaagaagggccaacagcccgccagaaaaagactcaattttggtcagactggcgactcagagtcagttccagaccctcaacctctcggagaacctccagcagcgccctctggtgtgggacctaatacaatggctgcaggcggtggcgcaccaatggcagacaatagcgaaggcgccgacggagtgggtagttcctcgggaaattggcattgcgattccacatggctgggcgacagagtcatcaccaccagcacccgaacctgggccctgcccacctacaacaaccacctctacaagcaaatctccaacgggacatcgggaggagccaccaacgacaacacctacttcggctacagcaccccctgggggtattttgactttaacagattccactgccacttttcaccacgtgactggcagcgactcatcaacaacaactggggattccggcccaagagactcagcttcaagctcttcaacatccaggtcaaggaggtcacgcagaatgaaggcaccaagaccatcgccaataacctcaccagcaccatccaggtgtttacggactcggagtaccagctgccgtacgttctcggctctgcccaccagggctgcctgcctccgttcccggcggacgtgttcacgattccccagtacggctacctaacactcaacaacggtagtcaggccgtgggacgctcctccttctactgcctggaatactttccttcgcagatgctgagaaccggcaacaacttccagtttacttacaccttcgaggacgtgcctttccacagcagctacgcccacagccagagcttggaccggctgatgaatcctctgattgaccagtacctgtactacttgtctcggattcaaacaacaggaggcacggcaaatacgcagactctgggcttcagccaaggtgggcctaatacaatggccaatcaggcaaagaactggctgccaggaccctgttaccgccaacaacgcgtctcaacgacaaccgggcaaaacaacaatagcaactttgcctggactgctgggaccaaataccatctgaatggaagaaattcattggctaatcctggcatcgctatggcaacacacaaagacgacgaggagcgtttttttcccagtaacgggatcctgatttttggcaaacaaaatgctgccagagacaatgcggattacagcgatgtcatgcccaccagcgaggaagaaatcaaaaccactaaccctgtggccacagaggaatacggtatcgtggcagataacttgcagcagcaaaacacggctcctcaaattggaactgtcaacagccagggggccttacccggtatggtctggcagaaccgggacgtgtacctgcagggtcccatctgggccaagattcctcacacggacggcaacttccacccgtctccgctgatgggcggctttggcctgaaacatcctccgcctcagatcctgatcaagaacacgcctgtacctgcggatcctccgaccaccttcaaccagtcaaagctgaactctttcatcacgcaatacagcaccggacaggtcagcgtggaaattgaatgggagctgcagaaggaaaacagcaagcgctggaaccccgagatccagtacacctccaactactacaaatctacaagtgtggactttgctgttaatacagaaggcgtgtactctgaaccccgccccattggcacccgttacctcacccgtaatctgtaa

SEQ ID NO: 3950 - DNA, 2217 bp, synthetic construct
  misc_feature 1..2217: note = source = /note="Description of Artificial Sequence: Synthetic polynucleotide"
  source 1..2217: mol_type = other DNA
atggctgccgatggttatcttccagattggctcgaggacaacctctctgagggcattcgcgagtggtgggcgctgaaacctggagccccgaagcccaaagccaaccagcaaaagcaggacgacggccggggtctggtgcttcctggctacaagtacctcggacccttcaacggactcgacaagggggagcccgtcaacgcggcggacgcggcggccctcgagcacgacaaggcctacgaccagcagctgcaggcgggtgacaatccgtacctgcggtataaccacgccgacgccgagtttcaggagcgtctgcaagaagatacgtcttttgggggcaacctcgggcgagcagtcttccaggccaagaagcgggttctcgaacctctcggtctggttgaggaaggcgctaagacggctcctggaaagaagagaccggtagagccatcaccccagcgttctccagactcctctacgggcatcggcaagaagggccaacagcccgccagaaaaagactcaattttggtcagactggcgactcagagtcagttccagaccctcaacctctcggagaacctccagcagcgccctctggtgtgggacctaatacaatggctgcaggcggtggcgcaccaatggcagacaataacgaaggcgccgacggagtgggtagttcctcgggaaattggcattgcgattccacatggctgggcgacagagtcatcaccaccagcacccgaacctgggccctgcccacctacaacaaccacctctacaagcaaatctccaacgggacatcgggaggagccaccaacgacaacacctacttcggctacagcaccccctgggggtattttgactttaacagattccactgccacttttcaccacgtgactggcagcgactcatcaacaacaactggggattccggcccaagagactcagcttcaagctcttcaacatccaggtcaaggaggtcacgcagaatgaaggcaccaagaccatcgccaataacctcaccagcaccatccaggtgtttacggactcggagtaccagctgccgtacgttctcggctctgcccaccagggctgcctgcctccgttcccggcggacgtgttcacgattccccagtacggctacctaacactcaacaacggtagtcaggccgtgggacgctcctccttctactgcctggaatactttccttcgcagatgctgagaaccggcaacaacttccagtttacttacaccttcgaggacgtgcctttccacagcagctacgcccacagccagagcttggaccggctgatgaatcctctgattgaccagtacctgtactacttgtctcggattcaaacaacaggaggcacggcaaatacgcagactctgggcttcagccaaggtgggcctaatacaatggccaatcaggcaaagaactggctgccaggaccctgttaccgccaacaacgcgtctcaacgacaaccgggcaaaacaacaatagcaactttgcctggactgctgggaccaaataccatctgaatggaagaaattcattggctaatcctggcatcgctatggcaacacacaaagacgacgaggagcgtttttttcccagtaacgggatcctgatttttggcaaacaaaatgctgccagagacaatgcggattacggcgatgtcatgcccaccagcgaggaagaaatcaaaaccactaaccctgtggccacagaggaatacggtatcgtggcagataacttgcagcagcaaaacacggctcctcaaattggaactgtcaacagccagggggccttacccggtatggtctggcagaaccgggacgtgtacctgcagggtcccatctgggccaagattcctcacacggacggcaacttccacccgtctccgctgatgggcggctttggcctgaaacatcctccgcctcagatcctgatcaagaacacgcctgtacctgcggatcctccgaccaccttcaaccagtcaaagctgaactctttcatcacgcaatacagcaccggacaggtcagcgtggaaattgaatgggagctgcagaaggaaaacagcaagcgctggaaccccgagatccagtacacctccaactactacaaatctacaagtgtggactttgctgttaatacagaaggcgtgtactctgaaccccgccccattggcacccgttacctcacccgtaatctgtaa

SEQ ID NO: 3951 - DNA, 2217 bp, synthetic construct
  misc_feature 1..2217: note = source = /note="Description of Artificial Sequence: Synthetic polynucleotide"
  source 1..2217: mol_type = other DNA
atggctgccgatggttatcttccagattggctcgaggacaacctctctgagggcattcgcgagtggtgggcgctgaaacctggagccccgaagcccaaagccaaccagcaaaagcaggacgacggccggggtctggtgcttcctggctacaagtacctcggacccttcaacggactcgacaagggggagcccgtcaacgcggcggacgcggcggccctcgagcacgacaaggcctacgaccagcagctgcaggcgggtgacaatccgtacctgcggtataaccacgccgacgccgagtttcaggagcgtctgcaagaagatacgtcttttgggggcaacctcgggcgagcagtcttccaggccaagaagcgggttctcgaacctctcggtctggttgaggaaggcgctaagacggctcctggaaagaggagaccggtagagccatcaccccagcgttctccagactcctctacgggcatcggcaagaagggccaacagcccgccagaaaaagactcaattttggtcagactggcgactcagagtcagttccagaccctcaacctctcggagaacctccagcagcgccctctggtgtgggacctaatacaatggctgcaggcggtggcgcaccaatggcagacaataacgaaggcgccgacggagtgggtagttcctcgggaaattggcattgcgattccacatggctgggcgacagagtcatcaccaccagcacccgaacctgggccctgcccacctacaacaaccacctctacaagcaaatctccaacgggacatcgggaggagccaccaacgacaacacctacttcggctacagcaccccctgggggtattttgactttaacagattccactgccacttttcaccacgtgactggcagcgactcatcaacaacaactggggattccggcccaagagactcagcttcaagctcttcaacatccaggtcaaggaggtcacgcagaatgaaggcaccaagaccatcgccaataacctcaccagcaccatccaggtgtttacggactcggagtaccagctgccgtacgttctcggctctgcccaccagggctgcctgcctccgttcccggcggacgtgttcacgattccccagtacggctacctaacactcaacaacggtagtcaggccgtgggacgctcctccttctactgcctggaatactttccttcgcagatgctgagaaccggcaacaacttccagtttacttacaccttcgaggacgtgcctttccacagcagctacgcccacagccagagcttggaccggctgatgaatcctctgattgaccagtacctgtactacttgtctcggattcaaacaacaggaggcacggcaaatacgcagactctgggcttcagccaaggtgggcctaatacaatggccaatcaggcaaagaactggctgccaggaccctgttaccgccaacaacgcgtctcaacgacaaccgggcaaaacaacaatagcaactttgcctggactgctgggaccaaataccatctgaatggaagaaattcattggctaatcctggcatcgctatggcaacacacaaagacgacgaggagcgtttttttcccagtaacgggatcctgatttttggcaaacaaaatgctgccagagacaatgcggattacagcgatgtcatgcccaccagcgaggaagaaatcaaaaccactaaccctgtggccacagaggaatacggtatcgtggcagataacttgcagcagcaaaacacggctcctcaaattggaactgtcaacagccagggggccttacccggtatggtctggcagaaccgggacgtgtacctgcagggtcccatctgggccaagattcctcacacggacggcaacttccacccgtctccgctgatgggcggctttggcctgaaacatcctccgcctcagatcctgatcaagaacacgcctgtacctgcggatcctccgaccaccttcaaccagtcaaagctgaactctttcatcacgcaatacagcaccggacaggtcagcgtggaaattgaatgggagctgcagaaggaaaacagcaagcgctggaaccccgagatccagtacacctccaactactacaaatctacaagtgtggactttgctgttaatacagaaggcgtgtactctgaaccccgccccattggcacccgttacctcacccgtaatctgtaa

SEQ ID NO: 3952 - DNA, 2217 bp, synthetic construct
  misc_feature 1..2217: note = source = /note="Description of Artificial Sequence: Synthetic polynucleotide"
  source 1..2217: mol_type = other DNA
atggctgccgatggttatcttccagattggctcgaggacaacctctctgagggcattcgcgagtggtgggcgctgaaacctggagccccgaagcccaaagccaaccagcaaaagcaggacgacggccggggtctggtgcttcctggctacaagtacctcggacccttcaacggactcgacaagggggagcccgtcaacgcggcggacgcggcggccctcgagcacgacaaggcctacgaccagcagctgcaggcgggtgacaatccgtacctgcggtataaccacgccgacgccgagtttcaggagcgtctgcaagaagatacgtcttttgggggcaacctcgggcgagcagtcttccaggccaagaagcgggttctcgaacctctcggtctggttgaggaaggcgctaagacggctcctggaaagaagagaccggtagagccatcaccccagcgttctccagactcctctacgggcatcggcaagaagggccaacagcccgccagaaaaagactcaattttggtcagactggcgactcagagtcagttccagaccctcaacctctcggagaacctccagcagcgccctctggtgtgggacctaatacaatggctgcaggcggtggcgcaccaatggcagacaataacgaaggcgccgacggagtgggtagttcctcgggaaattggcattgcgattccacatggctgggcgacagagtcatcaccaccagcacccgaacctgggccctgcccacctacaacaaccacctctacaagcaaatctccaacgggacatcgggaggagccaccaacgacaacacctacttcggctacagcaccccctgggggtattttgactttaacagattccactgccacttttcaccacgtgactggcagcgactcatcaacaacaactggggattccggcccaagagactcagcttcaagctcttcaacatccaggtcaaggaggtcacgcagaatgaaggcaccaagaccatcgccaataacctcaccagcaccatccaggtgtttacggactcggagtaccagctgccgtacgttctcggctctgcccaccagggctgcctgcctccgttcccggcggacgtgttcacgattccccagtacggctacctaacactcaacaacggtagtcaggccgtgggacgctcctccttctactgcctggaatactttccttcgcagatgctgagaaccggcaacaacttccagtttacttacaccttcgaggacgtgcctttccacagcagctacgcccacagccagagcttggaccggctgatgaatcctctgattgaccagtacctgtactacttgtctcggattcaaacaacaggaggcacggcaaatacgcagactctgggcttcagccaaggtgggcctaatacaatggccaatcaggcaaagaactggctgccaggaccctgttaccgccaacaacgcgtcccaacgacaaccgggcaaaacaacaatagcaactttgcctggactgctgggaccaaataccatctgaatggaagaaattcattggctaatcctggcatcgctatggcaacacacaaagacgacgaggagcgtttttttcccagtaacgggatcctgatttttggcaaacaaaatgctgccagagacaatgcggattacagcgatgtcatgcccaccagcgaggaagaaatcaaaaccactaaccctgtggccacagaggaatacggtatcgtggcagataacttgcagcagcaaaacacggctcctcaaattggaactgtcaacagccagggggccttacccggtatggtctggcagaaccgggacgtgtacctgcagggtcccatctgggccaagattcctcacacggacggcaacttccacccgtctccgctgatgggcggctttggcctgaaacatcctccgcctcagatcctgatcaagaacacgcctgtacctgcggatcctccgaccaccttcaaccagtcaaagctgaactctttcatcacgcaatacagcaccggacaggtcagcgtggaaattgaatgggagctgcagaaggaaaacagcaagcgctggaaccccgagatccagtacacctccaactactacaaatctacaagtgtggactttgctgttaatacagaaggcgtgtactctgaaccccgccccattggcacccgttacctcacccgtaatctgtaa

SEQ ID NO: 3953 - DNA, 2217 bp, synthetic construct
  misc_feature 1..2217: note = source = /note="Description of Artificial Sequence: Synthetic polynucleotide"
  source 1..2217: mol_type = other DNA
atggctgccgatggttatcttccagattggctcgaggacaacctctctgagggcattcgcgagtggtgggcgctgaaacctggagccccgaagcccaaagccaaccagcaaaagcaggacgacggccggggtctggtgcttcctggctacaagtacctcggacccttcaacggactcgacaagggggagcccgtcaacgcggcggacgcggcggccctcgagcacgacaaggcctacgaccagcagctgcaggcgggtgacaatccgtacctgcggtataaccacgccgacgccgagtttcaggagcgtctgcaagaagatacgtcttttgggggcaacctcgggcgagcagtcttccaggccaagaagcgggttctcgaacctctcggtctggttgaggaaggcgctaagacggctcctggaaagaagagaccggtagagccatcaccccagcgttctccagactcctctacgggcatcggcaagaagggccaacagcccgccagaaaaagactcaattttggtcagactggcgactcagagtcagttccagaccctcaacctctcggagaacctccagcagcgccctctggtgtgggacctaatacaatggctgcaggcggtggcgcaccaatggcagacaataacgaaggcgccgacggagtgggtagttcctcgggaaattggcattgcgattccacatggctgggcgacagagtcatcaccaccagcacccgaacctgggccctgcccacctacaacaaccacctctacaagcaaatctccaacgggacatcgggaggagccaccaacgacaacacctacttcggctacagcaccccctgggggtattttgactttaacagattccactgccacttttcaccacgtgactggcagcgactcatcaacaacaactggggattccggcccaagagactcagcttcaagctcttcaacatccaggtcaaggaggtcacgcagaatgaaggcaccaagaccatcgccaataacctcaccagcaccatccaggtgtttacggactcggagtaccagctgccgtacgttctcggctctgcccaccagggctgcctgcctccgttcccggcggacgtgttcacgattccccagtacggctacctaacactcaacaacggtagtcaggccgtgggacgctcctccttctactgcctggaatactttccttcgcagatgctgagaaccggcaacaacttccagtttacttacaccttcgaggacgtgcctttccacagcagctacgcccacagccagagcttggaccggctgatgaatcctctgattgaccagtacctgtactacttgtctcggattcaaacaacaggaggcacggcaaatacgcagactctgggcttcagccaaggtgggcctaatacaatggccaatcaggcaaagaactggctgccaggaccctgttaccgccaacaacgcgtctcaacgacaaccgggcaaaacaacaatagcaactttgcctggactgctgggaccaaataccatctgaatggaagaaattcattggctaatcctggcatcgctatggcaacacacaaagacgacgaggagcgtttttttcccagtaacgggatcctgatttttggcaaacaaaatgctgccagagacaatgcggattacagcgatgtcatgcccaccagcgaggaagaaatcaaaaccactaaccctgtggccacagaggaatacggtatcgtggcagataacttgcagcagcaaaacacggctcctcaaattggaactgtcaacagccagggggccttacccggtatggtctggcagaaccgggacgtgtacctgcagggtcccatctgggccaagattcctcacacggacggcaacttccacccgtctccgctgatgggcggctttggcctgaaacatcctccgcctcagatcctgatcaagaacacgcctgtacctgcggatcctccgaccaccttcaaccagtcaaagctgaactctttcatcacgcaatacagcaccggacaggtcagcgtggaaattgaatgggagctgcagaaggaaaacagcaagcgctggaaccccgagatccagtacacctccaactactacaaatctacaagtgtggactttgctgttaatacagaaggcgtgtactctgaaccccgccccattggcacccgttacctcacccgtaatctgtaa

SEQ ID NO: 3954 - DNA, 2217 bp, synthetic construct
  misc_feature 1..2217: note = source = /note="Description of Artificial Sequence: Synthetic polynucleotide"
  source 1..2217: mol_type = other DNA
atggctgccgatggttatcttccagattggctcgaggacaacctctctgagggcattcgcgagtggtgggcgctgaaacctggagccccgaagcccaaagccaaccagcaaaagcaggacgacggccggggtctggtgcttcctggctacaagtacctcggacccttcaacggactcgacaagggggagcccgtcaacgcggcggacgcggcggccctcgagcacgacaaggcctacgaccagcagctgcaggcgggtgacaatccgtacctgcggtataaccacgccgacgccgagtttcaggagcgtctgcaagaagatacgtcttttgggggcaacctcgggcgagcagtcttccaggccaagaagcgggttctcgaacctctcggtctggttgaggaaggcgctaagacggctcctggaaagaagagaccggtagagccatcaccccagcgttctccagactcctctacgggcatcggcaagaagggccaacagcccgccagaaaaagactcaattttggtcagactggcgactcagagtcagttccagaccctcaacctctcggagaacctccagcagcgccctctggtgtgggacctaatacaatggctgcaggcggtggcgcaccaatggcagacaataacgaaggcgccgacggagtgggtagttcctcgggaaattggcattgcgattccacatggctgggcgacagagtcatcaccaccagcacccgaacctgggccctgcccacctacaacaaccacctctacaagcaaatctccaacgggacatcgggaggagccaccaacgacaacacctacttcggctacagcaccccctgggggtattttgactttaacagattccaccgccacttttcaccacgtgactggcagcgactcatcaacaacaactggggattccggcccaagagactcagcttcaagctcttcaacatccaggtcaaggaggtcacgcagaatgaaggcaccaagaccatcgccaataacctcaccagcaccatccaggtgtttacggactcggagtaccagctgccgtacgttctcggctctgcccaccagggctgcctgcctccgttcccggcggacgtgttcacgattccccagtacggctacctaacactcaacaacggtagtcaggccgtgggacgctcctccttctactgcctggaatactttccttcgcagatgctgagaaccggcaacaacttccagtttacttacaccttcgaggacgtgcctttccacagcagctacgcccacagccagagcttggaccggctgatgaatcctctgattgaccagtacctgtactacttgtctcggattcaaacaacaggaggcacggcaaatacgcagactctgggcttcagccaaggtgggcctaatacaatggccaatcaggcaaagaactggctgccaggaccctgttaccgccaacaacgcgtctcaacgacaaccgggcaaaacaacaatagcaactttgcctggactgctgggaccaaataccatctgaatggaagaaattcattggctaatcctggcatcgctatggcaacacacaaagacgacgaggagcgtttttttcccagtaacgggatcctgatttttggcaaacaaaatgctgccagagacaatgcggattacagcgatgtcatgcccaccagcgaggaagaaatcaaaaccactaaccctgtggccacagaggaatacggtatcgtggcagataacttgcagcagcaaaacacggctcctcaaattggaactgtcaacagccagggggccttacccggtatggtctggcagaaccgggacgtgtacctgcagggtcccatctgggccaagattcctcacacggacggcaacttccacccgtctccgctgatgggcggctttggcctgaaacatcctccgcctcagatcctgatcaagaacacgcctgtacctgcggatcctccgaccaccttcaaccagtcaaagctgaactctttcatcacgcaatacagcaccggacaggtcagcgtggaaattgaatgggagctgcagaaggaaaacagcaagcgctggaaccccgagatccagtacacctccaactactacaaatctacaagtgtggactttgctgttaatacagaaggcgtgtactctgaaccccgccccattggcacccgttacctcacccgtaatctgtaa

SEQ ID NO: 3955 - DNA, 2217 bp, synthetic construct
  misc_feature 1..2217: note = source = /note="Description of Artificial Sequence: Synthetic polynucleotide"
  source 1..2217: mol_type = other DNA
atggctgccgatggttatcttccagattggctcgaggacaacctctctgagggcattcgcgagtggtgggcgctgaaacctggagccccgaagcccaaagccaaccagcaaaagcaggacgacggccggggtctggtgcttcctggctacaagtacctcggacccttcaacggactcgacaagggggagcccgtcaacgcggcggacgcggcggccctcgagcacgacaaggcctacgaccagcagctgcaggcgggtgacaatccgtacctgcggtataaccacgccgacgccgagtttcaggagcgtctgcaagaagatacgtcttttgggggcaacctcgggcgagcagtcttccaggccaagaagcgggttctcgaacctctcggtctggttgaggaaggcgctaagacggctcctggaaagaagagaccggtagagccatcaccccagcgttctccagactcctctacgggcatcggcaagaagggccaacagcccgccagaaaaagactcaattttggtcagactggcgactcagagtcagttccagaccctcaacctctcggagaacctccagcagcgccctctggtgtgggacctaatacaatggctgcaggcggtggcgcaccaatggcagacaataacgaaggcgccgacggagtgggtagttcctcgggaaattggcattgcgattccacatggctgggcgacagagtcatcaccaccagcacccgaacctgggccctgcccacctacaacaaccacctctacaagcaaatctccaacgggacatcgggaggagccaccaacgacaacacctacttcggctacagcaccccctgggggtattttgactttaacagattccactgccacttttcaccacgtgactggcagcgactcatcaacaacaactggggattccggcccaagagactcagcttcaagctcttcaacatccaggtcaaggaggtcacgcagaatgaaggcaccaagaccatcgccaataacctcaccagcaccatccaggtgtttacggactcggagtgccagctgccgtacgttctcggctctgcccaccagggctgcctgcctccgttcccggcggacgtgttcacgattccccagtacggctacctaacactcaacaacggtagtcaggccgtgggacgctcctccttctactgcctggaatactttccttcgcagatgctgagaaccggcaacaacttccagtttacttacaccttcgaggacgtgcctttccacagcagctacgcccacagccagagcttggaccggctgatgaatcctctgattgaccagtacctgtactacttgtctcggattcaaacaacaggaggcacggcaaatacgcagactctgggcttcagccaaggtgggcctaatacaatggccaatcaggcaaagaactggctgccaggaccctgttaccgccaacaacgcgtctcaacgacaaccgggcaaaacaacaatagcaactttgcctggactgctgggaccaaataccatctgaatggaagaaattcattggctaatcctggcatcgctatggcaacacacaaagacgacgaggagcgtttttttcccagtaacgggatcctgatttttggcaaacaaaatgctgccagagacaatgcggattacagcgatgtcatgcccaccagcgaggaagaaatcaaaaccactaaccctgtggccacagaggaatacggtatcgtggcagataacttgcagcagcaaaacacggctcctcaaattggaactgtcaacagccagggggccttacccggtatggtctggcagaaccgggacgtgtacctgcagggtcccatctgggccaagattcctcacacggacggcaacttccacccgtctccgctgatgggcggctttggcctgaaacatcctccgcctcagatcctgatcaagaacacgcctgtacctgcggatcctccgaccaccttcaaccagtcaaagctgaactctttcatcacgcaatacagcaccggacaggtcagcgtggaaattgaatgggagctgcagaaggaaaacagcaagcgctggaaccccgagatccagtacacctccaactactacaaatctacaagtgtggactttgctgttaatacagaaggcgtgtactctgaaccccgccccattggcacccgttacctcacccgtaatctgtaa

SEQ ID NO: 3956 - DNA, 2217 bp, synthetic construct
  misc_feature 1..2217: note = source = /note="Description of Artificial Sequence: Synthetic polynucleotide"
  source 1..2217: mol_type = other DNA
atggctgccgatggttatcttccagattggctcgaggacaacctctctgagggcattcgcgagtggtgggcgctgaaacctggagccccgaagcccaaagccaaccagcaaaagcaggacgacggccggggtctggtgcttcctggctacaagtacctcggacccttcaacggactcgacaagggggagcccgtcaacgcggcggacgcggcggccctcgagcacgacaaggcctacgaccagcagctgcaggcgggtgacaatccgtacctgcggtataaccacgccgacgccgagtttcaggagcgtctgcaagaagatacgtcttttgggggcaacctcgggcgagcagtcttccaggccaagaagcgggttctcgaacctctcggtctggttgaggaaggcgctaagacggctcctggaaagaagagaccggtagagccatcaccccagcgttctccagactcctctacgggcatcggcaagaagggccaacagcccgccagaaaaagactcaattttggtcagactggcgactcagagtcagttccagaccctcaacctctcggagaacctccagcagcgccctctggtgtgggacctaatacaatggctgcaggcggtggcgcaccaatggcagacaataacgaaggcgccgacggagtgggtagttcctcgggaaattggcattgcgattccacatggctgggcgacagagtcatcaccaccagcacccgaacctgggccctgcccacctacaacaaccacctctacaagcaaatctccaacgggacatcgggaggagccaccaacgacaacgcctacttcggctacagcaccccctgggggtattttgactttaacagattccactgccacttttcaccacgtgactggcagcgactcatcaacaacaactggggattccggcccaagagactcagcttcaagctcttcaacatccaggtcaaggaggtcacgcagaatgaaggcaccaagaccatcgccaataacctcaccagcaccatccaggtgtttacggactcggagtaccagctgccgtacgttctcggctctgcccaccagggctgcctgcctccgttcccggcggacgtgttcacgattccccagtacggctacctaacactcaacaacggtagtcaggccgtgggacgctcctccttctactgcctggaatactttccttcgcagatgctgagaaccggcaacaacttccagtttacttacaccttcgaggacgtgcctttccacagcagctacgcccacagccagagcttggaccggctgatgaatcctctgattgaccagtacctgtactacttgtctcggattcaaacaacaggaggcacggcaaatacgcagactctgggcttcagccaaggtgggcctaatacaatggccaatcaggcaaagaactggctgccaggaccctgttaccgccaacaacgcgtctcaacgacaaccgggcaaaacaacaatagcaactttgcctggactgctgggaccaaataccatctgaatggaagaaattcattggctaatcctggcatcgctatggcaacacacaaagacgacgaggagcgtttttttcccagtaacgggatcctgatttttggcaaacaaaatgctgccagagacaatgcggattacagcgatgtcatgcccaccagcgaggaagaaatcaaaaccactaaccctgtggccacagaggaatacggtatcgtggcagataacttgcagcagcaaaacacggctcctcaaattggaactgtcaacagccagggggccttacccggtatggtctggcagaaccgggacgtgtacctgcagggtcccatctgggccaagattcctcacacggacggcaacttccacccgtctccgctgatgggcggctttggcctgaaacatcctccgcctcagatcctgatcaagaacacgcctgtacctgcggatcctccgaccaccttcaaccagtcaaagctgaactctttcatcacgcaatacagcaccggacaggtcagcgtggaaattgaatgggagctgcagaaggaaaacagcaagcgctggaaccccgagatccagtacacctccaactactacaaatctacaagtgtggactttgctgttaatacagaaggcgtgtactctgaaccccgccccattggcacccgttacctcacccgtaatctgtaa

SEQ ID NO: 3957 - DNA, 2217 bp, synthetic construct
  misc_feature 1..2217: note = source = /note="Description of Artificial Sequence: Synthetic polynucleotide"
  source 1..2217: mol_type = other DNA
atggctgccgatggttatcttccagattggctcgaggacaacctctctgagggcattcgcgagtggtgggcgctgaaacctggagccccgaagcccaaagccaaccagcaaaagcaggacgacggccggggtctggtgcttcctggctacaagtacctcggacccttcaacggactcgacaagggggagcccgtcaacgcggcggacgcggcggccctcgagcacgacaaggcctacgaccagcagctgcaggcgggtgacaatccgtacctgcggtataaccacgccgacgccgagtttcaggagcgtctgcaagaagatacgtcttttgggggcaacctcgggcgagcagtcttccaggccaagaagcgggttctcgaacctctcggtctggttgaggaaggcgctaagacggctcctggaaagaagagaccggtagagccatcaccccagcgttctccagactcctctacgggcatcggcaagaagggccaacagcccgccagaaaaagactcaattttggtcagactggcgactcagagtcagttccagaccctcaacctctcggagaacctccagcagcgccctctggtgtgggacctaatacaatggctgcaggcggtggcgcaccaatggcagacaataacgaaggcgccgacggagtgggtagttcctcgggaaattggcattgcgattccacatggctgggcgacagagtcatcaccaccagcacccgaacctgggccctgcccacctacaacaaccacctctacaagcaaatctccaacgggacatcgggaggagccaccaacgacaacacctacttcggctacagcaccccctgggggtattttgactttaacagattccactgccacttttcaccacgtgactggcagcgactcatcaacaacaactggggattccggcccaagagactcagcttcaagctcttcaacatccaggtcaaggaggtcacgcagaatgaaggcaccaagaccatcgccaataacctcaccagcaccatccaggtgtttacggactcggagtaccagctgccgtacgttctcggctctgcccaccagggctgcctgcctccgttcccggcggacgtgttcacgattccccagtacggctacctaacactcaacaacggtagtcaggccgtgggacgctcctccttctactgcctggaatactttccttcgcagatgctgagaaccggcaacaacttccagtttacttacaccttcgaggacgtgcctttccacagcagctacgcccacagccagagcttggaccggctgatgaatcctctgattgaccagtacctgtactacttgtctcggattcaaacaacaggaggcacggcaaatacgcagactctgggcttcagccaaggtgggcctaatacaatggccaatcaggcaaagaactggctgccaggaccctgttaccgccaacaacgcgtctcaacgacaaccgggcaaaacaacaatagcaactttgcctggactgctgggaccaaataccatctgaatggaagaaattcattggctaatcctggcatcgctatggcaacacacaaagacgacgaggagcgtttttttcccagtaacgggatcctgatttttggcaaacaaaatgctgccagaggcaatgcggattacagcgatgtcatgcccaccagcgaggaagaaatcaaaaccactaaccctgtggccacagaggaatacggtatcgtggcagataacttgcagcagcaaaacacggctcctcaaattggaactgtcaacagccagggggccttacccggtatggtctggcagaaccgggacgtgtacctgcagggtcccatctgggccaagattcctcacacggacggcaacttccacccgtctccgctgatgggcggctttggcctgaaacatcctccgcctcagatcctgatcaagaacacgcctgtacctgcggatcctccgaccaccttcaaccagtcaaagctgaactctttcatcacgcaatacagcaccggacaggtcagcgtggaaattgaatgggagctgcagaaggaaaacagcaagcgctggaaccccgagatccagtacacctccaactactacaaatctacaagtgtggactttgctgttaatacagaaggcgtgtactctgaaccccgccccattggcacccgttacctcacccgtaatctgtaa

SEQ ID NO: 3958 - DNA, 2217 bp, synthetic construct
  misc_feature 1..2217: note = source = /note="Description of Artificial Sequence: Synthetic polynucleotide"
  source 1..2217: mol_type = other DNA
atggctgccgatggttatcttccagattggctcgaggacaacctctctgagggcattcgcgagtggtgggcgctgaaacctggagccccgaagcccaaagccaaccagcaaaagcaggacgacggccggggtctggtgcttcctggctacaagtacctcggacccttcaacggactcgacaagggggagcccgtcaacgcggcggacgcggcggccctcgagcacgacaaggcctacgaccagcagctgcaggcgggtgacaatccgtacctgcggtataaccacgccgacgccgagtttcaggagcgtctgcaagaagatacgtcttttgggggcaacctcgggcgagcagtcttccaggccaagaagcgggttctcgaacctctcggtctggttgaggaaggcgctaagacggctcctggaaagaagagaccggtagagccatcaccccagcgttctccagactcctctacgggcatcggcaagaagggccaacagcccgccagaaaaagactcaattttggtcagactggcgactcagagtcagttccagaccctcaacctctcggagaacctccagcagcgccctctggtgtgggacctaatacaatggctgcaggcggtggcgcaccaatggcagacaataacgaaggcgccgacggagtgggtagttcctcgggaaattggcattgcgattccacatggctgggcgacagagtcatcaccaccagcacccgaacctgggccctgcccacctacaacaaccacctctacaagcaaatctccaacgggacatcgggaggagccaccaacgacaacacctacttcggctacagcaccccctgggggtattttgactttaacagattccactgccacttttcaccacgtgactggcagcgactcatcaacaacaactggggattccggcccaagagactcagcttcaagctcttcaacatccaggtcaaggaggtcacgcagaatgaaggcaccaagaccatcgccaataacctcaccagcaccatccaggtgtttacggactcggagtaccagctgccgtacgttctcggctctgcccaccagggctgcctgcctccgttcccggcggacgtgttcacgattccccagtacggctacctaacactcaacaacggtagtcaggccgtgggacgctcctccttctactgcctggaatactttccttcgcagatgctgggaaccggcaacaacttccagtttacttacaccttcgaggacgtgcctttccacagcagctacgcccacagccagagcttggaccggctgatgaatcctctgattgaccagtacctgtactacttgtctcggattcaaacaacaggaggcacggcaaatacgcagactctgggcttcagccaaggtgggcctaatacaatggccaatcaggcaaagaactggctgccaggaccctgttaccgccaacaacgcgtctcaacgacaaccgggcaaaacaacaatagcaactttgcctggactgctgggaccaaataccatctgaatggaagaaattcattggctaatcctggcatcgctatggcaacacacaaagacgacgaggagcgtttttttcccagtaacgggatcctgatttttggcaaacaaaatgctgccagagacaatgcggattacagcgatgtcatgcccaccagcgaggaagaaatcaaaaccactaaccctgtggccacagaggaatacggtatcgtggcagataacttgcagcagcaaaacacggctcctcaaattggaactgtcaacagccagggggccttacccggtatggtctggcagaaccgggacgtgtacctgcagggtcccatctgggccaagattcctcacacggacggcaacttccacccgtctccgctgatgggcggctttggcctgaaacatcctccgcctcagatcctgatcaagaacacgcctgtacctgcggatcctccgaccaccttcaaccagtcaaagctgaactctttcatcacgcaatacagcaccggacaggtcagcgtggaaattgaatgggagctgcagaaggaaaacagcaagcgctggaaccccgagatccagtacacctccaactactacaaatctacaagtgtggactttgctgttaatacagaaggcgtgtactctgaaccccgccccattggcacccgttacctcacccgtaatctgtaa

SEQ ID NO: 3959 - DNA, 2217 bp, synthetic construct
  misc_feature 1..2217: note = source = /note="Description of Artificial Sequence: Synthetic polynucleotide"
  source 1..2217: mol_type = other DNA
atggctgccgatggttatcttccagattggctcgaggacaacctctctgagggcattcgcgagtggtgggcgctgaaacctggagccccgaagcccaaagccaaccagcaaaagcaggacgacggccggggtctggtgcttcctggctacaagtacctcggacccttcaacggactcgacaagggggagcccgtcaacgcggcggacgcggcggccctcgagcacgacaaggcctacgaccagcagctgcaggcgggtgacaatccgcacctgcggtataaccacgccgacgccgagtttcaggagcgtctgcaagaagatacgtcttttgggggcaacctcgggcgagcagtcttccaggccaagaagcgggttctcgaacctctcggtctggttgaggaaggcgctaagacggctcctggaaagaagagaccggtagagccatcaccccagcgttctccagactcctctacgggcatcggcaagaagggccaacagcccgccagaaaaagactcaattttggtcagactggcgactcagagtcagttccagaccctcaacctctcggagaacctccagcagcgccctctggtgtgggacctaatacaatggctgcaggcggtggcgcaccaatggcagacaataacgaaggcgccgacggagtgggtagttcctcgggaaattggcattgcgattccacatggctgggcgacagagtcatcaccaccagcacccgaacctgggccctgcccacctacaacaaccacctctacaagcaaatctccaacgggacatcgggaggagccaccaacgacaacacctacttcggctacagcaccccctgggggtattttgactttaacagattccactgccacttttcaccacgtgactggcagcgactcatcaacaacaactggggattccggcccaagagactcagcttcaagctcttcaacatccaggtcaaggaggtcacgcagaatgaaggcaccaagaccatcgccaataacctcaccagcaccatccaggtgtttacggactcggagtaccagctgccgtacgttctcggctctgcccaccagggctgcctgcctccgttcccggcggacgtgttcacgattccccagtacggctacctaacactcaacaacggtagtcaggccgtgggacgctcctccttctactgcctggaatactttccttcgcagatgctgagaaccggcaacaacttccagtttacttacaccttcgaggacgtgcctttccacagcagctacgcccacagccagagcttggaccggctgatgaatcctctgattgaccagtacctgtactacttgtctcggattcaaacaacaggaggcacggcaaatacgcagactctgggcttcagccaaggtgggcctaatacaatggccaatcaggcaaagaactggctgccaggaccctgttaccgccaacaacgcgtctcaacgacaaccgggcaaaacaacaatagcaactttgcctggactgctgggaccaaataccatctgaatggaagaaattcattggctaatcctggcatcgctatggcaacacacaaagacgacgaggagcgtttttttcccagtaacgggatcctgatttttggcaaacaaaatgctgccagagacaatgcggattacagcgatgtcatgcccaccagcgaggaagaaatcaaaaccactaaccctgtggccacagaggaatacggtatcgtggcagataacttgcagcagcaaaacacggctcctcaaattggaactgtcaacagccagggggccttacccggtatggtctggcagaaccgggacgtgtacctgcagggtcccatctgggccaagattcctcacacggacggcaacttccacccgtctccgctgatgggcggctttggcctgaaacatcctccgcctcagatcctgatcaagaacacgcctgtacctgcggatcctccgaccaccttcaaccagtcaaagctgaactctttcatcacgcaatacagcaccggacaggtcagcgtggaaattgaatgggagctgcagaaggaaaacagcaagcgctggaaccccgagatccagtacacctccaactactacaaatctacaagtgtggactttgctgttaatacagaaggcgtgtactctgaaccccgccccattggcacccgttacctcacccgtaatctgtaa

SEQ ID NO: 3960 - DNA, 2217 bp, synthetic construct
  misc_feature 1..2217: note = source = /note="Description of Artificial Sequence: Synthetic polynucleotide"
  source 1..2217: mol_type = other DNA
atggctgccgatggttatcttccagattggctcgaggacaacctctctgagggcattcgcgagtggtgggcgctgaaacctggagccccgaagcccaaagccaaccagcaaaagcaggacgacggccggggtctggtgcttcctggctacaagtacctcggacccttcaacggactcgacaagggggagcccgtcaacgcggcggacgcggcggccctcgagcacgacaaggcctacgaccagcagctgcaggcgggtgacaatccgtacctgcggtataaccacgccgacgccgagtttcaggagcgtctgcaagaagatacgtcttttgggggcaacctcgggcgagcagtcttccaggccaagaagcgggttctcgaacctctcggtctggttgaggaaggcgctaagacggctcctggaaagaagagaccggtagagccatcaccccagcgttctccagactcctctacgggcatcggcaagaagggccaacagcccgccagaaaaagactcaattttggtcagactggcgactcagagtcagttccagaccctcaacctctcggagaacctccagcagcgccctctggtgtgggacctaatacaatggctgcaggcggtggcgcaccaatggcagacaataacgaaggcgccgacggagtgggtagttcctcgggaaattggcattgcgattccacatggctgggcgacagagtcatcaccaccagcacccgaacctgggccctgcccacctacaacaaccacctctacaagcaaatctccaacgggacatcgggaggagccaccaacgacaacacctacttcggctacagcaccccctgggggtattttgactttaacagattccactgccacttttcaccacgtgactggcagcgactcatcaacaacaactggggattccggcccaagagactcagcttcaagctcttcaacatccaggtcaaggaggtcacgcagaatgaaggcaccaagaccatcgccaataacctcaccagcaccatccaggtgtttacggactcggagtaccagctgccgtacgttctcggccctgcccaccagggctgcctgcctccgttcccggcggacgtgttcacgattccccagtacggctacctaacactcaacaacggtagtcaggccgtgggacgctcctccttctactgcctggaatactttccttcgcagatgctgagaaccggcaacaacttccagtttacttacaccttcgaggacgtgcctttccacagcagctacgcccacagccagagcttggaccggctgatgaatcctctgattgaccagtacctgtactacttgtctcggattcaaacaacaggaggcacggcaaatacgcagactctgggcttcagccaaggtgggcctaatacaatggccaatcaggcaaagaactggctgccaggaccctgttaccgccaacaacgcgtctcaacgacaaccgggcaaaacaacaatagcaactttgcctggactgctgggaccaaataccatctgaatggaagaaattcattggctaatcctggcatcgctatggcaacacacaaagacgacgaggagcgtttttttcccagtaacgggatcctgatttttggcaaacaaaatgctgccagagacaatgcggattacagcgatgtcatgcccaccagcgaggaagaaatcaaaaccactaaccctgtggccacagaggaatacggtatcgtggcagataacttgcagcagcaaaacacggctcctcaaattggaactgtcaacagccagggggccttacccggtatggtctggcagaaccgggacgtgtacctgcagggtcccatctgggccaagattcctcacacggacggcaacttccacccgtctccgctgatgggcggctttggcctgaaacatcctccgcctcagatcctgatcaagaacacgcctgtacctgcggatcctccgaccaccttcaaccagtcaaagctgaactctttcatcacgcaatacagcaccggacaggtcagcgtggaaattgaatgggagctgcagaaggaaaacagcaagcgctggaaccccgagatccagtacacctccaactactacaaatctacaagtgtggactttgctgttaatacagaaggcgtgtactctgaaccccgccccattggcacccgttacctcacccgtaatctgtaa

SEQ ID NO: 3961 - DNA, 2217 bp, synthetic construct
  misc_feature 1..2217: note = source = /note="Description of Artificial Sequence: Synthetic polynucleotide"
  source 1..2217: mol_type = other DNA
atggctgccgatggttatcttccagattggctcgaggacaacctctctgagggcattcgcgagtggtgggcgctgaaacctggagccccgaagcccaaagccaaccagcaaaagcaggacgacggccggggtctggtgcttcctggctacaagtacctcggacccttcaacggactcgacaagggggagcccgtcaacgcggcggacgcggcggccctcgagcacgacaaggcctacgaccagcagctgcaggcgggtgacaatccgtacctgcggtataaccacgccgacgccgagtttcaggagcgtctgcaagaagatacgtcttttgggggcaacctcgggcgagcagtcttccaggccaagaagcgggttctcgaacctctcggtctggttggggaaggcgctaagacggctcctggaaagaagagaccggtagagccatcaccccagcgttctccagactcctctacgggcatcggcaagaagggccaacagcccgccagaaaaagactcaattttggtcagactggcgactcagagtcagttccagaccctcaacctctcggagaacctccagcagcgccctctggtgtgggacctaatacaatggctgcaggcggtggcgcaccaatggcagacaataacgaaggcgccgacggagtgggtagttcctcgggaaattggcattgcgattccacatggctgggcgacagagtcatcaccaccagcacccgaacctgggccctgcccacctacaacaaccacctctacaagcaaatctccaacgggacatcgggaggagccaccaacgacaacacctacttcggctacagcaccccctgggggtattttgactttaacagattccactgccacttttcaccacgtgactggcagcgactcatcaacaacaactggggattccggcccaagagactcagcttcaagctcttcaacatccaggtcaaggaggtcacgcagaatgaaggcaccaagaccatcgccaataacctcaccagcaccatccaggtgtttacggactcggagtaccagctgccgtacgttctcggctctgcccaccagggctgcctgcctccgttcccggcggacgtgttcacgattccccagtacggctacctaacactcaacaacggtagtcaggccgtgggacgctcctccttctactgcctggaatactttccttcgcagatgctgagaaccggcaacaacttccagtttacttacaccttcgaggacgtgcctttccacagcagctacgcccacagccagagcttggaccggctgatgaatcctctgattgaccagtacctgtactacttgtctcggattcaaacaacaggaggcacggcaaatacgcagactctgggcttcagccaaggtgggcctaatacaatggccaatcaggcaaagaactggctgccaggaccctgttaccgccaacaacgcgtctcaacgacaaccgggcaaaacaacaatagcaactttgcctggactgctgggaccaaataccatctgaatggaagaaattcattggctaatcctggcatcgctatggcaacacacaaagacgacgaggagcgtttttttcccagtaacgggatcctgatttttggcaaacaaaatgctgccagagacaatgcggattacagcgatgtcatgcccaccagcgaggaagaaatcaaaaccactaaccctgtggccacagaggaatacggtatcgtggcagataacttgcagcagcaaaacacggctcctcaaattggaactgtcaacagccagggggccttacccggtatggtctggcagaaccgggacgtgtacctgcagggtcccatctgggccaagattcctcacacggacggcaacttccacccgtctccgctgatgggcggctttggcctgaaacatcctccgcctcagatcctgatcaagaacacgcctgtacctgcggatcctccgaccaccttcaaccagtcaaagctgaactctttcatcacgcaatacagcaccggacaggtcagcgtggaaattgaatgggagctgcagaaggaaaacagcaagcgctggaaccccgagatccagtacacctccaactactacaaatctacaagtgtggactttgctgttaatacagaaggcgtgtactctgaaccccgccccattggcacccgttacctcacccgtaatctgtaa

SEQ ID NO: 3962 - DNA, 2217 bp, synthetic construct
  misc_feature 1..2217: note = source = /note="Description of Artificial Sequence: Synthetic polynucleotide"
  source 1..2217: mol_type = other DNA
atggctgccgatggttatcttccagattggctcgaggacaacctctctgagggcattcgcgagtggtgggcgctgaaacctggagccccgaagcccaaagccaaccagcaaaagcaggacgacggccggggtctggtgcttcctggctacaagtacctcggacccttcaacggactcgacaagggggagcccgtcaacgcggcggacgcggcggccctcgagcacgacaaggcctacgaccagcagctgcaggcgggtgacaatccgtacctgcggtataaccacgccgacgccgagtttcaggagcgtctgcaagaagatacgtcttttgggggcaacctcgggcgagcagtcttccaggccaagaagcgggttctcgaacctctcggtctggttgaggaaggcgctaagacggctcctggaaagaagagaccggtagagccatcaccccagcgttctccagactcctctacgggcatcggcaagaagggccaacagcccgccagaaaaagactcaattttggtcagactggcgactcagagtcagttccagaccctcaacctctcggagaacctccagcagcgccctctggtgtgggacctaatacaatggctgcaggcggtggcgcaccaatggcagacaataacgaaggcgccgacggagtgggtagttcctcgggaaattggcattgcgattccacatggctgggcgacagagtcatcaccaccagcacccgaacctgggccctgcccacctacaacaaccacctctacaagcaaatctccaacgggacatcgggaggagccaccaacgacaacacctacttcggctacagcaccccctgggggtattttgactttaacagattccactgccacttttcaccacgtgactggcagcgactcatcaacaacaactggggattccggcccaagagactcagcttcaagctcttcaacatccaggtcaaggaggtcacgcagaatgaaggcaccaagaccatcgccaataacctcaccagcaccatccaggtgtttacggactcggagtaccagctgccgtacgttctcggctctgcccaccagggctgcctgcctccgttcccggcggacgtgttcacgattccccagtacggctacctaacactcaacaacggtagtcaggccgtgggacgctcctccttctactgcctggaatactttccttcgcagatgctgagaaccggcaacaacttccagtttacttacaccttcgaggacgtgcctttccacagcagctacgcccacagccagagcttggaccggctgatgaatcctctgattgaccagtacctgtactacttgtctcggattcaaacaacaggaggcacggcaaatacgcagactctgggcttcagccaaggtgggcctaatacaatggccaatcaggcaaagaactggctgccaggaccctgttaccgccaacaacgcgtctcaacgacaaccgggcaaaacaacaatagcaactttgcctggactgctgggaccaaataccatctgaatggaagaaattcattggctaatcctggcatcgctatggcaacacacaaagacgacgaggagcgtttttttcccagtaacgggatcctgatttttggcaaacaaaatgctgccagagacaatgcggattacagcgatgtcatgcccaccagcgaggaagaaatcaaaaccactaaccctgtggccacagaggaatacggtatcgtggcagataacttgcagcagcaaaacacggctcctcaaattggaactgtcaacagccagggggccttacccggtatggtctggcagaaccgggacgtgtacctgcagggtcccatctgggccaagattcctcacacggacggcaacttccacccgtctccgctgatgggcggctttggcctgaaacatcctccgcctcagatcctgatcaagaacacgcctgtacctgcggatcctccgaccaccttcaaccagtcaaagctgaactctttcatcacgcaatacagcaccggacaggtcagcgtggaaattgaatgggagctgcagaaggaaagcagcaagcgctggaaccccgagatccagtacacctccaactactacaaatctacaagtgtggactttgctgttaatacagaaggcgtgtactctgaaccccgccccattggcacccgttacctcacccgtaatctgtaa

SEQ ID NO: 3963 - DNA, 2217 bp, synthetic construct
  misc_feature 1..2217: note = source = /note="Description of Artificial Sequence: Synthetic polynucleotide"
  source 1..2217: mol_type = other DNA
atggctgccgatggttatcttccagattggctcgaggacaacctctctgagggcattcgcgagtggtgggcgctgaaacctggagccccgaagcccaaagccaaccagcaaaagcaggacgacggccggggtctggtgcttcctggctacaagtacctcggacccttcaacggactcgacaagggggagcccgtcaacgcggcggacgcggcggccctcgagcacgacaaggcctacgaccagcagctgcaggcgggtgacaatccgtacctgcggtataaccacgccgacgccgagtttcaggagcgtctgcaagaagatacgtcttttgggggcaacctcgggcgagcagtcttccaggccaagaagcgggttctcgaacctctcggtctggttgaggaaggcgctaagacggctcctggaaagaagagaccggtagagccatcaccccagcgttctccagactcctctacgggcatcggcaagaagggccaacagcccgccagaaaaagactcaattttggtcagactggcgactcagagtcagttccagaccctcaacctctcggagaacctccagcagcgccctctggtgtgggacctaatacaatggctgcaggcggtggcgcaccaatggcagacaataacgaaggcgccgacggagtgggtagttcctcgggaaattggcattgcgattccacatggctgggcgacagagtcatcaccaccagcacccgaacctgggccctgcccacctacaacaaccacctctacaagcaaatctccaacgggacatcgggaggagccaccaacgacaacacctacttcggctacagcaccccctgggggtattttgactttaacagattccactgccacttttcaccacgtgactggcagcgactcatcaacaacaactggggattccggcccaagagactcagcttcaagctcttcaacatccaggtcaaggaggtcacgcagaatgaaggcaccaagaccatcgccaataacctcaccagcaccatccaggtgtttacggactcggagtaccagctgccgtacgttctcggctctgcccaccagggctgcctgcctccgttcccggcggacgtgttcacgattccccagtacggctacctaacactcaacaacggtagtcaggccgtgggacgctcctccttctactgcctggaatactttccttcgcagatgctgagaaccggcaacaacttccagtttacttacaccttcgaggacgtgcctttccacagcagctacgcccacagccagagcttggaccggctgatgaatcctctgattgaccagtacctgtactacttgtctcggattcaaacaacaggaggcacggcaaatacgcagactctgggcttcagccaaggtgggcctaatacaatggccaatcaggcaaagaactggctgccaggaccctgttaccgccaacaacgcgtctcaacgacaaccgggcaaaacaacaatagcaactttgcctggactgctgggaccaaataccatctgaatggaagaaattcattggctaatcctggcatcgctatggcaacacacaaagacgacgaggagcgtttttttcccagtaacgggatcctgatttttggcaaacaaaatgctgccagagacaatgcggattacagcgatgtcatgcccgccagcgaggaagaaatcaaaaccactaaccctgtggccacagaggaatacggtatcgtggcagataacttgcagcagcaaaacacggctcctcaaattggaactgtcaacagccagggggccttacccggtatggtctggcagaaccgggacgtgtacctgcagggtcccatctgggccaagattcctcacacggacggcaacttccacccgtctccgctgatgggcggctttggcctgaaacatcctccgcctcagatcctgatcaagaacacgcctgtacctgcggatcctccgaccaccttcaaccagtcaaagctgaactctttcatcacgcaatacagcaccggacaggtcagcgtggaaattgaatgggagctgcagaaggaaaacagcaagcgctggaaccccgagatccagtacacctccaactactacaaatctacaagtgtggactttgctgttaatacagaaggcgtgtactctgaaccccgccccattggcacccgttacctcacccgtaatctgtaa

SEQ ID NO: 3964 - DNA, 2217 bp, synthetic construct
  misc_feature 1..2217: note = source = /note="Description of Artificial Sequence: Synthetic polynucleotide"
  source 1..2217: mol_type = other DNA
atggctgccgatggttatcttccagattggctcgaggacaacctctctgagggcattcgcgagtggtgggcgctgaaacctggagccccgaagcccaaagccaaccagcaaaagcaggacgacggccggggtctggtgcttcctggctacaagtacctcggacccttcaacggactcgacaagggggagcccgtcaacgcggcggacgcggcggccctcgagcacgacaaggcctacgaccagcagctgcaggcgggtgacaatccgtacctgcggtataaccacgccgacgccgagtttcaggagcgtctgcaagaagatacgtcttttgggggcaacctcgggcgagcagtcttccaggccaagaagcgggttctcgaacctctcggtctggttgaggaaggcgctaagacggctcctggaaagaagagaccggtagagccatcaccccagcgttctccagactcctctacgggcatcggcaagaagggccaacagcccgccagaaaaagactcaattttggtcagactggcgactcagagtcagttccagaccctcaacctctcggagaacctccagcagcgccctctggtgtgggacctaatacaatggctgcaggcggtggcgcaccaatggcagacaataacgaaggcgccgacggagtgggtagttcctcgggaaattggcattgcgattccacatggctgggcgacagagtcatcaccaccagcacccgaacctgggccctgcccacctacaacaaccacctctacaagcaaatctccaacgggacatcgggaggagccaccaacgacaacacctacttcggctacagcaccccctgggggtattttgactttaacagattccactgccacttttcaccacgtgactggcagcgactcatcaacaacaactggggattccggcccaagagactcagcttcaagctcttcaacatccaggtcaaggaggtcacgcagaatgaaggcaccaagaccatcgccaataacctcaccagcaccatccaggtgtttacggactcggagtaccagctgccgtacgttctcggctctgcccaccagggctgcctgcctccgttcccggcggacgtgctcacgattccccagtacggctacctaacactcaacaacggtagtcaggccgtgggacgctcctccttctactgcctggaatactttccttcgcagatgctgagaaccggcaacaacttccagtttacttacaccttcgaggacgtgcctttccacagcagctacgcccacagccagagcttggaccggctgatgaatcctctgattgaccagtacctgtactacttgtctcggattcaaacaacaggaggcacggcaaatacgcagactctgggcttcagccaaggtgggcctaatacaatggccaatcaggcaaagaactggctgccaggaccctgttaccgccaacaacgcgtctcaacgacaaccgggcaaaacaacaatagcaactttgcctggactgctgggaccaaataccatctgaatggaagaaattcattggctaatcctggcatcgctatggcaacacacaaagacgacgaggagcgtttttttcccagtaacgggatcctgatttttggcaaacaaaatgctgccagagacaatgcggattacagcgatgtcatgcccaccagcgaggaagaaatcaaaaccactaaccctgtggccacagaggaatacggtatcgtggcagataacttgcagcagcaaaacacggctcctcaaattggaactgtcaacagccagggggccttacccggtatggtctggcagaaccgggacgtgtacctgcagggtcccatctgggccaagattcctcacacggacggcaacttccacccgtctccgctgatgggcggctttggcctgaaacatcctccgcctcagatcctgatcaagaacacgcctgtacctgcggatcctccgaccaccttcaaccagtcaaagctgaactctttcatcacgcaatacagcaccggacaggtcagcgtggaaattgaatgggagctgcagaaggaaaacagcaagcgctggaaccccgagatccagtacacctccaactactacaaatctacaagtgtggactttgctgttaatacagaaggcgtgtactctgaaccccgccccattggcacccgttacctcacccgtaatctgtaa

SEQ ID NO: 3965 - DNA, 2217 bp, synthetic construct
  misc_feature 1..2217: note = source = /note="Description of Artificial Sequence: Synthetic polynucleotide"
  source 1..2217: mol_type = other DNA
atggctgccgatggttatcttccagattggctcgaggacaacctctctgagggcattcgcgagtggtgggcgctgaaacctggagccccgaagcccaaagccaaccagcaaaagcaggacgacggccggggtctggtgcttcctggctacaagtacctcggacccttcaacggactcgacaagggggagcccgtcaacgcggcggacgcggcggccctcgagcacgacaaggcctacgaccagcagctgcaggcgggtgacaatccgtacctgcggtataaccacgccgacgccgagtttcaggagcgtctgcaagaagatacgtcttttgggggcaacctcgggcgagcagtcttccaggccaagaagcgggttctcgaacctctcggtctggttgaggaaggcgctaagacggctcctggaaagaagagaccggtagagccatcaccccagcgttctccagactcctctacgggcatcggcaagaagggccaacagcccgccagaaaaagactcaattttggtcagactggcgactcagagtcagttccagaccctcaacctctcggagaacctccagcagcgccctctggtgtgggacctaatacaatggctgcaggcggtggcgcaccaatggcagacaataacgaaggcgccgacggagtgggtagttcctcgggaaattggcattgcgattccacatggctgggcgacagagtcatcaccaccagcacccgaacctgggccctgcccacctacaacaaccacctctacaagcaaatctccaacgggacatcgggaggagccaccaacgacaacacctacttcggctacagcaccccctgggggtattttgactttaacagattccactgccacttttcaccacgtgactggcagcgactcatcaacaacaactggggattccggcccaagagactcagcttcaagctcttcaacatccaggtcaaggaggtcacgcagaatgaaggcaccaagaccatcgccaataacctcaccagcaccatccgggtgtttacggactcggagtaccagctgccgtacgttctcggctctgcccaccagggctgcctgcctccgttcccggcggacgtgttcacgattccccagtacggctacctaacactcaacaacggtagtcaggccgtgggacgctcctccttctactgcctggaatactttccttcgcagatgctgagaaccggcaacaacttccagtttacttacaccttcgaggacgtgcctttccacagcagctacgcccacagccagagcttggaccggctgatgaatcctctgattgaccagtacctgtactacttgtctcggattcaaacaacaggaggcacggcaaatacgcagactctgggcttcagccaaggtgggcctaatacaatggccaatcaggcaaagaactggctgccaggaccctgttaccgccaacaacgcgtctcaacgacaaccgggcaaaacaacaatagcaactttgcctggactgctgggaccaaataccatctgaatggaagaaattcattggctaatcctggcatcgctatggcaacacacaaagacgacgaggagcgtttttttcccagtaacgggatcctgatttttggcaaacaaaatgctgccagagacaatgcggattacagcgatgtcatgcccaccagcgaggaagaaatcaaaaccactaaccctgtggccacagaggaatacggtatcgtggcagataacttgcagcagcaaaacacggctcctcaaattggaactgtcaacagccagggggccttacccggtatggtctggcagaaccgggacgtgtacctgcagggtcccatctgggccaagattcctcacacggacggcaacttccacccgtctccgctgatgggcggctttggcctgaaacatcctccgcctcagatcctgatcaagaacacgcctgtacctgcggatcctccgaccaccttcaaccagtcaaagctgaactctttcatcacgcaatacagcaccggacaggtcagcgtggaaattgaatgggagctgcagaaggaaaacagcaagcgctggaaccccgagatccagtacacctccaactactacaaatctacaagtgtggactttgctgttaatacagaaggcgtgtactctgaaccccgccccattggcacccgttacctcacccgtaatctgtaa

SEQ ID NO: 3966 - DNA, 2217 bp, synthetic construct
  misc_feature 1..2217: note = source = /note="Description of Artificial Sequence: Synthetic polynucleotide"
  source 1..2217: mol_type = other DNA
atggctgccgatggttatcttccagattggctcgaggacaacctctctgagggcattcgcgagtggtgggcgctgaaacctggagccccgaagcccaaagccaaccagcaaaagcaggacgacggccggggtctggtgcttcctggctacaagtacctcggacccttcaacggactcgacaagggggagcccgtcaacgcggcggacgcggcggccctcgagcacgacaaggcctacgaccagcagctgcaggcgggtgacaatccgtacctgcggtataaccacgccgacgccgagtttcaggagcgtctgcaagaagatacgtcttttgggggcaacctcgggcgagcagtcttccaggccaagaagcgggttctcgaacctctcggtctggttgaggaaggcgctaagacggctcctggaaagaagagaccggtagagccatcaccccagcgttctccagactcctctacgggcatcggcaagaagggccaacagcccgccagaaaaagactcaattttggtcagactggcgactcagagtcagttccagaccctcaacctctcggagaacctccagcagcgccctctggtgtgggacctaatacaatggctgcaggcggtggcgcaccaatggcagacaataacgaaggcgccgacggagtgggtagttcctcgggaaattggcattgcgattccacatggctgggcgacagagtcatcaccaccagcacccgaacctgggccctgcccacctacaacaaccacctctacaagcaaatctccaacgggacatcgggaggagccaccaacgacaacacctacttcggctacagcaccccctgggggtattttgactttaacagattccactgccacttttcaccacgtgactggcggcgactcatcaacaacaactggggattccggcccaagagactcagcttcaagctcttcaacatccaggtcaaggaggtcacgcagaatgaaggcaccaagaccatcgccaataacctcaccagcaccatccaggtgtttacggactcggagtaccagctgccgtacgttctcggctctgcccaccagggctgcctgcctccgttcccggcggacgtgttcacgattccccagtacggctacctaacactcaacaacggtagtcaggccgtgggacgctcctccttctactgcctggaatactttccttcgcagatgctgagaaccggcaacaacttccagtttacttacaccttcgaggacgtgcctttccacagcagctacgcccacagccagagcttggaccggctgatgaatcctctgattgaccagtacctgtactacttgtctcggattcaaacaacaggaggcacggcaaatacgcagactctgggcttcagccaaggtgggcctaatacaatggccaatcaggcaaagaactggctgccaggaccctgttaccgccaacaacgcgtctcaacgacaaccgggcaaaacaacaatagcaactttgcctggactgctgggaccaaataccatctgaatggaagaaattcattggctaatcctggcatcgctatggcaacacacaaagacgacgaggagcgtttttttcccagtaacgggatcctgatttttggcaaacaaaatgctgccagagacaatgcggattacagcgatgtcatgcccaccagcgaggaagaaatcaaaaccactaaccctgtggccacagaggaatacggtatcgtggcagataacttgcagcagcaaaacacggctcctcaaattggaactgtcaacagccagggggccttacccggtatggtctggcagaaccgggacgtgtacctgcagggtcccatctgggccaagattcctcacacggacggcaacttccacccgtctccgctgatgggcggctttggcctgaaacatcctccgcctcagatcctgatcaagaacacgcctgtacctgcggatcctccgaccaccttcaaccagtcaaagctgaactctttcatcacgcaatacagcaccggacaggtcagcgtggaaattgaatgggagctgcagaaggaaaacagcaagcgctggaaccccgagatccagtacacctccaactactacaaatctacaagtgtggactttgctgttaatacagaaggcgtgtactctgaaccccgccccattggcacccgttacctcacccgtaatctgtaa

SEQ ID NO: 3967 - DNA, 2217 bp, synthetic construct
  misc_feature 1..2217: note = source = /note="Description of Artificial Sequence: Synthetic polynucleotide"
  source 1..2217: mol_type = other DNA
atggctgccgatggttatcttccagattggctcgaggacaacctctctgagggcattcgcgagtggtgggcgctgaaacctggagccccgaagcccaaagccaaccagcaaaagcaggacgacggccggggtctggtgcttcctggctacaagtacctcggacccttcaacggactcgacaagggggagcccgtcaacgcggcggacgcagcggccctcgagcacgacaaggcctacgaccagcagctgcaggcgggtgacaatccgtacctgcggtataaccacgccgacgccgagtttcaggagcgtctgcaagaagatacgtcttttgggggcaacctcgggcgagcagtcttccaggccaagaagcgggttctcgaacctctcggtctggttgaggaaggcgctaagacggctcctggaaagaagagaccggtagagccatcaccccagcgttctccagactcctctacgggcatcggcaagaaaggccaacagcccgccagaaaaagactcaattttggtcagactggcgactcagagtcagttccagaccctcaacctctcggagaacctccagcagcgccctctggtgtgggacctaatacaatggctgcaggcggtggcgcaccaatggcagacaataacgaaggcgccgacggagtgggtagttcctcgggaaattggcattgcgattccacatggctgggcgacagagtcatcaccaccagcacccgaacctgggccctgcccacctacaacaaccacctctacaagcaaatctccaacgggacatcgggaggagccaccaacgacaacacctacttcggctacagcaccccctgggggtattttgactttaacagattccactgccacttttcaccacgtgactggcagcgactcatcaacaacaactggggattccggcccaagagactcagcttcaagctcttcaacatccaggtcaaggaggtcacgcagaatgaaggcaccaagaccatcgccaataacctcaccagcaccatccaggtgtttacggactcggagtaccagctgccgtacgttctcggctctgcccaccagggctgcctgcctccgttcccggcggacgtgttcatgattccccagtacggctacctaacactcaacaacggtagtcaggccgtgggacgctcctccttctactgcctggaatactttccttcgcagatgctgagaaccggcaacaacttccagtttacttacaccttcgaggacgtgcctttccacagcagctacgcccacagccagagcttggaccggctgatgaatcctctgattgaccagtacctgtactacttgtctcggactcaaacaacaggaggcacggcaagtacgcagactctgggcttcagccaaggtgggcctaatacaatggccaatcaggcaaagaactggctgccaggaccctgttaccgccaacaacgcgtctcaacgacaaccgggcaaaacaacaatagcaactttgcctggactgctgggaccaaataccatctgaatggaagaaattcattggctaatcctggcatcgctatggcaacacacaaagacgacgaggagcgtttttttcccagtaacgggatcctgatttttggcaaacaaaatgctgccagagacaatgcggattacagcgatgtcatgctcaccagcgaggaagaaatcaaaaccactaaccctgtggctacagaggaatacggtatcgtggcagataacttgcagcagcaaaacacggctcctcaaattggaactgtcaacagccagggggccttacccggtatggtctggcagaaccgggacgtgtacctgcagggtcccatctgggccaagattcctcacacggacggcaacttccacccgtctccgctgatgggcggctttggcctgaaacatcctccgcctcagatcctgatcaagaacacgcctgtacctgcggatcctccgaccaccttcaaccagtcaaagctgaactctttcatcacgcaatacagcaccggacaggtcagcgtggaaattgaatgggagctgcagaaggaaaacagcaagcgctggaaccccgagatccagtacacctccaactactacaaatctacaagtgtggactttgctgttaatacagaaggcgtgtactctgaaccccgccccattggcacccgttacctcacccgtaatctgtaa

SEQ ID NO: 3968 - DNA, 2217 bp, synthetic construct
  misc_feature 1..2217: note = source = /note="Description of Artificial Sequence: Synthetic polynucleotide"
  source 1..2217: mol_type = other DNA
atggctgccgatggttatcttccagattggctcgaggacaacctctctgagggcattcgcgagtggtgggcgctgaaacctggagccccgaagcccaaagccaaccagcaaaagcaggacgacggccggggtctggtgcttcctggctacaagtacctcggacccttcaacggactcgacaagggggagcccgtcaacgcggcggacgcagcggccctcgagcacgacaaggcctacgaccagcagctgcaggcgggtgacaatccgtacctgcggtataaccacgccgacgccgagtttcaggagcgtctgcaagaagatacgtcttttgggggcaacctcgggcgagcagtcttccaggccaagaagcgggttctcgaacctctcggtctggttgaggagggcgctaagacggctcctggaaagaagagaccggtagagccatcaccccagcgttctccagactcctctacgggcatcggcaagaaaggccaacagcccgccagaaaaagactcaattttggtcagactggcgactcagagtcagttccagaccctcaacctctcggagaacctccagcagcgccctctggtgtgggacctaatacaatggctgcaggcggtggcgcaccaatggcagacaataacgaaggcgccgacggagtgggtagttcctcgggaaattggcattgcgattccacatggctgggcgacagagtcatcaccaccagcacccgaacctgggccctgcccacctacaacaaccacctctacaagcaaatctccaacgggacatcgggaggagccaccaacgacaacacctacttcggctacagcaccccctgggggtattttgactttaacagattccactgccacttttcaccacgtgactggcagcgactcatcaacaacaactggggattccggcccaagagactcagcttcaagctcttcaacatccaggtcaaggaggtcacgcagaatgaaggcaccaagaccatcgccaataacctcaccagcaccatccaggtgtttacggactcggagtaccagctgccgtacgttctcggctctgcccaccagggctgcctgcctccgttcccggcggacgtgttcatgattccccagtacggctacctaacactcaacaacggtagtcaggccgtgggacgctcctccttctactgcctggaatactttccttcgcagatgctgagaaccggcaacaacttccagtttacttacaccttcgaggacgtgcctttccacagcagctacgcccacagccagagcttggaccggctgatgaatcctctgattgaccagtacctgtactacttgtctcggactcaaacaacaggaggcacggcaaatacgcagactctgggcttcagccaaggtgggcctaatacaatggccaatcaggcaaagaactggctgccaggaccctgttaccgccaacaacgcgtctcaacgacaaccgggcaaaacaacaatagcaactttgcctggactgctgggaccaaataccatctgaatggaagaaattcattggctaatcctggcatcgctatggcaacacacaaagacgacgaggagcgtttttttcccagtaacgggatcctgatttttggcaaacaaaatgctgccagagacaatgcggattacagcgatgtcatgctcaccagcgaggaagaaatcaaaaccactaaccctgtggctacagaggaatacggtatcgtggcagataacttgcagcagcaaaacacggctcctcaaattggaactgtcaacagccagggggccttacccggtatggtctggcagaaccgggacgtgtacctgcagggtcccatctgggccaagattcctcacacggacggcaacttccacccgtctccgctgatgggcggctttggcctgaaacatcctccgcctcagatcctgatcaagaacacgcctgtacctgcggatcctccgaccaccttcaaccagtcaaagctgaactctttcatcacgcaatacagcaccggacaggtcagcgtggaaattgaatgggagctgcagaaggaaaacagcaagcgctggaaccccgagatccagtacacctccaactactacaaatctacaagtgtggactttgctgttaatacagaaggcgtgtactctgaaccccgccccattggcacccgttacctcacccgtaatctgtaa

SEQ ID NO: 3969 - DNA, 2217 bp, synthetic construct
  misc_feature 1..2217: note = source = /note="Description of Artificial Sequence: Synthetic polynucleotide"
  source 1..2217: mol_type = other DNA
atggctgccgatggttatcttccagattggctcgaggacaacctctctgagggcattcgcgagtggtgggcgctgaaacctggagccccgaagcccaaagccaaccagcaaaagcaggacgacggccggggtcaggtgcttcctggctacaagtacctcggacccttcaacggactcgacaagggggagcccgtcaacgcggcggacgcagcggccctcgagcacgacaaggcctacgaccagcagctgcaggcgggtgacaatccgtacctgcggtataaccacgccgacgccgagtttcaggagcgtctgcaagaagatacgtcttttgggggcaacctcgggcgagcagtcttccaggccaagaagcgggttctcgaacctctcggtctggttgaggaaggcgctaagacggctcctggaaagaagagaccggtagagccatcaccccagcgttctccagactcctctacgggcatcggcaagaaaggccaacagcccgccagaaaaagactcaattttggtcagactggcgactcagagtcagttccagaccctcaacctctcggagaacctccagcagcgccctctggtgtgggacctaatacaatggctgcaggcggtggcgcaccaatggcagacaataacgaaggcgccgacggagtgggtagttcctcgggaaattggcattgcgattccacatggctgggcgacagagtcatcaccaccagcacccgaacctgggccctgcccacctacaacaaccacctctacaagcaaatctccaacgggacatcgggaggagccaccaacgacaacacctacttcggctacagcaccccctgggggtattttgactttaacagattccactgccacttttcaccacgtgactggcagcgactcatcaacaacaactggggattccggcccaagagactcagcttcaagctcttcaacatccaggtcaaggaggtcacgcagaatgaaggcaccaagaccatcgccaataacctcaccagcaccatccaggtgtttacggactcggagtaccagctgccgtacgttctcggctctgcccaccagggctgcctgcctccgttcccggcggacgtgttcatgattccccagtacggctacctaacactcaacaacggtagtcaggccgtgggacgctcctccttctactgcctggaatactttccttcgcagatgctgagaaccggcaacaacttccagtttacttacaccttcgaggacgtgcctttccacagcagctacgcccacagccagagcttggaccggctgatgaatcctctgattgaccagtacctgtactacttgtctcggactcaaacaacaggaggcacggcaaatacgcagactctgggcttcagccaaggtgggcctaatacaatggccaatcaggcaaagaactggctgccaggaccctgttaccgccaacaacgcgtctcaacgacaaccgggcaaaacaacaatagcaactttgcctggactgctgggaccaaataccatctgaatggaagaaattcattggctaatcctggcatcgctatggcaacacacaaagacgacgaggagcgtttttttcccagtaacgggatcctgatttttggcaaacaaaatgctgccagagacaatgcggattacagcgatgtcatgctcaccagcgaggaagaaatcaaaaccactaaccctgtggctacagaggaatacggtatcgtggcagataacttgcagcagcaaaacacggctcctcaaattggaactgtcaacagccagggggccttacccggtatggtctggcagaaccgggacgtgtacctgcagggtcccgtctgggccaagattcctcacacggacggcaacttccacccgtctccgctgatgggcggctttggcctgaaacatcctccgcctcagatcctgatcaagaacacgcctgtacctgcggatcctccgaccaccttcaaccagtcaaagctgaactctttcatcacgcaatacagcaccggacaggtcagcgtggaaattgaatgggagctgcagaaggaaaacagcaagcgctggaaccccgagatccagtacacctccaactactacaaatctacaagtgtggactttgctgttaatacagaaggcgtgtactctgaaccccgccccattggcacccgttacctcacccgtaatctgtaa

SEQ ID NO: 3970 - DNA, 2217 bp, synthetic construct
  misc_feature 1..2217: note = source = /note="Description of Artificial Sequence: Synthetic polynucleotide"
  source 1..2217: mol_type = other DNA
atggctgccgatggttatcttccagattggctcgaggacaacctctctgagggcattcgcgagtggtgggcgctgaaacctggagccccgaagcccaaagccaaccagcaaaagcaggacgacggccggggtctggtgcttcctggctacaagtacctcggacccttcaacggactcgacaagggggagcccgtcaacgcggcggacgcagcggccctcgagcacgacaaggcctacgaccagcagctgcaggcgggtgacaatccgtacctgcggtataaccacgccgacgccgagtttcaggagcgtctgcaagaagatacgtcttttgggggcaacctcgggcgagcagtcttccaggccaagaagcgggttctcgaacctctcggtctggttgaggaaggcgctaagacggctcctggaaagaagagaccggtagagccatcaccccagcgttctccagactcctctacgggcatcggcaagaaaggccaacagcccgccagaaaaagactcaattttggtcagactggcgactcagagtcagttccagaccctcaacctctcggagaacctccagcagcgccctctggtgtgggacctaatacaatggctgcaggcggtggcgcaccaatggcagacaataacgaaggcgccgacggagtgggtagttcctcgggaaattggcattgcgattccacatggctgggcgacagagtcatcaccaccagcacccgaacctgggccctgcccacctacaacaaccacctctacaagcaaatctccaacgggacatcgggaggagccaccaacgacaacacctacttcggctacagcaccccctgggggtattttgactttaacagattccactgccacttttcaccacgtgactggcagcgactcatcaacagcaactggggattccggcccaagagactcagcttcaagctcttcaacatccaggtcaaggaggtcacgcagaatgaaggcaccaagaccatcgccaataacctcaccagcaccatccaggtgtttacggactcggagtaccagctgccgtacgttctcggctctgcccaccagggctgcctgcctccgttcccggcggacgtgttcatgattccccagtacggctacctaacactcaacaacggtagtcaggccgtgggacgctcctccttctactgcctggaatactttccttcgcagatgctgagaaccggcaacaacttccagtttacttacaccttcgaggacgtgcctttccacagcagctacgcccacagccagagcttggaccggctgatgaatcctctgattgaccagtacctgtactacttgtctcggactcaaacaacaggaggcacggcaaatacgcagactctgggcttcagccaaggtgggcctaatacaatggccaatcaggcaaagaactggctgccaggaccctgttaccgccaacaacgcgtctcaacgacaaccgggcaaaacaacaatagcaactttgcctggactgctgggaccaaataccatctgaatggaagaaattcattggctaatcctggcatcgctatggcaacacacaaagacgacgaggagcgtttttttcccagtaacgggatcctgatttttggcaaacaaaatgctgccagagacaatgcggattacagcgatgtcatgctcaccagcgaggaagaaatcaaaaccactaaccctgtggctacagaggaatacggtatcgtggcagataacttgcagcagcaaaacacggctcctcaaattggaactgtcaacagccagggggccttacccggtatggtctggcagaaccgggacgtgtacctgcagggtcccatctgggccaagattcctcacacggacggcaacttccacccgtctccgctgatgggcggctttggcctgaaacatcctccgcctcagatcctgatcaagaacacgcctgtacctgcggatcctccgaccaccttcaaccagtcaaagctgaactctttcatcacgcaatacagcaccggacaggtcagcgtggaaattgaatgggagctgcagaaggaaaacagcaagcgctggaaccccgagatccagtacacctccaactactacaaatctacaagtgtggactttgctgttaatacagaaggcgtgtactctgaaccccgccccattggcacccgttacctcacccgtaatctgtaa

SEQ ID NO: 3971 - DNA, 2217 bp, synthetic construct
  misc_feature 1..2217: note = source = /note="Description of Artificial Sequence: Synthetic polynucleotide"
  source 1..2217: mol_type = other DNA
atggctgccgatggttatcttccagattggctcgaggacaacctctctgagggcattcgcgagtggtgggcgctgaaacctggagccccgaagcccaaagccaaccagcaaaagcaggacgacggccggggtctggtgcttcctggctacaagtacctcggacccttcaacggactcgacaagggggagcccgtcaacgcggcggacgcagcggccctcgagcacgacaaggcctacgaccagcagctgcaggcgggtgacaatccgtacctgcggtataaccacgccgacgccgagtttcaggagcgtctgcaagaagatacgtcttttgggggcaacctcgggcgagcagtcttccaggccaagaagcgggttctcgaacctctcggtctggttgaggagggcgctaagacggctcctggaaagaagagaccggtagagccatcaccccagcgttctccagactcctctacgggcatcggcaagaaaggccaacagcccgccagaaaaagactcaattttggtcagactggcgactcagagtcagttccagaccctcaacctctcggagaacctccagcagcgccctctggtgtgggacctaatacaatggctgcaggcggtggcgcaccaatggcagacaataacgaaggcgccgacggagtgggtagttcctcgggaaattggcattgcgattccacatggctgggcgacagagtcatcaccaccagcacccgaacctgggccctgcccacctacaacaaccacctctacaagcaaatctccaacgggacatcgggaggagccaccaacgacaacacctacttcggctacagcaccccctgggggtattttgactttaacagattccactgccacttttcaccacgtgactggcagcgactcatcaacaacaactggggattccggcccaagagactcagcttcaagctcttcaacatccaggtcaaggaggtcacgcagaatgaaggcaccaagaccatcgccaataacctcaccagcaccatccaggtgtttacggactcggagtaccagctgccgtacgttctcggctctgcccaccagggctgcctgcctccgttcccggcggacgtgttcacgattccccagtacggctacctaacactcaacaacggtagtcaggccgtgggacgctcctccttctactgcctggaatactttccttcgcagatgctgagaaccggcaacaacttccagtttacttacaccttcgaggacgtgcctttccacagcagctacgcccacagccagagcttggaccggctgatgaatcctctgattgaccagtacctgtactacttgtctcggactcaaacaacaggaggcacggcaaatacgcagactctgggcttcagccaaggtgggcctaatacaatggccaatcaggcaaagaactggctgccaggaccctgttaccgccaacaacgcgtctcaacgacaaccgggcaaaacaacaatagcaactttgcctggactgctgggaccaaataccatctgaatggaagaaattcattggctaatcctggcatcgctatggcaacacacaaagacgacgaggagcgtttttttcccagtaacgggatcctgatttttggcaaacaaaatgctgccagagacaatgcggattacagcgatgtcatgctcaccagcgaggaagaaatcaaaaccactaaccctgtggctacagaggaatacggtatcgtggcagataacttgcagcagcaaaacacggctcctcaaattggaactgtcaacagccagggggccttacccggtatggtctggcagaaccgggacgtgtacctgcagggtcccatctgggccaagattcctcacacggacggcaacttccacccgtctccgctgatgggcggctttggcctgaaacatcctccgcctcagatcctgatcaagaacacgcctgtacctgcggatcctccgaccaccttcaaccagtcaaagctgaactctttcatcacgcaatacagcaccggacaggtcagcgtggaaattgaatgggagctgcagaaggaaaacagcaagcgctggaaccccgagatccagtacacctccaactactacaaatctacaagtgtggactttgctgttaatacagaaggcgtgtactctgaaccccgccccattggcacccgttacctcacccgtaatctgtaa

SEQ ID NO: 3972 - DNA, 2217 bp, synthetic construct
  misc_feature 1..2217: note = source = /note="Description of Artificial Sequence: Synthetic polynucleotide"
  source 1..2217: mol_type = other DNA
atggctgccgatggttatcttccagattggctcgaggacaacctctctgagggcattcgcgagtggtgggcgctgaaacctggagccccgaagcccaaagccaaccagcaaaagcaggacgacggccggggtctggtgcttcctggctacaagtacctcggacccttcaacggactcgacaagggggagcccgtcaacgcggcggacgcagcggccctcgagcacgacaaggcctacgaccagcagctgcaggcgggtgacaatccgtacctgcggtataaccacgccgacgccgagtttcaggagcgtctgcaagaagatacgtcttttgggggcaacctcgggcgagcagtcttccaggccaagaagcgggttctcgaacctctcggtctggttgaggaaggcgctaagacggctcctggaaagaagagaccggtagagccatcaccccagcgttctccagactcctctacgggcatcggcaagaaaggccaacagcccgccagaaaaagactcaattttggtcagactggcgactcagagtcagttccagaccctcaacctctcggagaacctccagcagcgccctctggtgtgggacctaatacaatggctgcaggcggtggcgcaccaatggcagacaataacgaaggcgccgacggagtgggtagttcctcgggaaattggcattgcgattccacatggctgggcgacagagtcatcaccaccagcacccgaacctgggccctgcccacctacaacaaccacctctacaagcaaatctccaacgggacatcgggaggagccaccaacgacaacacctacttcggctacagcaccccctgggggtattttgactttaacagattccactgccacttttcaccacgtgactggcagcgactcatcgacaacaactggggattccggcccaagagactcagcttcaagctcttcaacatccaggtcaaggaggtcacgcagaatgaaggcaccaagaccatcgccaataacctcaccagcaccatccaggtgtttacggactcggagtaccagctgccgtacgttctcggctctgcccaccagggctgcctgcctccgttcccggcggacgtgttcatgattccccagtacggctacctaacactcaacaacggtagtcaggccgtgggacgctcctccttctactgcctggaatactttccttcgcagatgctgagaaccggcaacaacttccagtttacttacaccttcgaggacgtgcctttccacagcagctacgcccacagccagagcttggaccggctgatgaatcctctgattgaccagtacctgtactacttgtctcggactcaaacaacaggaggcacggcaaatacgcagactctgggcttcagccaaggtgggcctaatacaatggccaatcaggcaaagaactggctgccaggaccctgttaccgccaacaacgcgtctcaacgacaaccgggcaaaacaacaatagcaactttgcctggactgctgggaccaaataccatctgaatggaagaaattcattggctaatcctggcatcgctatggcaacacacaaagacgacgaggagcgtttttttcccagtaacgggatcctgatttttggcaaacaaaatgctgccagagacaatgcggattacagcgatgtcatgctcaccagcgaggaagaaatcaaaaccactaaccctgtggctacagaggaatacggtatcgtggcagataacttgcagcagcaaaacacggctcctcaaattggaactgtcaacagccagggggccttacccggtatggtctggcagaaccgggacgtgtacctgcagggtcccatctgggccaagattcctcacacggacggcaacttccacccgtctccgctgatgggcggctttggcctgaaacatcctccgcctcagatcctgatcaagaacacgcctgtacctgcggatcctccgaccaccttcaaccagtcaaagctgaactctttcatcacgcaatacagcaccggacaggtcagcgtggaaattgaatgggagctgcagaaggaaaacagcaagcgctggaaccccgagatccagtacacctccaactactacaaatctacaagtgtggactttgctgttaatacagaaggcgtgtactctgaaccccgccccattggcacccgttacctcacccgtaatctgtaa

SEQ ID NO: 3973 - DNA, 2217 bp, synthetic construct
  misc_feature 1..2217: note = source = /note="Description of Artificial Sequence: Synthetic polynucleotide"
  source 1..2217: mol_type = other DNA
atggctgccgatggttatcttccagattggctcgaggacaacctctctgagggcattcgcgagtggtgggcgctgaaacctggagccccgaagcccaaagccaaccagcaaaagcaggacgacggccggggtctggtgcttcctggctacaagtacctcggacccttcaacggactcgacaagggggagcccgtcaacgcggcggacgcagcggccctcgagcacgacaaggcctacgaccagcagctgcaggcgggtgacaatccgtacctgcggtataaccacgccgacgccgagtttcaggagcgtctgcaagaagatacgtcttttgggggcaacctcgggcgagcagtcttccaggccaagaagcgggttctcgaacctctcggtctggttgaggaaggcgctaagacggctcctggaaagaagagaccggtagagccatcaccccagcgttctccagactcctctacgggcatcggcaagaaaggccaacagcccgccagaaaaagactcaattttggtcagactggcgactcagagtcagttccagaccctcaacctctcggagaacctccagcagcgccctctggtgtgggacctaatacaatggctgcaggcggtggcgcaccaatggcagacaataacgaaggcgccgacggagtgggtagttcctcgggaaattggcattgcgattccacatggctgggcgacagagtcatcaccaccagcacccgaacctgggccctgcccgcctacaacaaccacctctacaagcaaatctccaacgggacatcgggaggagccaccaacgacaacacctacttcggctacagcaccccctgggggtattttgactttaacagattccactgccacttttcaccacgtgactggcagcgactcatcaacaacaactggggattccggcccaagagactcagcttcaagctcttcaacatccaggtcaaggaggtcacgcagaatgaaggcaccaagaccatcgccaataacctcaccagcaccatccaggtgtttacggactcggagtaccagctgccgtacgttctcggctctgcccaccagggctgcctgcctccgttcccggcggacgtgttcacgattccccagtacggctacctaacactcaacaacggtagtcaggccgtgggacgctcctccttctactgcctggaatactttccttcgcagatgctgagaaccggcaacaacttccagtttacttacaccttcgaggacgtgcctttccacagcagctacgcccacagccagagcttggaccggctgatgaatcctctgattgaccagtacctgtactacttgtctcggactcaaacaacaggaggcacggcaaatacgcagactctgggcttcagccaaggtgggcctaatacaatggccaatcaggcaaagaactggctgccaggaccctgttaccgccaacaacgcgtctcaacgacaaccgggcaaaacaacaatagcaactttgcctggactgctgggaccaaataccatctgaatggaagaaattcattggctaatcctggcatcgctatggcaacacacaaagacgacgaggagcgtttttttcccagtaacgggatcctgatttttggcaaacaaaatgctgccagagacaatgcggattacagcgatgtcatgctcaccagcgaggaagaaatcaaaaccactaaccctgtggctacagaggaatacggtatcgtggcagataacttgcagcagcaaaacacggctcctcaaattggaactgtcaacagccagggggccttacccggtatggtctggcagaaccgggacgtgtacctgcagggtcccatctgggccaagattccacacacggacggcaacttccacccgtctccgctgatgggcggctttggcctgaaacatcctccgcctcagatcctgatcaagaacacgcctgtacctgcggatcctccgaccaccttcaaccagtcaaagctgaactctttcatcacgcaatacagcaccggacaggtcagcgtggaaattgaatgggagctgcagaaggaaaacagcaagcgctggaaccccgagatccagtacacctccaactactacaaatctacaaatgtggactttgctgttaatacagaaggcgtgtactctgaaccccgccccattggcacccgttacctcacccgtaatctgtaa

SEQ ID NO: 3974 - DNA, 2217 bp, synthetic construct
  misc_feature 1..2217: note = source = /note="Description of Artificial Sequence: Synthetic polynucleotide"
  source 1..2217: mol_type = other DNA
atggctgccgatggttatcttccagattggctcgaggacaacctctctgagggcattcgcgagtggtgggcgctgaaacctggagccccgaagcccaaagccaaccagcaaaagcaggacgacggccggggtctggtgcttcctggctacaagtacctcggacccttcaacggactcgacaagggggagcccgtcaacgcggcggacgcagcggccctcgagcacgacaaggcctacgaccagcagctgcaggcgggtgacaatccgtacctgcggtataaccacgccgacgccgagtttcaggagcgtctgcaagaagatacgtcttttgggggcaacctcgggcgagcagtcttccaggccaagaagcgggttctcgaacctctcggtctggttgaggaaggcgctaagacggctcctggaaagaagagaccggtagagccatcaccccagcgttctccagactcctctacgggcatcggcaagaaaggccaacagcccgccagaaaaagactcaattttggtcagactggcgactcagagtcagttccagaccctcaacctctcggagaacctccagcagcgccctctggtgtgggacctaatacaatggctgcaggcggtggcgcaccaatggcagacaataacgaaggcgccgacggagtgggtagttcctcgggaaattggcattgcgattccacatggctgggcgacagagtcatcaccaccagcacccgaacctgggccctgcccacctacaacaaccacctctacaagcaaatctccaacgggacatcgggaggagccaccaacgacaacacctacttcggctacagcaccccctgggggtattttgactttaacagattccactgccacttttcaccacgtgactggcagcgactcatcaacaacaactggggattccggcccaagagactcagcttcaagctcttcaacatccaggtcaaggaggtcacgcagaatgaaggcaccaagaccatcgccaataacctcaccagcaccatccaggtgtttacggactcggagtaccagctgccgtacgttctcggctctgcccaccagggctgcctgcctccgttcccggcggacgtgttcatgattccccagtacggctacctaacactcaacgacggtagtcaggccgtgggacgctcctccttctactgcctggaatactttccttcgcagatgctgagaaccggcaacaacttccagtttacttacaccttcgaggacgtgcctttccacagcagctacgcccacagccagagcttggaccggctgatgaatcctctgattgaccagtacctgtactacttgtctcggactcaaacaacaggaggcacggcaaatacgcagactctgggcttcagccaaggtgggcctaatacaatggccaatcaggcaaagaactggctgccaggaccctgttaccgccaacaacgcgtctcaacgacaaccgggcaaaacaacaatagcaactttgcctggactgctgggaccaaataccatctgaatggaagaaattcattggctaatcctggcatcgctatggcaacacacaaagacgacgaggagcgtttttttcccagtaacgggatcctgatttttggcaaacaaaatgctgccagagacaatgcggattacagcgatgtcatgctcaccagcgaggaagaaatcaaaaccactaaccctgtggctacagaggaatacggtatcgtggcagataacttgcagcagcaaaacacggctcctcaaattggaactgtcaacagccagggggccttacccggtatggtctggcagaaccgggacgtgtacctgcagggtcccatctgggccaagattcctcacacggacggcaacttccacccgtctccgctgatgggcggctttggcctgaaacatcctccgcctcagatcctgatcaagaacacgcctgtacctgcggatcctccgaccaccttcaaccagtcaaagctgaactctttcatcacgcaatacagcaccggacaggtcagcgtggaaattgaatgggagctgcagaaggaaaacagcaagcgctggaaccccgagatccagtacacctccaactactacaaatctacaagtgtggactttgctgttaatacagaaggcgtgtactctgaaccccgccccattggcacccgttacctcacccgtaatctgtaa

SEQ ID NO: 3975 - DNA, 2217 bp, synthetic construct
  misc_feature 1..2217: note = source = /note="Description of Artificial Sequence: Synthetic polynucleotide"
  source 1..2217: mol_type = other DNA
atggctgccgatggttatcttccagattggctcgaggacaacctctctgagggcattcgcgagtggtgggcgctgaaacctggagccccgaagcccaaagccaaccagcaaaagcaggacgacggccggggtctggtgcttcctggctacaagtacctcggacccttcaacggactcgacaagggggagcccgtcaacgcggcggacgcagcggccctcgagcacgacaaggcctacgaccagcagctgcaggcgggtgacaatccgtacctgcggtataaccacgccgacgccgagtttcaggagcgtctgcaagaagatacgtcttttgggggcaacctcgggcgagcagtcttccaggccaagaagcgggttctcgaacctctcggtctggttgaggaaggcgctaagacggctcctggaaagaagagaccggtagagccatcaccccagcgttctccagactcctctacgggcatcggcaagaaaggccaacagcccgccagaaaaagactcaattttggtcagactggcgactcagagtcagttccagaccctcaacctctcggagaacctccagcagcgccctctggtgtgggacctaatacaatggctgcaggcggtggcgcaccaatggcagacaataacgaaggcgccgacggagtgggtagttcctcgggaaattggcattgcgattccacatggctgggcgacagagtcatcaccaccagcacccgaacctgggcccagcccacctacaacaaccacctctacaagcaaatctccaacgggacatcgggaggagccaccaacgacaacacctacttcggctacagcaccccctgggggtattttgactttaacagattccactgccacttttcaccacgtgactggcagcgactcatcaacaacaactggggattccggcccaagagactcagcttcaagctcttcaacatccaggtcaaggaggtcacgcagaatgaaggcaccaagaccatcgccaataacctcaccagcaccatccaggtgtttacggactcggagtaccagctgccgtacgttctcggctctgcccaccagggctgcctgcctccgttcccggcggacgtgttcatgattccccagtacggctacctaacactcaacaacggtagtcaggccgtgggacgctcctccttctactgcctggaatactttccttcgcagatgctgagaaccggcaacaacttccagtttacttacaccttcgaggacgtgcctttccacagcagctacgcccacagccagagcttggaccggctgatgaatcctctgattgaccagtacctgtactacttgtctcggactcaaacaacaggaggcacggcaaatacgcagactctgggcttcagccaaggtgggcctaatacaatggccaatcaggcaaagaactggctgccaggaccctgttaccgccaacaacgcgtctcaacgacaaccgggcaaaacaacaatagcaactttgcctggactgctgggaccaaataccatctgaatggaagaaattcattggctaatcctggcatcgctatggcaacacacaaagacgacgaggagcgtttttttcccagtaacgggatcctgatttttggcaaacaaaatgctgccagagacaatgcggattacagcgatgtcatgctcaccagcgaggaagaaatcaaaaccactaaccctgtggctacagaggaatacggtatcgtggcagataacttgcagcagcaaaacacggctcctcaaattggaactgtcaacagccagggggccttacccggtatggtctggcagaaccgggacgtgtacctgcagggtcccatctgggccaagattcctcacacggacggcaacttccacccgtctccgctgatgggcggctttggcctgaaacatcctccgcctcagatcctgatcaagaacacgcctgtacctgcggatcctccgaccaccttcaaccagtcaaagctgaactctttcatcacgcaatacagcaccggacaggtcagcgtggaaattgaatgggagctgcagaaggaaaacagcaagcgctggaaccccgagatccagtacacctccaactactacaaatctacaagtgtggactttgctgttaatacagaaggcgtgtactctgaaccccgccccattggcacccgttacctcacccgtaatctgtaa

SEQ ID NO: 3976 - DNA, 2208 bp, synthetic construct
  misc_feature 1..2208: note = source = /note="Description of Artificial Sequence: Synthetic polynucleotide"
  source 1..2208: mol_type = other DNA
atggctgccgatggttatcttccagattggctcgaggacactctctctgaaggaataagacagtggtggaagctcaaacctggcccaccaccgccaaagcccgcagagcggcataaggacgacagcaggggtcttgtgcttcctgggtacaagtacctcggacccttcaacggactcgacaaaggagagccggtcaacgaggcagacgccgcggccctcgagcacgacaaggcctacgaccggcagctcgacagcggagacaacccgtacctcaagtacaaccacgccgacgcggagtttcaggagcgccttaaagaagatacgtcttttgggggcaacctcggacgagcagtcttccaggcgaaaaagagggttcttgaacctctgggcctggttgaggaacctgttaagacggctccgggaaaaaagaggccggtagagcactctcctgcggagccagactcctcctcgggaaccggaaaggcgggccagcagcctgcgagaaagagattgaatttcggtcagactggagacgcagactccgtacctgacccccagcctctcggacagccaccagcagccccctctggtctgggaactaatacgatggctacaggcagtggcgcaccaatggcagacaataacgagggcgccgacggagtgggtaattcctcgggaaattggcattgcgattccacatggatgggcgacagagtcatcaccaccagcacccgcacctgggctctgcccacctacaacaaccatctgtacaagcaaatttccagccaatcaggagcatcgaacgacaaccactactttggctacagcaccccctgggggtattttgacttcaacagattccactgccacttttcgccacgtgactggcaaagactcatcaacaacaactggggattccggcccaagagactcagcttcaagctctttaacattcaagtcaaggaggtcacgcagaatgacggtacgacgacgattgccaataaccttaccagcacggttcaggtctttactgactcggagtaccagctcccgtacgtcctcggctcggcgcatcaaggatgcctcccgccgtttccagcggacgtcttcatggtcccacagtatggatacctcaccctgaacaacgggagtcaggcggtaggacgctcttccttttactgcctggagtactttccttctcagatgcttcgtactggaaacaactttaccttcagctacacctttgaagacgttcctttccacagcagctacgctcacagccaaagtctggaccgtctcatgaatcctctcatcgaccagtacctgtattacttgagcaaaacaaacgctccaagcggaaccaccacgatgtccaggcttcagttttctcaggccggagcaagtgacattcgggaccagtctagaaactggcttcctggaccctgttaccgccagcagcgagtatcaaagacagctgcggacaacaacaacagtgattactcgtggactggagctaccaagtaccacctcaatggaagagactctctggtgaacccgggcccagctatggccagccacaaggacgatgaagaaaaatattttcctcagagcggggttctcatcttcgggaaacaaggctcaaataaaactaatgtggacattgaaaaggtcatgattacagacgaagaggaaatcaggaccaccaatcccgtggctacggagcagtacggtgctgtatctaccaaccttcaaagcggcaacacacaagcagctacctcagatgtcaacacacaaggcgttcttcctggcatggtctggcaggacagagacgtgtacctgcaggggcccatctgggcaaagattccccacacggatggacactttcacccttctcctcttatgggaggatttggattgaagcaccctcccccacagattctcatcaagaataccccggtacctgcgaatccttctaccaccttcagtgcggcaaagtttgcttctttcatcacacagtactccacagggcaggtcagcgtggagatcgagtgggagctgcagaaagagaacagcaaacgctggaaccccgagattcagtatacctccaactacaacaagtctgttaatgtggactttactgtggacactaatggcgtgtattcagagcctcgccccattggcacaagatacctgactcgtaatctgtaa

SEQ ID NO: 3977 - DNA, 2208 bp, synthetic construct
  misc_feature 1..2208: note = source = /note="Description of Artificial Sequence: Synthetic polynucleotide"
  source 1..2208: mol_type = other DNA
atggctgccgatggttatcttccagattggctcgaggacactctctctgaaggaataagacagtggtggaagctcaaacctggcccaccaccgccaaagcccgcagagcggcataaggacgacagcaggggtcttgtgcttcctgggtacaagtacctcggacccttcaacggactcgacaaaggagagccggtcaacgaggcagacgccgcggccctcgagcacgacaaggcctacgaccggcagctcgacagcggagacaacccgtacctcaagtacaaccacgccgacgcggagtttcaggagcgccttaaagaagatacgtcttttgggggcaacctcggacgagcagtcttccaggcgaaaaagagggttcttgaacctctgggcctggttgaggaacctgttaagacggctccgggaaaaaagaggccggtagagcactctcctgcggagccagactcctcctcgggaaccggaaaggcgggccagcagcctgcgagaaagagattgaatttcggtcagactggagacgcagactccgtacctgacccccagcctctcggacagccaccagcagccccctctggtctgggaactaatacgatggctacaggcagtggcgcaccaatggcagacaataacgagggcgccgacggagtgggtaattcctcgggaaattggcattgcgattccacatggatgggcgacagagtcatcaccaccagcacccgcacctgggctctgcccacctacaacaaccatctgtacaagcaaatttccagccaatcaggagcatcgaacgacaaccactactttggctacagcaccccctgggggtattttgacttcaacagattccactgccacttttcgccacgtgactggcaaagactcatcaacaacaactggggattccggcccaagagactcagcttcaagctctttaacattcaagtcaaggaggtcacgcagaatgacggtacgacgacgattgccaataaccttaccagcacggttcaggtctttactgactcggagtaccagctcccgtacgtcctcggctcggcgcatcaaggatgcctcccgccgtttccagcggacgtcttcatggtcccacagtatggatacctcaccctgaacaacgggagtcaggcggtaggacgctcttccttttactgcctggagtactttccttctcagatgcttcgtactggaaacaactttaccttcagctacacctttgaagacgttcctttccacagcagctacgctcacagccaaagtctggaccgtctcatgaatcctctcatcgaccagtacctgtattacttgagcaaaacaaacgctccaagcggaaccaccacgatgtccaggcttcagttttctcaggccggagcaagtgacattcgggaccagtctagaaactggcttcctggaccctgttaccgccagcagcgagtatcaaagacagctgcggacaacaacaacagtgattactcgtggactggagctaccaagtaccacctcaatggaagagactctctggtgaacccgggcccagctatggccagccacaaggacgatgaagaaaaaatatttcctcagagcggggttctcatcttcgggaaacaaggctcaaataaaactaatgtggacattgaaaaggtcatgattacagacgaagaggaaatcaggaccaccaatcccgtggctacggagcagtacggtgctgtatctaccaaccttcaaagcggcaacacacaagcagctacctcagatgtcaacacacaaggcgttcttcctggcatggtctggcaggacagagacgtgtacctgcaggggcccatctgggcaaagattccccacacggatggacactttcacccttctcctcttatgggaggatttggattgaagcaccctcccccacagattctcatcaagaataccccggtacctgcgaatccttctaccaccttcagtgcggcaaagtttgcttctttcatcacacagtactccacagggcaggtcagcgtggagatcgagtgggagctgcagaaagagaacagcaaacgctggaaccccgagattcagtatacctccaactacaacaagtctgttaatgtggactttactgtggacactaatggcgtgtattcagagcctcgccccattggcacaagatacctgactcgtaatctgtaa

SEQ ID NO: 3978 - DNA, 2208 bp, synthetic construct
  misc_feature 1..2208: note = source = /note="Description of Artificial Sequence: Synthetic polynucleotide"
  source 1..2208: mol_type = other DNA
atggctgccgatggttatcttccagattggctcgaggacactctctctgaaggaataagacagtggtggaagctcaaacctggcccaccaccgccaaagcccgcagagcggcataaggacgacagcaggggtcttgtgcttcctgggtacaagtacctcggacccttcaacggactcgacaaaggagagccggtcaacgaggcagacgccgcggccctcgagcacgacaaggcctacgaccggcagctcgacagcggagacaacccgtacctcaagtacaaccacgccgacgcggagtttcaggagcgccttaaagaagatacgtcttttgggggcaacctcggacgagcagtcttccaggcgaaaaagagggttcttgaacctctgggcctggttgaggaacctgttaagacggctccgggaaaaaagaggccggtagagcactctcctgcggagccagactcctcctcgggaaccggaaaggcgggccagcagcctgcgagaaagagattgaatttcggtcagactggagacgcagactccgtacctgacccccagcctctcggacagccaccagcagccccctctggtctgggaactaatacgatggctacaggcagtggcgcaccaatggcagacaataacgagggcgccgacggagtgggtaattcctcgggaaattggcattgcgattccacatggatgggcgacagagtcatcaccaccagcacccgcacctgggctctgcccacctacaacaaccatctgtacaagcaaatttccagccaatcaggagcatcgaacgacaaccactactttggctacagcaccccctgggggtattttgacttcaacagattccactgccacttttcgccacgtgactggcaaagactcatcaacaacaactggggattccggcccaagagactcagcttcaagctctttaacattcaagtcaaggaggtcacgcagaatgacggtacgacgacgattgccaataaccttaccagcacggttcaggtctttactgactcggagtaccagctcccgtacgccctcggctcggcgcatcaaggatgcctcccgccgtttccagcggacgtcttcatggtcccacagtatggatacctcaccctgaacaacgggagtcaggcggtaggacgctcttccttttactgcctggagtactttccttctcagatgcttcgtactggaaacaactttaccttcagctacacctttgaagacgttcctttccacagcagctacgctcacagccaaagtctggaccgtctcatgaatcctctcatcgaccagtacctgtattacttgagcaaaacaaacgctccaagcggaaccaccacgatgtccaggcttcagttttctcaggccggagcaagtgacattcgggaccagtctagaaactggcttcctggaccctgttaccgccagcagcgagtatcaaagacagctgcggacaacaacaacagtgattactcgtggactggagctaccaagtaccaccccaatggaagagactctctggtgaacccgggcccagctatggccagccacaaggacgatgaagaaaaatattttcctcagagcggggttctcatcttcgggaaacaaggctcaaataaaactaatgtggacattgaaaaggtcatgattacagacgaagaggaaatcaggaccaccaatcccgtggctacggagcagtacggtgctgtatctaccaaccttcaaagcggcaacacacaagcagctacctcagatgtcaacacacaaggcgttcttcctggcatggtctggcaggacagagacgtgtacctgcaggggcccatctgggcaaagattccccacacggatggacactctcacccttctcctcttatgggaggatttggattgaagcaccctcccccacagattctcatcaagaataccccggtacctgcgaatccttctaccaccttcagtgcggcaaagtttgcttctttcatcacacagtactccacagggcaggtcagcgtggagatcgagtgggagctgcagaaagagaacagcaaacgctggaaccccgagattcagtatacctccaactacaacaagtctgttaatgtggactttactgtggacactaatggcgtgtattcagagcctcgccccattggcacaagatacctgactcgtaatctgtaa

SEQ ID NO: 3979 - DNA, 2205 bp, synthetic construct
  misc_feature 1..2205: note = source = /note="Description of Artificial Sequence: Synthetic polynucleotide"
  source 1..2205: mol_type = other DNA
atggctgccgatggttatcttccagattggctcgaggacactctctctgaaggaataagacagtggtggaagctcaaacctggcccaccaccgccaaagcccgcagagcggcataaggacgacagcaggggtcttgtgcttcctgggtacaagtacctcggacccttcaacggactcgacaaaggagagccggtcaacgaggcagacgccgcggccctcgagcacgacaaggcctacgaccggcagctcgacagcggagacaacccgtacctcaagtacaaccacgccgacgcggagtttcaggagcgccttaaagaagatacgtcttttgggggcaacctcggacgagcagtcttccaggcgaaaaagagggttcttgaacctctgggcctggttgaggaacctgttaagacggctccgggaaaaaagaggccggtagagcactctcctgcggagccagactcctcctcgggaaccggaaaggcgggccagcagcctgcgagaaagagattgaatttcggtcagactggagacgcagactccgtacctgacccccagcctctcggacagccaccagcagccccctctggtctgggaactaatacgatggctacaggcagtggcgcaccaatggcagacaataacgagggcgccgacggagtgggtaattcctcgggaaattggcattgcgattccacatggatgggcgacagagtcatcaccaccagcacccgcacctgggctctgcccacctacaacaaccatctgtacaagcaaatttccagccaatcaggagcatcgaacgacaaccactactttggctacagcaccccctgggggtattttgacttcaacagattccactgccacttttcgccacgtgactggcaaagactcatcaacaacaactggggattccggcccaagagactcagcttcaagctctttaacattcaagtcaaggaggtcacgcagaatgacggtacgacgacgattgccaataaccttaccagcacggttcaggtctttactgactcggagtaccagctcccgtacgtcctcggctcggcgcatcaaggatgcctcccgccgtttccagcggacgtcttcatggtcccacagtatggatacctcaccctgaacaacgggagtcaggcggtaggacgctcttccttttactgcctggagtactttccttctcagatgcttcgtactggaaacaactttaccttcagctacacctttgaagacgttcctttccacagcagctacgctcacagccaaagtctggaccgtctcatgaatcctctcatcgaccagtacctgtattacttgagcaaaacaaacgctccaagcggaaccaccacgatgtccaggcttcagttttctcaggccggagcaagtgacattcgggaccagtctagaaactggcttcctggaccctgttaccgccagcagcgagtatcaaagacagctgcggacaacaacagtgattactcgtggactggagctaccaagtaccacctcaatggaagagactctctggtgaacccgggcccagctatggccagccacaaggacgatgaagaaaaatattttcctcagagcggggttctcatcttcgggaaacaaggctcaaataaaactaatgtggacattgaaaaggtcatgattacagacgaagaggaaatcaggaccaccaatcccgtggctacggagcagtacggtgctgtatctaccaaccttcaaagcggcaacacacaagcagctacctcagatgtcaacacacaaggcgttcttcctggcatggtctggcaggacagagacgtgtacctgcaggggcccatctgggcaaagattccccacacggatggacactttcacccttctcctcttatgggaggatttggattgaagcaccctcccccacagattctcatcaagaataccccggtacctgcgaatccttctaccaccttcagtgcggcaaagtttgcttctttcatcacacagtactccacagggcaggtcagcgtggagatcgagtgggagctgcagaaagagaacagcaaacgctggaaccccgagattcagtatacctccaactacaacaagtctgttaatgtggactttactgtggacactaatggcgtgtattcagagcctcgccccattggcacaagatacctgactcgtaatctgtaa

SEQ ID NO: 3980 - DNA, 2208 bp, synthetic construct
  misc_feature 1..2208: note = source = /note="Description of Artificial Sequence: Synthetic polynucleotide"
  source 1..2208: mol_type = other DNA
atggctgccgatggttatcttccagattggctcgaggacactctctctgaaggaataagacagtggtggaagctcaaacctggcccaccaccgccaaagcccgcagagcggcataaggacgacagcaggggtcttgtgcttcctgggtacaagtacctcggacccttcaacggactcgacaaaggagagccggtcaacgaggcagacgccgcggccctcgagcacgacaaggcctacgaccggcagctcgacagcggagacaacccgtacctcaagtacaaccacgccgacgcggagtttcaggagcgccttaaagaagatacgtcttttgggggcaacctcgcaagagcagtattccaggcgaaaaagagggttcttgaacctctgggcctggttgaggagcctgttaagacggctccgggaaaaaagaggccggtagagcactctcctgcggagccagattcctcctccggaactggaaagtcgggccaacagcctgcaagaaagagattgaattttggtcagactggagacgcagactccgtacctgacccccagcctctcggacagccaccagcagccccctctggtctgggaactaatacgatggcttcaggcagtggcgcaccaatggcagacaataacgagggcgccgacggagtgggtaattcctcgggaaattggcattgcgattccacatggatgggcgacagagtcatcaccaccagcacccgcacctgggctctgcccacctacaacaaccatctgtacaagcaaatttccagccagtctggagccagcaacgacaaccactactttggctacagcaccccttgggggtattttgacttcaacagattccactgccacttctccccacgtgactggcaaagactcatcaacaacaattggggattccggcccaaaagactcaacttcaagctctttaacattcaagtcaaggaggtcacgcagaatgacggtacgacgacgattgccaataaccttaccagcacggttcaggtgtttactgactcggagtaccagctcccgtacgtcctcggctcggcgcatcaaggatgcctcccgccgttcccagcagacgtcttcatggtgccacagtatggatacctcaccctgaacaacgggagtcaggcggtaggacgctcttcattttactgcctggagtactttccttctcagatgctgcgtaccggaaacaactttaccttcagctacacctttgaggacgttccttttcacagcagctacgctcacagccagagtttggaccgtctcatgaatcctctcatcgaccagtacctgtattacttgagcagaacaaacactccaagcggaaccactacgcagtccaggcttcagttttctcaagccggagcgagtgacattcgggaccagtctaggaactggcttcctggaccctgttaccgccagcagcgagtatcaaagacagctgcggacaacaacaacagtgattactcgtggactggagctaccaagtatcacctcaatggaagagactctctggtgaatccgggcacagccatggccagccacaaggacgatgaagaaaagtattttcctcagagcggggttctcatcttcggaaaacaagactcgggaaaaactaatgtggacattgaaaaggtcatgattacagacgaagaggaaatcaggaccaccaatcccgtggctacggagcagtatggttctgtatctaccaatctccagagcggcaacacacaagcagctacctcagatgtcaacacacaaggcgttcttccaggcatggtctggcaggacagagacgtgtacctgcagggacccatctgggcaaagattccacacacggacggacattttcacccttctcctcttatgggaggatttggactgaagcaccctcccccgcagattctcatcaagaataccccggtacctgcgaatccttctaccaccttcagcgcggcaaagtttgcttccttcatcacacagtactccacggggcaggtcagcgtggagatcgagtgggagctgcagaaagagaacagcaaacgctggaaccccgagatccagtatacctccaactacaacaagtctgttaatgtggactttactgtggacactaatggcgtgtattcagagcctcgccccattggcacaagatacctgactcgtaatctgtaa

SEQ ID NO: 3981 - DNA, 2208 bp, synthetic construct
  misc_feature 1..2208: note = source = /note="Description of Artificial Sequence: Synthetic polynucleotide"
  source 1..2208: mol_type = other DNA
atggctgccgatggttatcttccagattggctcgaggacactctctctgaaggaataagacagtggtggaagctcaaacctggcccaccaccgccaaagcccgcagagcggcataaggacgacagcaggggtcttgtgcttcctgggtacaagtacctcggacccttcaacggactcgacaaaggagagccggtcaacgaggcagacgccgcggccctcgagcacgacaaggcctacgaccggcagctcgacagcggagacaacccgtacctcaagtacaaccacgccgacgcggagtttcaggagcgccttaaagaagatacgtcttttgggggcaacctcgcaagagcagtattccaggcgaaaaagagggttcttgaacctctgggcctggttgaggagcctgttaagacggctccgggaaaaaagaggccggtagagcactctcctgcggagccagattcctcctccggaactggaaagtcgggccaacagcctgcaagaaagagattgaattttggtcagactggagacgcagactccgtacctgacccccagcctctcggacagccaccagcagccccctctggtctgggaactaatacgatggcttcaggcagtggcgcaccaatggcagacaataacgagggcgccgacggagtgggtaattcctcgggaaattggcattgcgattccacatggatgggcgacagagtcatcaccaccagcacccgcacctgggctctgcccacctacaacaaccatctgtacaagcaaatttccagccagtctggagccagcaacgacaaccactactttggctacagcaccccttgggggtattttgacttcaacagattccactgccacttctccccacgtgactggcaaagactcatcaacaacaattggggattccggcccaaaagactcaacttcaagctctttaacattcaagtcaaggaggtcacgcagaatgacggtacgacgacgattgccaataaccttaccagcacggttcaggtgtttactgactcggagtaccagctcccgtacgtcctcggctcggcgcatcaaggatgcctcccgccgttcccagcagacgtcttcatggtgccacagtatggatacctcaccctgaacaacgggagtcaggcggtaggacgctcttcattttactgcctggagtactttccttctcagatgctgcgtaccggaaacaactttaccttcagctacacctttgaggacgttccttttcacagcagctacgctcacagccagagtttggaccgtctcatgaatcctctcatcgaccagtacctgtattacttgagcagaacaaacactccaagcggaaccactacgcagtccaggcttcagttttctcaagccggagcgagtgacattcgggaccagtctaggaactggcttcctggaccctgttaccgccagcagcgagtatcaaagacagctgcggacaacaacaacagtgattactcgtggactggagctaccaagtatcacctcaatggaagagactctctggtgaatccgggcacagccatggccagccacaaggacgatgaagaaaagtattttcctcagagcggggttctcatcttccggaaacaagactcgggaaaaactaatgtggacattgaaaaggtcatgattacagacgaagaggaaatcaggaccaccaatcccgtggctacggagcagtatggttctgtatctaccaatctccagagcggcaacacacaagcagctacctcagatgtcaacacacaaggcgttcttccaggcatggtctggcaggacagagacgtgtacctgcagggacccatctgggcaaagattccacacacggacggacattttcacccttctcctcttatgggaggattgggacagaagcaccctcccccgcagagtctcatcaagaataccccggtacctgcgaatccttctaccaccttcagcgcggcaaagtttgcttccttcatcacacagtactccacggggcaggtcagcgtggagatcgagtgggagctgcagaaagagaacagcaaacgctggaaccccgagatccagtatacctccaactacaacaagtctgttaatgtggactttactgtggacactaatggcgtgtattcagagcctcgccccattggcacaagatacctgactcgtaatctgtaa

SEQ ID NO: 3982 - DNA, 2208 bp, synthetic construct
  misc_feature 1..2208: note = source = /note="Description of Artificial Sequence: Synthetic polynucleotide"
  source 1..2208: mol_type = other DNA
atggctgccgatggttatcttccagattggctcgaggacactctctctgaaggaataagacagtggtggaagctcaaacctggcccaccaccgccaaagcccgcagagcggcataaggacgacagcaggggtcttgtgcttcctgggtacaagtacctcggacccttcaacggactcgacaaaggagagccggtcaacgaggcagacgccgcggccctcgagcacgacaaggcctacgaccggcagctcgacagcggagacaacccgtacctcaagtacaaccacgccgacgcggagtttcaggagcgccttaaagaagatacgtcttttgggggcaacctcgcaagagcagtattccaggcgaaaaagagggttcttgaacctctgggcctggttgaggagcctgttaagacggctccgggaaaaaagaggccggtagagcactctcctgcggagccagattcctcctccggaactggaaagtcgggccaacagcctgcaagaaagagattgaattttggtcagactggagacgcagactccgtacctgacccccagcctctcggacagccaccagcagccccctctggtctgggaactaatacgatggcttcaggcagtggcgcaccaatggcagacaataacgagggcgccgacggagtgggtaattcctcgggaaattggcattgcgattccacatggatgggcgacagagtcatcaccaccagcacccgcacctgggctctgcccacctacaacaaccatctgtacaagcaaatttccagccagtctggagccagcaacgacaaccactactttggctacagcaccccttgggggtattttgacttcaacagattccactgccacttctccccacgtgactggcaaagactcatcaacaacaattggggattccggcccaaaagactcaacttcaagctctttaacattcaagtcaaggaggtcacgcagaatgacggtacgacgacgattgccaataaccttaccagcacggttcaggtgtttactgactcggagtaccagctcccgtacgtcctcggctcggcgcatcaaggatgcctcccgccgttcccagcagacgtcttcatggtgccacagtatggatacctcaccctgaacaacgggagtcaggcggtaggacgctcttcattttactgcctggagtactttccttctcagatgctgcgtaccggaaacaactttaccttcagctacacctttgaggacgttccttttcacagcagctacgctcacagccagagtttggaccgtctcatgaatcctctcatcgaccagtacctgtattacttgagcagaacaaacactccaagcggaaccactacgcagtccaggcttcagttttctcaagccggagcgagtgacattcgggaccagtctaggaactggcttcctggaccctgttaccgccagcagcgagtatcaaagacagctgcggacaacaacaacagtgattactcgtggactggagctaccaagtatcacctcaatggaagagactctctggtgaatccgggcacagccatggccagccacaaggacgatgaagaaaagtattttcctcagagcggggttctcatcttcggaaaacaagactcgggaaaaactaatgtggacattgaaaaggtcatgattacagacgaagaggaaatcaggaccaccaatcccgtggctacggagcagtatggttctgtatctaccaatctccagagcggcaacacacaagcagctacctcagatgtcaacacacaaggcgttcttccaggcatggtctggcaggacagagacgtgtacctgcagggacccatctgggcaaagattccacacacggacggacattttcacccttctcctcttatgggaggattgggacagaagcaccctcccccgcagattctcatcaagaataccccggtacctgcgaatccttctaccaccttcagcgcggcaaagtttgcttccttcatcacacagtactccacggggcaggtcagcgtggagatcgagtgggagctgcagaaagagaacagcaaacgctggaaccccgagatccagtatacctccaactacaacaagtctgttaatgtggactttactgtggacactaatggcgtgtattcagagcctcgccccattggcacaagatacctgactcgtaatctgtaa

SEQ ID NO: 3983 - DNA, 2208 bp, synthetic construct
  misc_feature 1..2208: note = source = /note="Description of Artificial Sequence: Synthetic polynucleotide"
  source 1..2208: mol_type = other DNA
atggctgccgatggttatcttccagattggctcgaggacactctctctgaaggaataagacagtggtggaagctcaaacctggcccaccaccgccaaagcccgcagagcggcataaggacgacagcaggggtcttgtgcttcctgggtacaagtacctcggacccttcaacggactcgacaaaggagagccggtcaacgaggcagacgccgcggccctcgagcacgacaaggcctacgaccggcagctcgacagcggagacaacccgtacctcaagtacaaccacgccgacgcggagtttcaggagcgccttaaagaagatacgtcttttgggggcaacctcgcaagagcagtattccaggcgaaaaagagggttcttgaacctctgggcctggttgaggagcctgttaagacggctccgggaaaaaagaggccggtagagcactctcctgcggagccagattcctcctccggaactggaaagtcgggccaacagcctgcaagaaagagattgaattttggtcagactggagacgcagactccgtacctgacccccagcctctcggacagccaccagcagccccctctggtctgggaactaatacgatggcttcaggcagtggcgcaccaatggcagacaataacgagggcgccgacggagtgggtaattcctcgggaaattggcattgcgattccacatggatgggcgacagagtcatcaccaccagcacccgcacctgggctctgcccacctacaacaaccatctgtacaagcaaatttccagccagtctggagccagcaacgacaaccactactttggctacagcaccccttgggggtattttgacttcaacagattccactgccacttctccccacgtgactggcaaagactcatcaacaacaattggggattccggcccaaaagactcaacttcaagctctttaacattcaagtcaaggaggtcacgcagaatgacggtacgacgacgattgccaataaccttaccagcacggttcaggtgtttactgactcggagtaccagctcccgtacgtcctcggctcggcgcatcaaggatgcctcccgccgttcccagcagacgtcttcatggtgccacggtatggatacctcaccctgaacaacgggagtcaggcggtaggacgctcttcattttactgcctggagtactttccttctcagatgctgcgtaccggaaacaactttaccttcagctacacctttgaggacgttccttttcacagcagctacgctcacagccagagtttggaccgtctcatgaatcctctcatcgaccagtacctgtattacttgagcagaacaaacactccaagcggaaccactacgcagtccaggcttcagttttctcaagccggagcgagtgacattcgggaccagtctaggaactggcttcctggaccctgttaccgccagcagcgagtatcaaagacagctgcggacaacaacaacagtgattactcgtggactggagctaccaagtatcacctcaatggaagagactctctggtgaatccgggcacagccatggccagccacaaggacgatgaagaaaagtattttcctcagagcggggttctcatcttccggaaacaagactcgggaaaaactaatgtggacattgaaaaggtcatgattacagacgaagaggaaatcaggaccaccaatcccgtggctacggagcagtatggttctgtatctaccaatctccagagcggcaacacacaagcagctacctcagatgtcaacacacaaggcgttcttccaggcatggtctggcaggacagagacgtgtacctgcagggacccatctgggcaaagattccacacacggacggacattttcacccttctcctcttatgggaggatttggactgaagcaccctcccccgcagattctcatcaagaataccccggtacctgcgaatccttctaccaccttcagcgcggcaaagtttgcttccttcatcacacagtactccacggggcaggtcagcgtggagatcgagtgggagctgcagaaagagaacagcaaacgctggaaccccgagatccagtatacctccaactacaacaagtctgttaatgtggactttactgtggacactaatggcgtgtattcagagcctcgccccattggcacaagatacctgactcgtaatctgtaa

SEQ ID NO: 3984 - DNA, 2208 bp, synthetic construct
  misc_feature 1..2208: note = source = /note="Description of Artificial Sequence: Synthetic polynucleotide"
  source 1..2208: mol_type = other DNA
atggctgccgatggttatcttccagattggctcgaggacactctctctgaaggaataagacagtggtggaagctcaaacctggcccaccaccgccaaagcccgcagagcggcataaggacgacagcaggggtcttgtgcttcctgggtacaagtacctcggacccttcaacggactcgacaaaggagagccggtcaacgaggcagacgccgcggccctcgagcacgacaaggcctacgaccggcagctcgacagcggagacaacccgtacctcaagtacaaccacgccgacgcggagtttcaggagcgccttaaagaagatacgtcttttgggggcaacctcgcaagagcagtattccaggcgaaaaagagggttcttgaacctctgggcctggttgaggagcctgttaagacggctccgggaaaaaagaggccggtagagcactctcctgcggagccagattcctcctccggaactggaaagtcgggccaacagcctgcaagaaagagattgaattttggtcagactggagacgcagactccgtacctgacccccagcctctcggacagccaccagcagccccctctggtctgggaactaatacgatggcttcaggcagtggcgcaccaatggcagacaataacgagggcgccgacggagtgggtaattcctcgggaaattggcattgcgattccacatggatgggcgacagagtcatcaccaccagcacccgcacctgggctctgcccacctacaacaaccatctgtacaagcaaatttccagccagtctggagccagcaacgacaaccactactttggctacagcaccccttgggggtattttgacttcaacagattccactgccacttctccccacgtgactggcaaagactcatcaacaacaattggggattccggcccaaaagactcaacttcaagctctttaacattcaagtcaaggaggtcacgcagaatgacggtacgacgacgattgccaataaccttaccagcacggttcaggtgtttactgactcggagtaccagctcccgtacgtcctcggctcggcgcatcaaggatgcctcccgccgttcccagcagacgtcttcatggtgccacagtatggatacctcaccctgaacaacgggagtcaggcggtaggacgctcttcattttactgcctggagtactttccttctcagatgctgcgtaccggaaacaactttaccttcagctacacctttgaggacgttccttttcacagcagctacgctcacagccagagtttggaccgtctcatgaatcctctcatcgaccagtacctgtattacttgagcagaacaaacactccaagcggaaccactacgcagtccaggcttcagttttctcaagccggagcgagtgacattcgggaccagtctaggaactggcttcctggaccctgttaccgccagcagcgagtatcaaagacagctgcggacaacaacaacagtgattactcgtggactggagctaccaagtatcacctcaatggaagagactctctggtgaatccgggcacagccatggccagccacaaggacgatgaagaaaagtattttcctcagagcggggttctcatcttccggaaacaagactcgggaaaaactaatgtggacattgaaaaggtcatgattacagacgaagaggaaatcaggaccaccaatcccgtggctacggagcagtatggttctgtatctaccaatctccagagcggcaacacacaagcagctacctcagatgtcaacacacaaggcgttcttccaggcatggtctggcaggacagagacgtgtacctgcagggacccatctgggcaaagattccacacacggacggacattttcacccttctcctcttatgggaggatttggactgaagcaccctcccccgcagattctcatcaagaataccccggtacctgcgaatccttctaccaccttcagcgcggcaaagtttgcttccttcatcacacagtactccacggggcaggtcagcgtggagatcgagtgggagctgcagaaagagaacagcaaacgctggaaccccgagatccagtatacctccaactacaacaagtctgttaatgtggactttactgtggacactaatggcgtgtattcagagcctcgccccattggcacaagatacctgactcgtaatctgtaa

SEQ ID NO: 3985 - DNA, 2208 bp, synthetic construct
  misc_feature 1..2208: note = source = /note="Description of Artificial Sequence: Synthetic polynucleotide"
  source 1..2208: mol_type = other DNA
atggctgccgatggttatcttccagattggctcgaggacactctctctgaaggaataagacagtggtggaagctcaaacctggcccaccaccgccaaagcccgcagagcggcataaggacgacagcaggggtcttgtgcttcctgggtacaagtacctcggacccttcaacggactcgacaaaggagagccggtcaacgaggcagacgccgcggccctcgagcacgacaaggcctacgaccggcagctcgacagcggagacaacccgtacctcaagtacaaccacgccgacgcggagtttcaggagcgccttaaagaagatacgtcttttgggggcaacctcgcaagagcagtattccaggcgaaaaagagggttcttgaacctctgggcctggttgaggagcctgttaagacggctccgggaaaaaagaggccggtagagcactctcctgcggagccagattcctcctccggaactggaaagtcgggccaacagcctgcaagaaagagattgaattttggtcagactggagacgcagactccgtacctgacccccagcctctcggacagccaccagcagccccctctggtctgggaactaatacgatggcttcaggcagtggcgcaccaatggcagacaataacgagggcgccgacggagtgggtaattcctcgggaaattggcattgcgattccacatggatgggcgacagagtcatcaccaccagcacccgcacctgggctctgcccacctacaacaaccatctgtacaagcaaatttccagccagtctggagccagcaacgacaaccactactttggctacagcaccccttgggggtattttgacttcaacagattccactgccacttctccccacgtgactggcaaagactcatcaacaacaattggggattccggcccaaaagactcaacttcaagctctttaacattcaagtcaaggaggtcacgcagaatgacggtacgacgacgattgccaataaccttaccagcacggttcaggtgtttactgactcggagtaccagctcccgtacgtcctcggctcggcgcatcaaggatgcctcccgccgttcccagcagacgtcttcatggtgccacggtatggatacctcaccctgaacaacgggagtcaggcggtaggacgctcttcattttactgcctggagtactttccttctcagatgctgcgtaccggaaacaactttaccttcagctacacctttgaggacgttccttttcacagcagctacgctcacagccagagtttggaccgtctcatgaatcctctcatcgaccagtacctgtattacttgagcagaacaaacactccaagcggaaccactacgcagtccaggcttcagttttctcaagccggagcgagtgacattcgggaccagtctaggaactggcttcctggaccctgttaccgccagcagcgagtatcaaagacagctgcggacaacaacaacagtgattactcgtggactggagctaccaagtatcacctcaatggaagagactctctggtgaatccgggcacagccatggccagccacaaggacgatgaagaaaagtattttcctcagagcggggttctcatcttcggaaaacaagactcgggaaaaactaatgtggacattgaaaaggtcatgattacagacgaagaggaaatcaggaccaccaatcccgtggctacggagcagtatggttctgtatctaccaatctccagagcggcaacacacaagcagctacctcagatgtcaacacacaaggcgttcttccaggcatggtctggcaggacagagacgtgtacctgcagggacccatctgggcaaagattccacacacggacggacattttcacccttctcctcttatgggaggatttggactgaagcaccctcccccgcagattctcatcaagaataccccggtacctgcgaatccttctaccaccttcagcgcggcaaagtttgcttccttcatcacacagtactccacggggcaggtcagcgtggagatcgagtgggagctgcagaaagagaacagcaaacgctggaaccccgagatccagtatacctccaactacaacaagtctgttaatgtggactttactgtggacactaatggcgtgtattcagagcctcgccccattggcacaagatacctgactcgtaatctgtaa

SEQ ID NO: 3986 - DNA, 2208 bp, synthetic construct
  misc_feature 1..2208: note = source = /note="Description of Artificial Sequence: Synthetic polynucleotide"
  source 1..2208: mol_type = other DNA
atggctgccgatggttatcttccagattggctcgaggacactctctctgaaggaataagacagtggtggaagctcaaacctggcccaccaccgccaaagcccgcagagcggcataaggacgacagcaggggtcttgtgcttcctgggtacaagtacctcggacccttcaacggactcgacaaaggagagccggtcaacgaggcagacgccgcggccctcgagcacgacaaggcctacgaccggcagctcgacagcggagacaacccgtacctcaagtacaaccacgccgacgcggagtttcaggagcgccttaaagaagatacgtcttttgggggcaacctcgcaagagcagtattccaggcgaaaaagagggttcttgaacctctgggcctggttgaggagcctgttaagacggctccgggaaaaaagaggccggtagagcactctcctgcggagccagattcctcctccggaactggaaagtcgggccaacagcctgcaagaaagagattgaattttggtcagactggagacgcagactccgtacctgacccccagcctctcggacagccaccagcagccccctctggtctgggaactaatacgatggcttcaggcagtggcgcaccaatggcagacaataacgagggcgccgacggagtgggtaattcctcgggaaattggcattgcgattccacatggatgggcgacagagtcatcaccaccagcacccgcacctgggctctgcccacctacaacaaccatctgtacaagcaaatttccagccagtctggagccagcaacgacaaccactactttggctacagcaccccttgggggtattttgacttcaacagattccactgccacttctccccacgtgactggcaaagactcatcaacaacaattggggattccggcccaaaagactcaacttcaagctctttaacattcaagtcaaggaggtcacgcagaatgacggtacgacgacgattgccaataaccttaccagcacggttcaggtgtttactgactcggagtaccagctcccgtacgtcctcggctcggcgcatcaaggatgcctcccgccgttcccagcagacgtcttcatggtgccacagtatggatacctcaccctgaacaacgggagtcaggcggtaggacgctcttcattttactgcctggagtactttccttctcagatgctgcgtaccggaaacaactttaccttcagctacacctttgaggacgttccttttcacagcagctacgctcacagccagagtttggaccgtctcatgaatcctctcatcgaccagtacctgtattacttgagcagaacaaacactccaagcggaaccactacgcagtccaggcttcagttttctcaagccggagcgagtgacattcgggaccagtctaggaactggcttcctggaccctgttaccgccagcagcgagtatcaaagacagctgcggacaacaacaacagtgattactcgtggactggagctaccaagtatcacctcaatggaagagactctctggtgaatccgggcacagccatggccagccacaaggacgatgaagaaaagtattttcctcagagcggggttctcatcttcggaaaacaagactcgggaaaaactaatgtggacattgaaaaggtcatgattacagacgaagaggaaatcaggaccaccaatcccgtggctacggagcagtatggttctgtatctaccaatctccagagcggcaacacacaagcagctacctcagatgtcaacacacaaggcgttcttccaggcatggtctggcaggacagagacgtgtacctgcagggacccatctgggcaaagattccacacacggacggacattttcacccttctcctcttatgggaggattgggacagaagcaccctcccccgcagagtctcatcaagaataccccggtacctgcgaatccttctaccaccttcagcgcggcaaagtttgcttccttcatcacacagtactccacggggcaggtcagcgtggagatcgagtgggagctgcagaaagagaacagcaaacgctggaaccccgagatccagtatacctccaactacaacaagtctgttaatgtggactttactgtggacactaatggcgtgtattcagagcctcgccccattggcacaagatacctgactcgtaatctgtaa

SEQ ID NO: 3987 - DNA, 2208 bp, synthetic construct
  misc_feature 1..2208: note = source = /note="Description of Artificial Sequence: Synthetic polynucleotide"
  source 1..2208: mol_type = other DNA
atggctgccgatggttatcttccagattggctcgaggacactctctctgaaggaataagacagtggtggaagctcaaacctggcccaccaccgccaaagcccgcagagcggcataaggacgacagcaggggtcttgtgcttcctgggtacaagtacctcggacccttcaacggactcgacaaaggagagccggtcaacgaggcagacgccgcggccctcgagcacgacaaggcctacgaccggcagctcgacagcggagacaacccgtacctcaagtacaaccacgccgacgcggagtttcaggagcgccttaaagaagatacgtcttttgggggcaacctcgcaagagcagtattccaggcgaaaaagagggttcttgaacctctgggcctggttgaggagcctgttaagacggctccgggaaaaaagaggccggtagagcactctcctgcggagccagattcctcctccggaactggaaagtcgggccaacagcctgcaagaaagagattgaattttggtcagactggagacgcagactccgtacctgacccccagcctctcggacagccaccagcagccccctctggtctgggaactaatacgatggcttcaggcagtggcgcaccaatggcagacaataacgagggcgccgacggagtgggtaattcctcgggaaattggcattgcgattccacatggatgggcgacagagtcatcaccaccagcacccgcacctgggctctgcccacctacaacaaccatctgtacaagcaaatttccagccagtctggagccagcaacgacaaccactactttggctacagcaccccttgggggtattttgacttcaacagattccactgccacttctccccacgtgactggcaaagactcatcaacaacaattggggattccggcccaaaagactcaacttcaagctctttaacattcaagtcaaggaggtcacgcagaatgacggtacgacgacgattgccaataaccttaccagcacggttcaggtgtttactgactcggagtaccagctcccgtacgtcctcggctcggcgcatcaaggatgcctcccgccgttcccagcagacgtcttcatggtgccacagtatggatacctcaccctgaacaacgggagtcaggcggtaggacgctcttcattttactgcctggagtactttccttctcagatgctgcgtaccggaaacaactttaccttcagctacacctttgaggacgttccttttcacagcagctacgctcacagccagagtttggaccgtctcatgaatcctctcatcgaccagtacctgtattacttgagcagaacaaacactccaagcggaaccactacgcagtccaggcttcagttttctcaagccggagcgagtgacattcgggaccagtctaggaactggcttcctggaccctgttaccgccagcagcgagtatcaaagacagctgcggacaacaacaacagtgattactcgtggactggagctaccaagtatcacctcaatggaagagactctctggtgaatccgggcacagccatggccagccacaaggacgatgaagaaaagtattttcctcagagcggggttctcatcttcggaaaacaagactcggagaaaactaatgtggacattgaaaaggtcatgattacagacgaagaggaaatcaggaccaccaatcccgtggctacggagcagtatggttctgtatctaccaatctccagagcggcaacacacaagcagctacctcagatgtcaacacacaaggcgttcttccaggcatggtctggcaggacagagacgtgtacctgcagggacccatctgggcaaagattccacacacggacggacattttcacccttctcctcttatgggaggatttggactgaagcaccctcccccgcagattctcatcaagaataccccggtacctgcgaatccttctaccaccttcagcgcggcaaagtttgcttccttcatcacacagtactccacggggcaggtcagcgtggagatcgagtgggagctgcagaaagagaacagcaaacgctggaaccccgagatccagtatacctccaactacaacaagtctgttaatgtggactttactgtggacactaatggcgtgtattcagagcctcgccccattggcacaagatacctgactcgtaatctgtaa

SEQ ID NO: 3988 - DNA, 2208 bp, synthetic construct
  misc_feature 1..2208: note = source = /note="Description of Artificial Sequence: Synthetic polynucleotide"
  source 1..2208: mol_type = other DNA
atggctgccgatggttatcttccagattggctcgaggacactctctctgaaggaataagacagtggtggaagctcaaacctggcccaccaccgccaaagcccgcagagcggcataaggacgacagcaggggtcttgtgcttcctgggtacaagtacctcggacccttcaacggactcgacaaaggagagccggtcaacgaggcagacgccgcggccctcgagcacgacaaggcctacgaccggcagctcgacagcggagacaacccgtacctcaagtacaaccacgccgacgcggagtttcaggagcgccttaaagaagatacgtcttttgggggcaacctcgcaagagcagtattccaggcgaaaaagagggttcttgaacctctgggcctggttgaggagcctgttaagacggctccgggaaaaaagaggccggtagagcactctcctgcggagccagattcctcctccggaactggaaagtcgggccaacagcctgcaagaaagagattgaattttggtcagactggagacgcagactccgtacctgacccccagcctctcggacagccaccagcagccccctctggtctgggaactaatacgatggcttcaggcagtggcgcaccaatggcagacaataacgagggcgccgacggagtgggtaattcctcgggaaattggcattgcgattccacatggatgggcgacagagtcatcaccaccagcacccgcacctgggctctgcccacctacaacaaccatctgtacaagcaaatttccagccagtctggagccagcaacgacaaccactactttggctacagcaccccttgggggtattttgacttcaacagattccactgccacttctccccacgtgactggcaaagactcatcaacaacaattggggattccggcccaaaagactcaacttcaagctctttaacattcaagtcaaggaggtcacgcagaatgacggtacgacgacgattgccaataaccttaccagcacggttcaggtgtttactgactcggagtaccagctcccgtacgtcctcggctcggcgcatcaaggatgcctcccgccgttcccagcagacgtcttcatggtgccacagtatggatacctcaccctgaacaacgggagtcaggcggtaggacgctcttcattttactgcctggagtactttccttctcagatgctgcgtaccggaaacaactttaccttcagctacacctttgaggacgttccttttcacagcagctacgctcacagccagagtttggaccgtctcatgaatcctctcatcgaccagtacctgtattacttgagcagaacaaacactccaagcggaaccactacgcagtccaggcttcagttttctcaagccggagcgagtgacattcgggaccagtctaggaactggcttcctggaccctgttaccgccagcagcgagtatcaaagacagctgcggacaacaacaacagtgattactcgtggactggagctaccaagtatcacctcaatggaagagactctctggtgaatccgggcacagccatggccagccacaaggacgatgaagaaaagtattttcctcagagcggggttctcatcttcggaaaacaagactcgggaaaaactaatgtggacattgaaaaggtcatgattacagacgaagaggaaatcaggaccaccaatcccgtggctacggagcagtatggttctgtatctaccaatctccagagcggcaacacacaagcagctacctcagatgtcaacacacaaggcgttcttccaggcatggtctggcaggacagagacgtgtacctgcagggacccatctgggcaaagattccacacacggacggacattttcacccttctcctcttatgggaggatttggacagaagcaccctcccccgcagagtctcatcaagaataccccggtacctgcgaatccttctaccaccttcagcgcggcaaagtttgcttccttcatcacacagtactccacggggcaggtcagcgtggagatcgagtgggagctgcagaaagagaacagcaaacgctggaaccccgagatccagtatacctccaactacaacaagtctgttaatgtggactttactgtggacactaatggcgtgtattcagagcctcgccccattggcacaagatacctgactcgtaatctgtaa

SEQ ID NO: 3989 - DNA, 2208 bp, synthetic construct
  misc_feature 1..2208: note = source = /note="Description of Artificial Sequence: Synthetic polynucleotide"
  source 1..2208: mol_type = other DNA
atggctgccgatggttatcttccagattggctcgaggacactctctctgaaggaataagacagtggtggaagctcaaacctggcccaccaccgccaaagcccgcagagcggcataaggacgacagcaggggtcttgtgcttcctgggtacaagtacctcggacccttcaacggactcgacaaaggagagccggtcaacgaggcagacgccgcggccctcgagcacgacaaggcctacgaccggcagctcgacagcggagacaacccgtacctcaagtacaaccacgccgacgcggagtttcaggagcgccttaaagaagatacgtcttttgggggcaacctcgcaagagcagtattccaggcgaaaaagagggttcttgaacctctgggcctggttgaggagcctgttaagacggctccgggaaaaaagaggccggtagagcactctcctgcggagccagattcctcctccggaactggaaagtcgggccaacagcctgcaagaaagagattgaattttggtcagactggagacgcagactccgtacctgacccccagcctctcggacagccaccagcagccccctctggtctgggaactaatacgatggcttcaggcagtggcgcaccaatggcagacaataacgagggcgccgacggagtgggtaattcctcgggaaattggcattgcgattccacatggatgggcgacagagtcatcaccaccagcacccgcacctgggctctgcccacctacaacaaccatctgtacaagcaaatttccagccagtctggagccagcaacgacaaccactactttggctacagcaccccttgggggtattttgacttcaacagattccactgccacttctccccacgtgactggcaaagactcatcaacaacaattggggattccggcccaaaagactcaacttcaagctctttaacattcaagtcaaggaggtcacgcagaatgacggtacgacgacgattgccaataaccttaccagcacggttcaggtgtttactgactcggagtaccagctcccgtacgtcctcggctcggcgcatcaaggatgcctcccgccgttcccagcagacgtcttcatggtgccacagtatggatacctcaccctgaacaacgggagtcaggcggtaggacgctcttcattttactgcctggagtactttccttctcagatgctgcgtaccggaaacaactttaccttcagccacacctttgaggacgttccttttcacagcagctacgctcacagccagagtttggaccgtctcatgaatcctctcatcgaccagtacctgtattacttgagcagaacaaacactccaagcggaaccactacgcagtccaggcttcagttttctcaagccggagcgagtgacattcgggaccagtctaggaactggcttcctggaccctgttaccgccagcagcgagtatcaaagacagctgcggacaacaacaacagtgattactcgtggactggagctaccaagtatcacctcaatggaagagactctctggtgaatccgggcacagccatggccagccacaaggacgatgaagaaaagtattttcctcagagcggggttctcatcttcggaaaacaagactcgggaaaaactaatgtggacattgaaaaggtcatgattacagacgaagaggaaatcaggaccaccaatcccgtggctacggagcagtatggttctgtatctaccaatctccagagcggcaacacacaagcagctacctcagatgtcaacacacaaggcgttcttccaggcatggtctggcaggacagagacgtgtacctgcagggacccatctgggcaaagattccacacacggacggacattttcacccttctcctcttatgggaggatttggactgaagcaccctcccccgcagattctcatcaagaataccccggtacctgcgaatccttctaccaccttcagcgcggcaaagtttgcttccttcatcacacagtactccacggggcaggtcagcgtggagatcgagtgggagctgcagaaagagaacagcaaacgctggaaccccgagatccagtatacctccaactacaacaagtctgttaatgtggactttactgtggacactaatggcgtgtattcagagcctcgccccattggcacaagatacctgactcgtaatctgtaa

SEQ ID NO: 3990 - DNA, 2208 bp, synthetic construct
  misc_feature 1..2208: note = source = /note="Description of Artificial Sequence: Synthetic polynucleotide"
  source 1..2208: mol_type = other DNA
atggctgccgatggttatcttccagattggctcgaggacactctctctgaaggaataagacagtggtggaagctcaaacctggcccaccaccgccaaagcccgcagagcggcataaggacgacagcaggggtcttgtgcttcctgggtacaagtacctcggacccttcaacggactcgacaaaggagagccggtcaacgaggcagacgccgcggccctcgagcacgacaaggcctacgaccggcagctcgacagcggagacaacccgtacctcaagtacaaccacgccgacgcggagtttcaggagcgccttaaagaagatacgtcttttgggggcaacctcgcaagagcagtattccaggcgaaaaagagggttcttgaacctctgggcctggttgaggagcctgttaagacggctccgggaaaaaagaggccggtagagcactctcctgcggagccagattcctcctccggaactggaaagtcgggccaacagcctgcaggaaagagattgaattttggtcggactggagacgcagactccgtacctgacccccagcctctcggacagccaccagcagccccctctggtctgggaactaatacgatggcttcaggcagtggcgcaccaatggcagacaataacgagggcgccgacggagtgggtaattcctcgggaaattggcattgcgattccacatggatgggcgacagagtcatcaccaccagcacccgcacctgggctctgcccacctacaacaaccatctgtacaagcaaatttccagccagtctggagccagcaacgacaaccactactttggctacagcaccccttgggggtattttgacttcaacagattccactgccacttctccccacgtgactggcaaagactcatcaacaacaattggggattccggcccaaaagactcaacttcaagctctttaacattcaagtcaaggaggtcacgcagaatgacggtacgacgacgattgccaataaccttaccagcacggttcaggtgtttactgactcggagtaccagctcccgtacgtcctcggctcggcgcatcaaggatgcctcccgccgttcccagcagacgtcttcatggtgccacagtatggatacctcaccctgaacaacgggagtcaggcggtaggacgctcttcattttactgcctggagtactttccttctcagatgctgcgtaccggaaacaactttaccttcagctacacctttgaggacgttccttttcacagcagctacgctcacagccagagtttggaccgtctcatgaatcctctcatcgaccagtacctgtattacttgagcagaacaaacactccaagcggaaccactacgcagtccaggcttcagttttctccagccggagcgagtgacattcgggaccagtctaggaactggcttcctggaccctgttaccgccagcagcgagtatcaaagacagctgcggacaacaacaacagtgattactcgtggactggagctaccaagtatcacctcaatggaagagactctctggtgaatccgggcacagccatggccagccacaaggacgatgaagaaaagtattttcctcagagcggggttctcatcttcggaaaacaagactcgggaaaaactaatgtggacattgaaaaggtcatgattacagacgaagaggaaatcaggaccaccaatcccgtggctacggagcagtatggttctgtatctaccaatctccagagcggcaacacacaagcagctacctcagatgtcaacacacaaggcgttcttccaggcatggtctggcaggacagagacgtgtacctgcagggacccatctgggcaaagattccacacacggacggacattttcacccttctcctcttatgggaggatttggactgaagcaccctcccccgcagattctcatcaagaataccccggtacctgcgaatccttctaccaccttcagcgcggcaaagtttgcttccttcatcacacagtactccacggggcaggtcagcgtggagatcgagtgggagctgcagaaagagaacagcaaacgctggaaccccgagatccagtatacctccaactacaacaagtctgttaatgtggactttactgtggacactaatggcgtgtattcagagcctcgccccattggcacaagatacctgactcgtaatctgtaa

SEQ ID NO: 3991 - DNA, 2205 bp, synthetic construct
  misc_feature 1..2205: note = source = /note="Description of Artificial Sequence: Synthetic polynucleotide"
  source 1..2205: mol_type = other DNA
atggctgccgatggttatcttccagattggctcgaggacactctctctgaaggaataagacagtggtggaagctcaaacctggcccaccaccgccaaagcccgcagagcggcataaggacgacagcaggggtcttgtgcttcctgggtacaagtacctcggacccttcaacggactcgacaaaggagagccggtcaacgaggcagacgccgcggccctcgagcacgacaaggcctacgaccggcagctcgacagcggagacaacccgtacctcaagtacaaccacgccgacgcggagtttcaggagcgccttaaagaagatacgtcttttgggggcaacctcgcaagagcagtattccaggcgaaaaagagggttcttgaacctctgggcctggttgaggagcctgttaagacggctccgggaaaaaagaggccggtagagcactctcctgcggagccagattcctcctccggaactggaaagtcgggccaacagcctgcaagaaagagattgaattttggtcagactggagacgcagactccgtacctgacccccagcctctcggacagccaccagcagccccctctggtctgggaactaatacgatggcttcaggcagtggcgcaccaatggcagacaataacgagggcgccgacggagtgggtaattcctcgggaaattggcattgcgattccacatggatgggcgacagagtcatcaccaccagcacccgcacctgggctctgcccacctacaacaaccatctgtacaagcaaatttccagccagtctggagccagcaacgacaaccactactttggctacagcaccccttgggggtattttgacttcaacagattccactgccacttctccccacgtgactggcaaagactcatcaacaacaattggggattccggcccaaaagactcaacttcaagctctttaacattcaagtcaaggaggtcacgcagaatgacggtacgacgacgattgccaataaccttaccagcacggttcaggtgtttactgactcggagtaccagctcccgtacgtcctcggctcggcgcatcaaggatgcctcccgccgttcccagcagacgtcttcatggtgccacagtatggatacctcaccctgaacaacgggagtcaggcggtaggacgctcttcattttactgcctggagtactttccttctcagatgctgcgtaccggaaacaactttaccttcagctacacctttgaggacgttccttttcacagcagctacgctcacagccagagtttggaccgtctcatgaatcctctcatcgaccagtacctgtattacttgagcagaacaaacactccaagcggaaccactacgcagtccaggcttcagttttctcaagccggagcgagtgacattcgggaccagtctaggaactggcttcctggaccctgttaccgccagcagcgagtatcaaagacagctgcggacaacaacagtgattactcgtggactggagctaccaagtatcacctcaatggaagagactctctggtgaatccgggcacagccatggccagccacaaggacgatgaagaaaagtattttcctcagagcggggttctcatcttcggaaaacaagactcgggaaaaactaatgtggacattgaaaaggtcatgattacagacgaagaggaaatcaggaccaccaatcccgtggctacggagcagtatggttctgtatctaccaatctccagagcggcaacacacaagcagctacctcagatgtcaacacacaaggcgttcttccaggcatggtctggcaggacagagacgtgtacctgcagggacccatctgggcaaagattccacacacggacggacattttcacccttctcctcttatgggaggatttggactgaagcaccctcccccgcagattctcatcaagaataccccggtacctgcgaatccttctaccaccttcagcgcggcaaagtttgcttccttcatcacacagtactccacggggcaggtcagcgtggagatcgagtgggagctgcagaaagagaacagcaaacgctggaaccccgagatccagtatacctccaactacaacaagtctgttaatgtggactttactgtggacactaatggcgtgtattcagagcctcgccccattggcacaagatacctgactcgtaatctgtaa

SEQ ID NO: 3992 - DNA, 2217 bp, synthetic construct
  misc_feature 1..2217: note = source = /note="Description of Artificial Sequence: Synthetic polynucleotide"
  source 1..2217: mol_type = other DNA
atggctgccgatggttatcttccagattggctcgaggacaacctctctgagggcattcgcgagtggtgggcgctgaaacctggagccccgaagcccaaagccaaccagcaaaagcaggacgacggccggggtctggtgcttcctggctacaagtacctcggacccttcaacggactcgacaagggggagcccgtcaacgcggcggacgcagcggccctcgagcacgacaaggcctacgaccagcagctgcaggcgggtgacaatccgtacctgcggtataaccacgccgacgccgagtttcaggagcgtctgcaagaagatacgtcttttgggggcaacctcgggcgagcagtcttccaggccaagaagcgggttctcgaacctctcggtctggttgaggaaggcgctaagacggctcctggaaagaagagaccggtagagccatcaccccagcgttctccagactcctctacgggcatcggcaagaaaggccaacagcccgccagaaaaagactcaattttggtcagactggcgactcagagtcagttccagaccctcaacctctcggagaacctccagcagcgccctctggtgtgggacctaatacaatggctgcaggcggtggcgcaccaatggcagacaataacgaaggcgccgacggagtgggtagttcctcgggaaattggcattgcgattccacatggctgggcgacagagtcatcaccgccagcacccgaacctgggccctgcccacctacaacaaccacctctacaagcaaatctccaacgggacatcggggggagccaccaacgacaacacctacttcggctacagcaccccctgggggtattttgactttaacagattccactgccacttttcaccacgtgactggcagcgactcatcaacaacaactggggattccggcccaagagactcagcttcaagctcttcaacatccaggtcaaggaggtcacgcagaatgaaggcaccaagaccatcgccaataacctcaccagcaccatccaggtgtttacggactcggagtaccagctgccgtacgttctcggctctgcccaccagggctgcctgcctccgttcccggcggacgtgttcacgattccccagtacggctacctaacactcaacaacggtagtcaggccgtgggacgctcctccttctactgcctggaatactttccttcgcagatgctgagaaccggcaacaacttccagtttacttacaccttcgaggacgtgcctttccacagcagctacgcccacagccagagcttggaccggctgatgaatcctctgattgaccagtacctgtactacttgtctcggactcaaacaacaggaggcacggcaaatacgcagactctgggcttcagccaaggtgggcctaatacaatggccaatcaggcaaagaactggctgccaggaccctgttaccgccaacaacgcgtctcaacgacaaccgggcaaaacaacaatagcaactttgcctggactgctgggaccaaataccatctgaatggaagaaattcattggctaatcctggcatcgctatggcaacacacaaagacgacgaggagcgtttttttcccagtaacgggatcctgatttttggcaaacaaaatgctgccagagacaatgcggattacagcgatgtcatgctcaccagcgaggaagaaatcaaaaccactaaccctgtggctacagaggaatacggtatcgtggcagataacttgcagcagcaaaacacggctcctcaaattggaactgtcaacagccagggggccttacccggtatggtctggcagaaccgggacgtgtacctgcagggtcccatctgggccaagattcctcacacggacggcaacttccacccgtctccgctgatgggcggctttggcctgaaacatcctccgcctcagatcctgatcaagaacacgcctgtacctgcggatcctccgaccaccttcaaccagtcaaagctgaactctttcatcacgcaatacagcaccggacaggtcagcgtggaaattgaatgggagctgcagaaggaaaacagcaagcgctggaaccccgagatccagtacacctccaactactacaaatctacaagtgtggactttgctgttaatacagaaggcgtgtactctgaaccccgccccattggcacccgttacctcacccgtaatctgtaa

SEQ ID NO: 3993 - DNA, 2217 bp, synthetic construct
  misc_feature 1..2217: note = source = /note="Description of Artificial Sequence: Synthetic polynucleotide"
  source 1..2217: mol_type = other DNA
atggctgccgatggttatcttccagattggctcgaggacaacctctctgagggcattcgcgagtggtgggcgctgaaacctggagccccgaagcccaaagccaaccagcaaaagcaggacgacggccggggtctggtgcttcctggctacaagtacctcggacccttcaacggactcgacaagggggggcccgtcaacgcggcggacgcagcggccctcgagcacgacaaggcctacgaccagcagctgcaggcgggtgacaatccgtacctgcggtataaccacgccgacgccgagtttcaggagcgtctgcaagaagatacgtcttttgggggcaacctcgggcgagcagtcttccaggccaagaagcgggttctcgaacctctcggtctggttgaggaaggcgctaagacggctcctggaaagaagagaccggtagagccatcaccccagcgttctccagactcctctacgggcatcggcaagaaaggccaacagcccgccagaaaaagactcaattttggtcagactggcgactcagagtcagttccagaccctcaacctctcggagaacctccagcagcgccctctggtgtgggacctaatacaatggctgcaggcggtggcgcaccaatggcagacaataacgaaggcgccgacggagtgggtagttcctcgggaaattggcattgcgattccacatggctgggcgacagagtcatcaccaccagcacccgaacctgggccctgcccacctacaacaaccacctctacaagcaaatctccaacgggacatcgggaggagccaccaacgacaacacctacttcggctacagcaccccctgggggtattttgactttaacagattccactgccacttttcaccacgtgactggcagcgactcatcaacaacaactggggattccggcccaagagactcagcttcaagctcttcaacatccaggtcaaggaggtcacgcagaatgaaggcaccaagaccatcgccaataacctcaccagcaccatccaggtgtttacggactcggagtaccagctgccgtacgttctcggctctgcccaccagggctgcctgcctccgttcccggcggacgtgttcatgattccccagtacggctacctaacactcaacaacggtagtcaggccgtgggacgctcctccttctactgcctggaatactttccttcgcagatgctgagaaccggcaacaacttccagtttacttacaccttcgaggacgtgcctttccacagcagctacgcccacagccagagcttggaccggctgatgaatcctctgattgaccagtacctgtactacttgtctcggactcaaacaacaggaggcacggcaaatacgcagactctgggcttcagccaaggtgggcctaatacaatggccaatcaggcaaagaactggctgccaggaccctgttaccgccaacaacgcgtctcaacgacaaccgggcaaaacaacaatagcaactttgcctggactgctgggaccaaataccatctgaatggaagaaattcattggctaatcctggcatcgctatggcaacacacaaagacgacgaggagcgtttttttcccagtaacgggatcctgatttttggcaaacaaaatgctgccagagacaatgcggattacagcgatgtcatgctcaccagcgaggaagaaatcaaaaccactaaccctgtggctacagaggaatacggtatcgtggcagataacttgcagcagcaaaacacggctcctcaaattggaactgtcaacagccagggggccttacccggtatggtctggcagaaccgggacgtgtacctgcagggtcccatctgggccaagattcctcacacggacggcaacttccacccgtctccgctgatgggcggctttggcctgaaacatcctccgcctcagatcctgatcaagaacacgcctgtacctgcggatcctccgaccaccttcaaccagtcaaagctgaactctttcatcacgcaatacagcaccggacaggtcagcgtggaaattgaatgggagctgcagaaggaaaacagcaagcgctggaaccccgagatccagtacacctccaactactacaaatctacaagtgtggactttgctgttaatacagaaggcgtgtactctgaaccccgccccattggcacccgttacctcacccgtaatctgtaa

SEQ ID NO: 3994 - DNA, 2217 bp, synthetic construct
  misc_feature 1..2217: note = source = /note="Description of Artificial Sequence: Synthetic polynucleotide"
  source 1..2217: mol_type = other DNA
atggctgccgatggttatcttccagattggctcgaggacaacctctctgagggcattcgcgagtggtgggcgctgaaacctggagccccgaagcccaaagccaaccagcaaaagcaggacgacggccggggtctggtgcttcctggctacaagtacctcggacccttcaacggactcgacaagggggagcccgtcaacgcggcggacgcagcggccctcgagcacgacaaggcctacgaccagcagctgcaggcgggtgacaatccgtacctgcggtataaccacgccgacgccgagtttcaggagcgtctgcaagaagatacgtcttttgggggcaacctcgggcgagcagtcttccaggccaagaagcgggttctcgaacctctcggtctggttgaggaaggcgctaagacggctcctggaaagaagagaccggtagagccatcaccccagcgttctccagactcctctacgggcatcggcaagaaaggccaacagcccgccagaaaaagactcaattttggtcagactggcgactcagagtcagttccagaccctcaacctctcggagaacctccagcagcgccctctggtgtgggacctaatacaatggctgcaggcggtggcgcaccaatggcagacaataacgaaggcgccgacggagtgggtagttcctcgggaaattggcattgcgattccacatggctgggcgacagagtcatcaccaccagcacccgaacctgggccctgcccacctacaacaaccacctctacaggcaaatctccaacgggacatcgggaggagccaccaacgacaacacctacttcggctacagcaccccctgggggtattttgactttaacagattccactgccacttttcaccacgtgactggcagcgactcatcaacaacaactggggattccggcccaagagactcagcttcaagctcttcaacatccaggtcaaggaggtcacgcagaatgaaggcaccaagaccatcgccaataacctcaccagcaccatccaggtgtttacggactcggagtaccagctgccgtacgttctcggctctgcccaccagggctgcctgcctccgttcccggcggacgtgttcatgattccccagtacggctacctaacactcaacaacggtagtcaggccgtgggacgctcctccttctactgcctggaatactttccttcgcagatgctgagaaccggcaacaacttccagtttacttacaccttcgaggacgtgcctttccacagcagctacgcccacagccagagcttggaccggctgatgaatcctctgattgaccagtacctgtactacttgtctcggactcaaacaacaggaggcacggcaaatacgcagactctgggcttcagccaaggtgggcctaatacaatggccaatcaggcaaagaactggctgccaggaccctgttaccgccaacaacgcgtctcaacgacaaccgggcaaaacaacaatagcaactttgcctggactgctgggaccaaataccatctgaatggaagaaattcattggctaatcctggcatcgctatggcaacacacaaagacgacgaggagcgtttttttcccagtaacgggatcctgatttttggcaaacaaaatgctgccagagacaatgcggattacagcgatgtcatgctcaccagcgaggaagaaatcaaaaccactaaccctgtggctacagaggaatacggtatcgtggcagataacttgcagcagcaaaacacggctcctcaaattggaactgtcaacagccagggggccttacccggtatggtctggcagaaccgggacgtgtacctgcagggtcccatctgggccaagattcctcacacggacggcaacttccacccgtctccgctgatgggcggctttggcctgaaacatcctccgcctcagatcctgatcaagaacacgcctgtacctgcggatcctccgaccaccttcaaccagtcaaagctgaactctttcatcacgcaatacagcaccggacaggtcagcgtggaaattgaatgggagctgcagaaggaaaacagcaagcgctggaaccccgagatccagtacacctccaactactacaaatctacaagtgtggactttgctgttaatacagaaggcgtgtactctgaaccccgccccattggcacccgttacctcacccgtaatctgtaa

SEQ ID NO: 3995 - DNA, 2217 bp, synthetic construct
  misc_feature 1..2217: note = source = /note="Description of Artificial Sequence: Synthetic polynucleotide"
  source 1..2217: mol_type = other DNA
atggctgccgatggttatcttccagattggctcgaggacaacctctctgagggcattcgcgagtggtgggcgctgaaacctggagccccgaagcccaaagccaaccagcaaaagcaggacgacggccggggtctggtgcttcctggctacaagtacctcggacccttcaacggactcgacaagggggagcccgtcaacgcggcggacgcagcggccctcgagcacgacaaggcctacgaccagcagctgcaggcgggtgacaatccgtacctgcggtataaccacgccgacgccgagttccaggagcgtctgcaagaagatacgtcttttgggggcaacctcgggcgagcagtcttccaggccaagaagcgggttctcgaacctctcggtctggttgaggaaggcgctaagacggctcctggaaagaagagaccggtagagccatcaccccagcgttctccagactcctctacgggcatcggcaagaaaggccaacagcccgccagaaaaagactcaattttggtcagactggcgactcagagtcagttccagaccctcaacctctcggagaacctccagcagcgccctctggtgtgggacctaatacaatggctgcaggcggtggcgcaccaatggcagacagtaacgaaggcgccgacggagtgggtagttcctcgggaaattggcattgcgattccacatggctgggcgacagagtcatcaccaccagcacccgaacctgggccctgcccacctacaacaaccacctctacaagcaaatctccaacgggacatcgggaggagccaccaacgacaacacctacttcggctacagcaccccctgggggtattttgactttaacagattccactgccacttttcaccacgtgactggcagcgactcatcaacaacaactggggattccggcccaagagactcagcttcaagctcttcaacatccaggtcaaggaggtcacgcagaatgaaggcaccaagaccatcgccaataacctcaccagcaccatccaggtgtttacggactcggagtaccagctgccgtacgttctcggctctgcccaccagggctgcctgcctccgttcccggcggacgtgttcatgattccccagtacggctacctaacactcaacaacggtagtcaggccgtgggacgctcctccttctactgcctggaatactttccttcgcagatgctgagaaccggcaacaacttccagtttacttacaccttcgaggacgtgcctttccacagcagctacgcccacagccagagcttggaccggctgatgaatcctctgattgaccagtacctgtactacttgtctcggactcaaacaacaggaggcacggcaaatacgcagactctgggcttcagccaaggtgggcctaatacaatggccaatcaggcaaagaactggctgccaggaccctgttaccgccaacaacgcgtctcaacgacaaccgggcaaaacaacaatagcaactttgcctggactgctgggaccaaataccatctgaatggaagaaattcattggctaatcctggcatcgctatggcaacacacaaagacgacgaggagcgtttttttcccagtaacgggatcctgatttttggcaaacaaaatgctgccagagacaatgcggattacagcgatgtcatgctcaccagcgaggaagaaatcaaaaccactaaccctgtggctacagaggaatacggtatcgtggcagataacttgcagcagcaaaacacggctcctcaaattggaactgtcaacagccagggggccttacccggtatggtctggcagaaccgggacgtgtacctgcagggtcccatctgggccaagattcctcacacggacggcaacttccacccgtctccgctgatgggcggctttggcctgaaacatcctccgcctcagatcctgatcaagaacacgcctgtacctgcggatcctccgaccaccttcaaccagtcaaagctgaactctttcatcacgcaatacagcaccggacaggtcagcgtggaaattgaatgggagctgcagaaggaaaacagcaagcgctggaaccccgagatccagtacacctccaactactacaaatctacaagtgtggactttgctgttaatacagaaggcgtgtactctgaaccccgccccattggcacccgttacctcacccgtaatctgtaa

SEQ ID NO: 3996 - DNA, 2217 bp, synthetic construct
  misc_feature 1..2217: note = source = /note="Description of Artificial Sequence: Synthetic polynucleotide"
  source 1..2217: mol_type = other DNA
atggctgccgatggttatcttccagattggctcgaggacaacctctctgagggcattcgcgagtggtgggcgctgaaacctggagccccgaagcccaaagccaaccagcaaaagcaggacgacggccggggtctggtgcttcctggctacaagtacctcggacccttcaacggactcgacaagggggagcccgtcaacgcggcggacgcagcggccctcgagcacgacaaggcctacgaccagcagctgcaggcgggtgacaatccgtacctgcggtataaccacgccgacgccgagtttcaggagcgtctgcaagaagatacgtcttttgggggcaacctcgggcgagcagtcttccaggccaagaagcgagttctcgaacctctcggtctggttgaggaaggcgctaagacggctcctggaaagaagagaccggtagagccatcaccccagcgttctccagactcctctacgggcatcggcaagaaaggccaacagcccgccagaaaaagactcaattttggtcagactggcgactcagagtcagttccagaccctcaacctctcggagaacctccagcagcgccctctggtgtgggacctaatacaatggctgcaggcggtggcgcaccaatggcagacaataacgaaggcgccgacggagtgggtagttcctcgggaaattggcattgcgattccacatggctgggcgacagagtcatcaccaccagcacccgaacctgggccctgcccacctacaacaaccacctctacaagcaaatctccaacgggacgtcgggaggagccaccaacgacaacacctacttcggctacagcaccccctgggggtattttgactttaacagattccactgccacttttcaccacgtgactggcagcgactcatcaacaacaactggggattccggcccaagagactcagcttcaagctcttcaacatccaggtcaaggaggtcacgcagaatgaaggcaccaagaccatcgccaataacctcaccagcaccatccaggtgtttacggactcggagtaccagctgccgtacgttctcggctctgcccaccagggctgcctgcctccgttcccggcggacgtgttcatgattccccagtacggctacctaacactcaacaacggtagtcaggccatgggacgctcctccttctactgcctggaatactttccttcgcagatgctgagaaccggcaacaacttccagtttacttacaccttcgaggacgtgcctttccacagcagctacgcccacagccagagcttggaccggctgatgaatcctctgattgaccagtacctgtactacttgtctcggactcaagcaacaggaggcacggcaaatacgcagactctgggcttcagccaaggtgggcctaatacaatggccaatcaggcaaagaactggctgccaggaccctgttaccgccaacaacgcgtctcaacgacaaccgggcaaaacaacaatagcaactttgcctggactgctgggaccaaataccatctgaatggaagaaattcattggctaatcctggcatcgctatggcaacacacaaagacgacgaggagcgtttttttcccagtaacgggatcctgatttttggcaaacaaaatgctgccagagacaatgcggattacagcgatgtcatgctcaccagcgaggaagaaatcaaaaccactaaccctgtggctacagaggaatacggtatcgtggcagataacttgcagcagcaaaacacggctcctcaaattggaactgtcaacagccagggggccttacccggtatggtctggcagaaccgggacgtgtacctgcagggtcccatctgggccaagattcctcacacggacggcaacttccacccgtctccgctgatgggcggctttggcctgaaacatcctccgcctcagatcctgatcaagaacacgcctgtacctgcggatcctccgaccaccttcaaccagtcaaagctgaactctttcatcacgcaatacagcaccggacaggtcagcgtggaaattgaatgggagctgcagaaggaaaacagcaagcgctggaaccccgagatccagtacacctccaactactacaaatctacaagtgtggactttgctgttaatacagaaggcgtgtactctgaaccccgccccattggcacccgttacctcacccgtaatctgtaa

SEQ ID NO: 3997 - DNA, 2217 bp, synthetic construct
  misc_feature 1..2217: note = source = /note="Description of Artificial Sequence: Synthetic polynucleotide"
  source 1..2217: mol_type = other DNA
atggctgccgatggttatcttccagattggctcgaggacaacctctctgagggcattcgcgagtggtgggcgctgaaacctggagccccgaagcccaaagccaaccagcaaaagcaggacgacggccggggtctggtgcttcctggctacaagtacctcggacccttcaacggactcgacaagggggagcccgtcaacgcggcggacgcagcggccctcgagcacgacaaggcctacgaccagcagctgcaggcgggtaacaatccgtacctgcggtataaccacgccgacgccgagtttcaggagcgtctgcaagaagatacgtcttttgggggcaacctcgggcgagcagtcttccaggccaagaagcgggttctcggacctctcggtctggttgaggaaggcgctaagacggctcctggaaagaagagaccggtagagccatcaccccagcgttctccagactcctctacgggcatcggcaagaaaggccaacagcccgccagaaaaagactcaattttggtcagactggcgactcagagtcagttccagaccctcaacctctcggagaacctccagcagcgccctctggtgtgggacctaatacaatggctgcaggcggtggcgcaccaatggcagacaataacgaaggcgccgacggagtgggtagttcctcgggaaattggcattgcgattccacatggctgggcgacagagtcatcaccaccagcacccgaacctgggccctgcccacctacaacaaccacctctacaagcaaatctccaacgggacatcgggaggagccaccaacgacaacacctacttcggctacagcaccccctgggggtattttgactttaacagattccactgccacttttcaccacgtgactggcagcgactcatcaacaacaactggggattccggcccaagagactcagcttcaagctcttcaacatccaggtcaaggaggtcacgcagaatgaaggcaccaagaccatcgccaataacctcaccagcaccatccaggtgtttacggactcggagtaccagctgccgtacgttctcggctctgcccaccagggctgcctgcctccgttcccggcggacgtgttcatgattccccagtacggctacctaacactcaacaacggtagtcgggccgtgggacgctcctccttctactgcctggaatactttccttcgcagatgctgagaaccggcaacaacttccagtttacttacaccttcgaggacgtgcctttccacagcagctacgcccacagccagagcttggaccggctgatgaatcctctgattgaccagtacctgtactacttgtctcggactcaaacaacaggaggcacggcaaatacgcagactctgggcttcagccaaggtgggcctaatacaatggccaatcaggcaaagaactggctgccaggaccctgttaccgccaacaacgcgtctcaacgacaaccgggcaaaacaacaatagcaactttgcctggactgctgggaccaaataccatctgaatggaagaaattcattggctaatcctggcatcgctatggcaacacacaaagacgacgaggagcgtttttttcccagtaacgggatcctgatttttggcaaacaaaatgctgccagagacaatgcggattacagcgatgtcatgctcaccagcgaggaagaaatcaaaaccactaaccctgtggctacagaggaatacggtatcgtggcagataacttgcagcagcaaaacacggctcctcaaattggaactgtcaacagccagggggccttacccggtatggtctggcagaaccgggacgtgtacctgcagggtcccatctgggccaagattcctcacacggacggcaacttccacccgtctccgctgatgggcggctttggcctgaaacatcctccgcctcagatcctgatcaagaacacgcctgtacctgcggatcctccgaccaccttcaaccagtcaaagctgaactctttcatcacgcaatacagcaccggacaggtcagcgtggaaattgaatgggagctgcagaaggaaaacagcaagcgctggaaccccgagatccagtacacctccaactactacaaatctacaagtgtggactttgctgttaatacagaaggcgtgtactctgaaccccgccccattggcacccgttacctcacccgtaatctgtaa

SEQ ID NO: 3998 - DNA, 2217 bp, synthetic construct
  misc_feature 1..2217: note = source = /note="Description of Artificial Sequence: Synthetic polynucleotide"
  source 1..2217: mol_type = other DNA
atggctgccgatggttatcttccagattggctcgaggacaacctctctgagggcattcgcgagtggtgggcgctgaaacctggagccccgaagcccaaagccaaccagcaaaagcaggacgacggccggggtctggtgcttcctggctacaagtacctcggacccttcaacggactcgacaagggggagcccgtcaacgcggcggacgcagcggccctcgagcacgacaaggcctacgaccagcagctgcaggcgggtgacaatccgtacctgcggtataaccacgccgacgccgagtttcaggagcgtctgcaagaagatacgtcttttgggggcaacctcgggcgagcagtcttccaggccaagaagcgggttctcgaacctctcggtctggttgaggaaggcgctaagacggctcctggaaagaagagaccggtagagccatcaccccagcgttctccagactcctctacgggcatcggcaagaaaggccaacagcccgccagaaaaagactcaattttggtcagactggcgactcagagtcagttccagaccctcaacctctcggagaacctccagcagcgccctctggtgtgggacctaatacaatggctgcaggcggtggcgcaccaatggcagacaataacgaaggcgccgacggagtgggtagttcctcgggaaattggcattgcgattccacatggctgggcgacagagtcatcaccaccagcacccgaacctgggccctgcccacctacaacaaccacctctacaagcaaatctccaacgggacatcgggaggagccaccaacgacaacacctacttcggctacagcaccccctgggggtattttgactttaacagattccactgccacttttcaccacgcgactggcagcgactcatcaacaacaactggggattccggcccaagagactcagcttcaagctcttcaacatccaggtcaaggaggtcacgcagaatgaaggcaccaagaccatcgccaataacctcaccagcaccatccaggtgtttacggactcggagtaccagctgccgtacgttctcggctctgcccaccagggctgcctgcctccgttcccggcggacgtgttcatgattccccagtacggctacctaacactcaacaacggtagtcaggccgtgggacgctcctccttctactgcctggaatactttccttcgcagatgctgagaaccggcaacaacttccagtttacttacaccttcgaggacgtgcctttccacagcagctacgcccacagccagagcttggaccggctgatgaatcctctgattgaccagtacctgtactacttgtctcggactcaaacaacaggaggcacggcaaatacgcagactctgggcttcagccaaggtgggcctaatacaatggccaatcaggcaaagaactggctgccaggaccctgttaccgccaacaacgcgtctcaacgacaaccgggcaaaacaacaatagcgactttgcctggactgctgggaccaaataccatctgaatggaagaaattcattggctaatcctggcatcgctatggcaacacacaaagacgacgaggagcgtttttttcccagtaacgggatcctgatttttggcaaacaaaatgctgccagagacaatgcggattacagcgatgtcatgctcaccagcgaggaagaaatcaaaaccactaaccctgtggctacagaggaatacggtatcgtggcagataacttgcagcagcaaaacacggctcctcaaattggaactgtcaacagccagggggccttacccggtatggtctggcagaaccgggacgtgtacctgcagggtcccgtctgggccaagattcctcacacggacggcaacttccacccgtctccgctgatgggcggctttggcctgaaacatcctccgcctcagatcctgatcaagaacacgcctgtacctgcggatcctccgaccaccttcaaccagtcaaagctgaactctttcatcacgcaatacagcaccggacaggtcagcgtggaaattgaatgggagctgcagaaggaaaacagcaagcgctggaaccccgagatccagtacacctccaactactacaaatctacaagtgtggactttgctgttaatacagaaggcgtgtactctgaaccccgccccattggcacccgttacctcacccgtaatctgtaa

SEQ ID NO: 3999 - DNA, 2217 bp, synthetic construct
  misc_feature 1..2217: note = source = /note="Description of Artificial Sequence: Synthetic polynucleotide"
  source 1..2217: mol_type = other DNA
atggctgccgatggttatcttccagattggctcgaggacaacctctctgagggcattcgcgagtggtgggcgctgaaacctggagccccgaagcccaaagccaaccagcaaaagcaggacgacggccggggtctggtgcttcctggctacaagtacctcggacccttcaacggactcgacaagggggagcccgtcaacgcggcggacgcagcggccctcgagcacgacaaggcctacgaccagcagctgcaggcgggtgacaatccgtacctgcggtataaccacgccgacgccgagtttcaggagcgtctgcaagaagatacgtcttttgggggcagcctcgggcgagcagtcttccaggccaagaagcgggttctcgaacctctcggtctggttgaggaaggcgctaagacggctcctggaaagaagagaccggtagagccatcaccccagcgttctccagactcctctacgggcatcggcaagaaaggccaacagcccgccagaaaaagactcaattttggtcagactggcgactcagagtcagttccagaccctcaacctctcggagaacctccagcagcgccctctggtgtgggacctaatacaatggctgcaggcggtggcgcaccaatggcagacaataacgaaggcgccgacggagtgggtagttcctcgggaaattggcattgcgattccacatggctgggcgacagagtcatcaccaccagcacccgaacctgggccctgcccacctacaacaaccacctctacaagcaaatctccaacgggacatcgggaggagccaccaacgacaacacctacttcggctacagcaccccctgggggtattttgactttaacagattccactgccacttttcaccacgtgactggcagcgactcatcaacaacaactggggattccggcccaagagactcagcttcaagctcttcaacatccaggtcaaggaggtcacgcagaatgaaggcaccaagaccatcgccaataacctcaccagcaccatccaggtgtttacggactcggagtaccagctgccgtacgttctcggctctgcccaccagggctgcctgcctccgttcccggcggacgtgttcatgattccccagtacggctacctaacactcaacaacggtagtcaggccgtgggacgctcctccttctactgcctggaatactttccttcgcagatgctgagaaccggcaacaacttccagtttacttacaccttcgaggacgtgcctttccacagcagctacgcccacagccagagcttggaccggctgatgaatcctctgattgaccagtacctgtactacttgtctcggactcaaacaacaggaggcacggcaaatacgcagaccctgggcttcagccaaggtgggcctaatacaatggccaatcaggcaaagaactggctgccaggaccctgttaccgccaacaacgcgtctcaacgacaaccgggcaaaacaacaatagcaactttgcctggactgctgggaccaaataccatctgaatggaagaaattcattggctaatcctggcatcgctatggcaacacacaaagacgacgaggagcgtttttttcccagtaacgggatcctgatttttggcaagcaaaatgctgccagagacaatgcggattacagcgatgtcatgctcaccagcgaggaagaaatcaaaaccactaaccctgtggctacagaggaatacggtatcgtggcagataacttgcagcagcaaaacacggctcctcaaattggaactgtcaacagccagggggccttacccggtatggtctggcagaaccgggacgtgtacctgcagggtcccatctgggccaagattcctcacacggacggcaacttccacccgtctccgctgatgggcggctttggcctaaaacatcctccgcctcagatcctgatcaagaacacgcctgtacctgcggatcctccgaccaccttcaaccagtcaaagctgaactctttcatcacgcaatacagcaccggacaggtcagcgtggaaattgaatgggagctgcagaaggaaaacagcaagcgctggaaccccgagatccagtacacctccaactactacaaatctacaagtgtggactttgctgttaatacagaaggcgtgtactctgaaccccgccccattggcacccgttacctcacccgtaatctgtaa
